United States Patent Application Publication US 2005/0228172 A9 - sequence listing, part 18

SEQ ID NO: 59376 - DNA, 1158 bp, Homo sapiens
tacatagcaaccacgctgtgtctggcacatttcttaagtggattacatgtatcaactaatttagtccccacaacagcactatgaggtaggtattattattatcatcgtcattgtgcatatggaaattgaggcatacaggggttatcatgtgaccagtgagtggcagaaccaggattcaaactcagccagtctgcatactcaacctctacactctactgcctcctttgaaacaccctttttttcttaagatactgtaaggaagagctttttcttctccagctttggagtggtgccaccgtagaaagagaatgagttttctattattgaagacgctgaaatgaagagtggatagcatcctggttggagatattagagggccaggaggttcaggaccaggggctgtggattatcattttatgaagccttgcactgagtttgctttagcacatcacagtgggttaggttgaagtggatctggccttyaaggtgctgggggacacattttgagtaaggagaagacaagcaggagctgctcaggcagtctgcatctgcagccaaaaaaactcaacataactggcatgtctttagtatctgggacatagtatgctcatagcacctcatggatcatctcacttaatcatcccagcaactctttaagggtaggccaagcagtgcaatgccacccctgttgtgaggatgaatcatctgatttttggagaggttgagcaactggtaggtggcacagccgggttctcgcactgcaaaaccacaggcccctttggtggacagagattccgaggattggatagtccattgggtccatggcccattaccagaatcacgtgagaggcatgtaaaatgcagattcctgggctccaccccaatcacaggagtaccacagcaatcaccaaactataactgagctcccaatttttgtacagtcatgagctaagaattatttgtacatataaacgttgcagtcaatttgatggtatggaacactctttgaatcccaatgacttgaaatgttattctcccaaaaaataagaaatccacttgtctcgttaacagatctcgttacaaaaaaaaaattgtactcaatatattctgaactttatcaataaaagaattgtggaaatgtgttagatttttctcttg

SEQ ID NO: 59377 - DNA, 1158 bp, Homo sapiens
tacatagcaaccacgctgtgtctggcacatttcttaagtggattacatgtatcaactaatttagtccccacaacagcactatgaggtaggtattattattatcatcgtcattgtgcatatggaaattgaggcatacaggggttatcatgtgaccagtgagtggcagaaccaggattcaaactcagccagtctgcatactcaacctctacactctactgcctcctttgaaacaccctttttttcttaagatactgtaaggaagagctttttcttctccagctttggagtggtgccaccgtagaaagagaatgagttttctattattgaagacgctgaaatgaagagtggatagcatcctggttggagatattagagggccaggaggttcaggaccaggggctgtggattatcattttatgaagccttgcactgagtttgctttagcacatcacagtgggttaggttgaagtggatctggccttcaaggtgctgggggacacattttgagtaaggagaagacaagcaggagctgctcaggcagtctgcatctgcagccaaaaaaactcaacataactggcatgtctttagtatctgggacatagtatgctcatagcacctcatggatcatctcacttaatcatcccagcaactctttaagggtaggccaagcagtgcaatgccacccctgttgtgaggatgaatcatctgatttttggagaggttgagcaactggtaggtggcacagccgggttctcgcactgcaaaaccacaggcccctttggtggacagagattccgaggattggatagtccattgggtccatggcccattaccagaatcaygtgagaggcatgtaaaatgcagattcctgggctccaccccaatcacaggagtaccacagcaatcaccaaactataactgagctcccaatttttgtacagtcatgagctaagaattatttgtacatataaacgttgcagtcaatttgatggtatggaacactctttgaatcccaatgacttgaaatgttattctcccaaaaaataagaaatccacttgtctcgttaacagatctcgttacaaaaaaaaaattgtactcaatatattctgaactttatcaataaaagaattgtggaaatgtgttagatttttctcttg

SEQ ID NO: 59378 - DNA, 666 bp, Homo sapiens
tttttaagcaaggggctccgtgtttttcattttatgctgggccctstaagccagtcctggcttttgatatagtgtatctcctccgttggtccttctgggtccccctcatctgcctttagcatgcctgttctatctggtagaggcatttgaagaatgcaccctggcccggccccagtcctgctacctggcacactggactggagttgtttactggtggctgtctcctcccagccggccaccacacctcttgctggcaaggaccccgaccttggcttactgtttcttccgtgtctcctcagccaacagtgtcgcaggtgtgccccatgtggagagggctggagacctgcatgcagagcactgggtcattcaggtcagggggagtgtgcacagctgacctgcctctcaggggcttatgcttgtcttgggcacaagaaagactccaaaaaaccactggtgtttataaaagatagggttcattcaacatttattcgtcatactgttgaatacgtttcatgacagtttgactcacctctatattcccagcacctaatgttatacctggcgcaataaacaggacatttgttaagcagttgctctggtctccgctccctggtaggctgattacggaggacagtccctgacctctaggaggatcggatgcttaat

SEQ ID NO: 59379 - DNA, 666 bp, Homo sapiens
tttttaagcaaggggctccgtgtttttcattttatgctgggccctctaagccagtcctggcttttgatatagtgtatctcctccgttggtccttctgggtccccctcatctgcctttagcatgcctgttctatctggtagaggcatttgaagaatgcaccctggcccggccccagtcctgctacctggcacactggactggagttgtttactggtggctgtctcctcccagccggccaccacacctcttgctggcaaggaccccgaccttggcttactgtttcttccgtgtctcctcagccaacagtgtcgcaggtgtgccccatgtggagagggctggagacctgcatgcagagcactgggtcrttcaggtcagggggagtgtgcacagctgacctgcctctcaggggcttatgcttgtcttgggcacaagaaagactccaaaaaaccactggtgtttataaaagatagggttcattcaacatttattcgtcatactgttgaatacgtttcatgacagtttgactcacctctatattcccagcacctaatgttatacctggcgcaataaacaggacatttgttaagcagttgctctggtctccgctccctggtaggctgattacggaggacagtccctgacctctaggaggatcggatgcttaat

SEQ ID NO: 59380 - DNA, 666 bp, Homo sapiens
tttttaagcaaggggctccgtgtttttcattttatgctgggccctctaagccagtcctggcttttgatatagtgtatctcctccgttggtccttctgggtccccctcatctgcctttagcatgcctgttctatctggtagaggcatttgaagaatgcaccctggcccggccccagtcctgctacctggcacactggactggagttgtttactggtggctgtctcctcccagccggccaccacacctcttgctggcaaggaccccgaccttggcttactgtttcttccgtgtctcctcagccaacagtgtcgcaggtgtgccccatgtggagagggctggagacctgcatgcagagcactgggtcattcaggtcagggggagtgtgcacagctgacctgcctctcaggggcttatgcttgtcttgggcacaagaaagactccaaaaaaccactggtgtttataaaagatagggttcattcaacatttattcgtcatactgttgaatacgtttcatgacagtttgactcacctctatattcccagcacctaatgttatacctggcgcaataaacaggwcatttgttaagcagttgctctggtctccgctccctggtaggctgattacggaggacagtccctgacctctaggaggatcggatgcttaat

SEQ ID NO: 59381 - DNA, 666 bp, Homo sapiens
tttttaagcaaggggctccgtgtttttcattttatgctgggccctctaagccagtcctggcttttgatatagtgtatctcctccgttggtccttctgggtccccctcatctgcctttagcatgcctgttctatctggtagaggcatttgaagaatgcaccctggcccggccccagtcctgctacctggcacactggactggagttgtttactggtggctgtctcctcccagccggccaccacacctcttgctggcaaggaccccgaccttggcttactgtttcttccgtgtctcctcagccaacagtgtcgcaggtgtgccccatgtggagagggctggagacctgcatgcagagcactgggtcattcaggtcagggggagtgtgcacagctgacctgcctctcaggggcttatgcttgtcttgggcacaagaaagactccaaaaaaccactggtgtttataaaagatagggttcattcaacatttattcgtcatactgttgaatacgtttcatgacagtttgactcacctctatattcccagcacctaatgttatacctggcgcaataaacaggacatttgttaagcrgttgctctggtctccgctccctggtaggctgattacggaggacagtccctgacctctaggaggatcggatgcttaat

SEQ ID NO: 59382 - DNA, 1203 bp, Homo sapiens
tccgtcaccttgaatatttatcattgctgtgtgttgggaacatttcaagttctcttttctattttgaaatatacaatacattattgttaactatagtcacccccctgctctgctgttgaacattggaacttgttcctcccatctaactctgtgtttgtacccattaaccaacctctcttcatccttccccaccctcacacasccttctcagcctctgggtgaccatcattctactctctacctgtatgggatcaacatttttagctcccacctatgactgagaatatgtgatatttgtctgtgtctggcttatttcagttaacatataatcttcagttccatccatgttgcttcaaatgccaggatttcattctttttaccaccaagtagtataccacattgtctttccattgagggcatacagagaaattatttctaaataattgatatagaagtaaagatgatgtcctgtggagaactgtgtgctgactcagaacctttgactcagaacctttagcgatgatgaagacattgacgtcaaagatgcatttaaagactttggatgaaattgagtcatgaaactgaaataaagctgtatttctaaatttttgtgcttttaaattttatcagtagttgtaggaggaaagagagaaataaggtttagtaggagaagtacaagtgacagcaagcttttgatgttttttttaatggagcaagcaaaccccaaatataagttgatctttcccaagaaaggatctctaaaaactaactcaaccatgtaaacctttagaattctaaataaatcaagacatatatcttgttgatgtgggtacaaatgaaaaagtactaaaatgctgctggatgcaaaagtttaccaccttcaaaatgaaaaataccctagactccttctaacacgtcatcaagttagaaggagtttgatgactccttctaacacgtcatcaagttcagctctgtctacagtggcattcttcagcttcctgtgaaggcatccatttatcattgtccccaacctttgtatggacatgtgagagaaatcgtgacagaggaggccttgagtggagaggctggaagagtgtcattgtcagctgtacttccacctggggtactccaatgcagacaggtggggtgtggagtgagctcatagcagtgacgtggatgccagtttggatagttacttagaga

SEQ ID NO: 59383 - DNA, 653 bp, Homo sapiens
cataagtgaatgactgattagattaatgaaaaaatgaattaatgtattaatggatgaataaataactacagctcagaagtataagattttcaaataatctggtgctaataataataatactgtaggaaatctgtaaactttgtaataataaacttgttatacttaaaatttcgcccaggcgccagtggctcatgcctgtaatcccagaactttgggaggccaaggagggcggatcacgaggtcaggagatcaagaccatcctggctaacacagtgaaaacccatctctactaaaaatacaaaaagagccaagcmtggtggagggtgcctgtaatcccaactacttgagaggctgaggcaggaaaatcacttgaacctgtgaggtggaggttgcagtgggccgagatcgtgccactgcactccagcctgggccacagaatgagactcagtctctcaaaaaaaaaaaaaaaaaaaaaaaagaaagaaagaaaacaaaaaaagaaaaaaaaaattcaacttttattgtagatacagagtgtacatgtgcaggtggttacatgagaatattgtttgaccagagttttggggtatggatcctgtcacccaggtagtgaccatagtgcccaataggaaggttttaaactcacaccccct

SEQ ID NO: 59384 - DNA, 1061 bp, Homo sapiens
catgttccttcactgacgatttgatttgaatcttgagcagtggtgtactttgtgttttcctgctggtcttgtagcttgtttcagaaatataattctgcatggaaggcagacaaggttctagattattaaagcagccggtgagattaccaagtcgatgataccttaaatcctttctaaggaactcagctgaagtgagatcaaagcagaatggaaatagaagaaatctgatttttggaccaaaaccacttcttaggcacttagctaaactacactttccccgagttgagactgtgtgccccagctgtgccagrcttgggagaggcacccaactcccctgcctcatttcaccctgtgcaatgcctactttctctcccatctcttggcagctgccagagtttgtcatgtaactggactactcatccatgtgtgccaatggcaaaaatgttctctatctttctttgccccatatttcacaggcagaaattcaaatgcaggcaggggccaggcttgtgacagagaagctgaatgaaggcagtagatgtgtttctagtcgttaactcagccagtcttttctgcatcctggtaaaataagtattatcattatctctgttctataggggtgagatacctaggcctaggaagagaactaatgtgccccaggatctcacaggtctgagtcccatggagtttccaaagcactatattgtggctgctacttatccagaggcctcccctggcatctgtcagcctgctgggtgtcctgtcttgatgagagacgctctggagacacagtgctcgcttgtgctggatgacccagagggcaacttttacagcaggggttccgggccagccagcaccctggctgaaggtgcttttgggtagtcctatggctagaggggagcttttctctccctaaaaatctctctcactagatggatgactggctggcctaacaggcttgtttggaaggacttcctccctttgctgagttattcatgtctctcctcagaagagagtcttctagctctttctgctgaagaaaacctcaactgggttatccc

SEQ ID NO: 59385 - DNA, 2257 bp, Homo sapiens
tgcattaccaattcaacagaggacaggcaaggttttgataggtgataataaatccaagtagacacagaatcatgtacaatagcatgcaggcagggacaagaatagctaatgtgtgcaatgttaaagcctggctagagcagatgttgcattaatggcagtgcttggaagggaccggatactcatgtttatcaatgtggctttgccctactggcatatgtctgttaggattatgtgtaaatactctccagtgctgtatattattattttttgagacggagtctcactctgtcgcccaggctggagtgcagtggcacaatctcggctcactgcaagctccgcctcccgggttcacaccattctcctgcctcagcctcccgagtagctgggactacagaagcccaccaccacacccggctaagtttctgtattttcagtagagatggggtttcaccgtgttagccaggatggtctcgatctcctgatgtcatgatccacccacctcggcctcccaaagtgctgggattacaggcgtgagccaccgcacccggcctccagtgctgtatatttctaaataagcaaaatctaggatagggagaatagaaaatattccttctccccacacccaaaagaaacagattttgaagaaaagggaagaaagtcaacccactaatcacagaatctttataagggttcttcactttcaaaacagcaataaatttatactcaggcttccctcctactttcttaaagaatcaaccaggctatagctcatatattgaaagcaaacacatctgccaaggcaaactcttgactgtttaaatctgtttgatgaagtaagtaatctagagatccaccatcttagaaacacaggtctggttcttgactcttttcagtaatttttgcctggcagggcagatccaaatcccagatagatgccttgtaaatgtgtctgccattatataccttgataagtagactggacatgagtgaaggggacatggcaacagtagatggataaatgaaatggatcccctttatttctacatctcaacaagaaactcaataaatcttaatatcaaatacgttaaggtttgattaaaaactactacataccaaacaaaaaaacagaacaaaacaaaatactactatatacctataatgcatagaaaacgtcttaacatctttacaacatgcccattaggaactacagatgcagtatgctaatgaaaagttaaagttttctttcctctccctcccctaaacctgttcatagcatatgtgatttaaaaatatgttcacaaattctttccaaacttctcccttcaagggtggagcttaagtgtgggcttagcgacttactaatccttcagatgactgcagccctagccaagagcctgactgcaacttcatgagagacctggacttttgacttacagaaactgtgagataatgtttgttgttttaagtagctaagttttgggataatttattattcagcaaattggttataaccaatatagcacacaaacctagaatccaaaagtagaaatgactaaaaaaaaaaaatgaacattttaaattaactttcttcccactctaaccacactattttctcaatgggttaacaccatcatttactcagtatctcaaatgagaaacccagaagccatcctttactctccttcccamcaacaaaactgagttgtcatctttttttttttccttatacatcacttgagcccactcctattcttgctgctttaattctgggccattgccatttttcagttactacaacacaggctcccaacatttcttctttcgcttcccagctccatcgcattctctagactaatgccaacaagagcccttttcaaatacatatctgatcatgtcagttaattaaccttcactactggttcccacattgcacaggacaaagttcaaatgtcttagcacagtgtttctgtccctatcctgcagttttctctctcatctcccatgttcatagcctataatctctccaactttcaccttttcataggctgcttagtttcacttagtttctttgtggaagacctttaattttcccttataaatcctactatttttaaaagactcagctcaagttctatctcagaaaaccttaactaccaagatctggttagatgacttgcttactttatcaaagcacttatcacataaagcagtatagtgtcttccactagaatgtgatctcctgaaaaaaaaaatcttt

SEQ ID NO: 59386 - DNA, 715 bp, Homo sapiens
aaacctacttccacatctctgcgagagtggatgcaccaggattttaataaaaatggaagaaaatttacccattagctttgtatgcacaaattggaaaatgttagagacggggtsttgctctgttacctaggctggagtgcagcaacgcaatcacagctcattgcaacctcaaacccctgggctcgaacgagcctcctgcctcagcctcctagagccttggcatgacaggtatgaaccaccatgcccggcatcattttttaaactaaactttgaattttagaaaagtttcagattcacaaaattattgtgaagataatacagaatacctatattccctataccgagttttccctgttaacatggtatattagtataatacatttgtcacaatttttaccctagcactgatgcgctattattaactgaagcccgtagtttattctaatgtccttggtttttccctcgtgtccttctcctgattgagggtcatatccaggacatcacactacatttagatgtcacgtctctcaggccccttgtgtctgtgacagtttctcaggcttgccttgtttgtaatgacattgacattttgaagattactgatctgttttgtagaatttctctcaattgagaattgtctgacttttatctcatgattagcttggggtaatatgttttttggaagaaaaccacagaggtaaaatgccattttcat

SEQ ID NO: 59387 - DNA, 715 bp, Homo sapiens
aaacctacttccacatctctgcgagagtggatgcaccaggattttaataaaaatggaagaaaatttacccattagctttgtatgcacaaattggaaaatgttagagacggggtgttgctctgttacctaggctggagtgcagcaacgcaatcacagctcattgcaacctsaaacccctgggctcgaacgagcctcctgcctcagcctcctagagccttggcatgacaggtatgaaccaccatgcccggcatcattttttaaactaaactttgaattttagaaaagtttcagattcacaaaattattgtgaagataatacagaatacctatattccctataccgagttttccctgttaacatggtatattagtataatacatttgtcacaatttttaccctagcactgatgcgctattattaactgaagcccgtagtttattctaatgtccttggtttttccctcgtgtccttctcctgattgagggtcatatccaggacatcacactacatttagatgtcacgtctctcaggccccttgtgtctgtgacagtttctcaggcttgccttgtttgtaatgacattgacattttgaagattactgatctgttttgtagaatttctctcaattgagaattgtctgacttttatctcatgattagcttggggtaatatgttttttggaagaaaaccacagaggtaaaatgccattttcat

SEQ ID NO: 59388 - DNA, 715 bp, Homo sapiens
aaacctacttccacatctctgcgagagtggatgcaccaggattttaataaaaatggaagaaaatttacccattagctttgtatgcacaaattggaaaatgttagagacggggtgttgctctgttacctaggctggagtgcagcaacgcaatcacagctcattgcaacctcaaacccctgggctcgaacgagcctcctgcctcagcctcctagagccttggcatgacaggtatgaaccaccatgcccggcatcattttttaaactaaactttgaattttagaaaagtttcagattcacaaaattattgtgaagataatacagaatacctatattccctataccgagttttccctsttaacatggtatattagtataatacatttgtcacaatttttaccctagcactgatgcgctattattaactgaagcccgtagtttattctaatgtccttggtttttccctcgtgtccttctcctgattgagggtcatatccaggacatcacactacatttagatgtcacgtctctcaggccccttgtgtctgtgacagtttctcaggcttgccttgtttgtaatgacattgacattttgaagattactgatctgttttgtagaatttctctcaattgagaattgtctgacttttatctcatgattagcttggggtaatatgttttttggaagaaaaccacagaggtaaaatgccattttcat

SEQ ID NO: 59389 - DNA, 1596 bp, Homo sapiens
agggtttttgggttttgttttcattttgtacttgcagccaagatgatgtctgattgctataccataagaggggagttaaaaatggaggagagatgaagatcattggcacctttagaaactttgaagctaggacactgaaaggatgttctggaaggaaagtgactgtatgtatacagatttttttttaagcctttaagaaaataacaatggttatgctagcaggggatatgtataggtttttataccctaaagtataagacttaaatagatgatgaaacaaccaggtactcagtatagaatacctcagtccagatgcatagcttcctggtattcaagatgatacaggaatagagcttagaaaacagagaaattgatgcctagcatgctccttacttacattatttatctatgcacatcaattttcttaccaatcatttttggcaggagtatgaatggtagataattcaagctaaactccttggaatcatatgaaatgtatcttttctctggctacttcatgaaacatcccctactagactgagatacttaagggaacgaactagaagagaggaaagtgtttgtgacagtgggatagggtttggagatgactcaggcaaatgtcaggcaaggaaacatttaagctgcttcaaagtggtttttgaaaaaaaatgattaattttggataagcaatcaggtaaggaagtaatgtctgtcctgtggccatttataaataaacacatacccagagatttcaaaaagtatatctttaagatacattatttagcacttcttttccagtttcattctgttctttggcttagagaagcctccttttttagctgtgtgctgaaactcagttaattgggatgtggttctaatacactaaaaggtgtgcctttaattttcattcccgtcattgaattctgttcccccagtaaagatataataaccatcatggtacaggaaaattagttccctctgtgggcctgtttccacacttgaaacgagacagtggaccaggtgttcataaaggtgcctgcctgctctaacattcaatggtgttggaattctacaacatagattytcttacctttcagtcctgaggtgcagtggacaatgagatagctgatgaccactcattttccagacaagccaagttcatcctctgagagcaaatggcttgcatggctttcttaggcaaagaatagctcatcaacacattatggcaagcctagtatttgcgcttgctttctggagaatttcaaaacacaaataaagaccttttctttcaattattaagatcagaataactttacttagagtgaaaaaaaaaattggaattgccctaaaaactctatgtatggatcctgatttttcaaaagatctcaaattatctttctttttttataaattcctgacaaaaattatctcattcagaactatatagctctaatcaaatatccactgcatgccataatcgggggtaggccatttcagtacctactagacaataaacaactccagaatgtgtcttgtttttatgcatttgtatattttcagagcttggtacagagcatgacatgtagaagacaccca

SEQ ID NO: 59390 - DNA, 1596 bp, Homo sapiens
agggtttttgggttttgttttcattttgtacttgcagccaagatgatgtctgattgctataccataagaggggagttaaaaatggaggagagatgaagatcattggcacctttagaaactttgaagctaggacactgaaaggatgttctggaaggaaagtgactgtatgtatacagatttttttttaagcctttaagaaaataacaatggttatgctagcaggggatatgtataggtttttataccctaaagtataagacttaaatagatgatgaaacaaccaggtactcagtatagaatacctcagtccagatgcatagcttcctggtattcaagatgatacaggaatagagcttagaaaacagagaaattgatgcctagcatgctccttacttacattatttatctatgcacatcaattttcttaccaatcatttttggcaggagtatgaatggtagataattcaagctaaactccttggaatcatatgaaatgtatcttttctctggctacttcatgaaacatcccctactagactgagatacttaagggaacgaactagaagagaggaaagtgtttgtgacagtgggatagggtttggagatgactcaggcaaatgtcaggcaaggaaacatttaagctgcttcaaagtggtttttgaaaaaaaatgattaattttggataagcaatcaggtaaggaagtaatgtctgtcctgtggccatttataaataaacacatacccagagatttcaaaaagtatatctttaagatacattatttagcacttcttttccagtttcattctgttctttggcttagagaagcctccttttttagctgtgtgctgaaactcagttaattgggatgtggttctaatacactaaaaggtgtgcctttaattttcattcccgtcattgaattctgttcccccagtaaagatataataaccatcatggtacaggaaaattagttccctctgtgggcctgtttccacacttgaaacgagacagtggaccaggtgttcataaaggtgcctgcctgctctaacattcaatggtgttggaattctacaacatagattctcttacctttcagtcctgaggtgcagtggacaatgagatagctgatgaccactcattttccagacaagccaagttcatcctctgagagcaaatggcttgcatggctttcttaggcaaagaatagctcatcaacacattatggcaagcctagtatttgcgcttgctttctggagaatttcaaaacacaaataaagaccttttctttcaattattaagatcagaataactttacttagagtgaaaaaaaaaattggaattgccctaaaaactctatgtatggatcctgatttttcaaaagatctcaaattatctttctttttttataaattcctgacaaaaattatctcattcagaactatatagctctaatcaaatatccactgmatgccataatcgggggtaggccatttcagtacctactagacaataaacaactccagaatgtgtcttgtttttatgcatttgtatattttcagagcttggtacagagcatgacatgtagaagacaccca

SEQ ID NO: 59391 - DNA, 2116 bp, Homo sapiens
tagtccagtatataatttcctgtcagctgtgggcccttaagttcctaggacaagcatatggagaagaacggcacaggtggaatgctgtggtgggtggctttggcagccatggcacagaatggccctgtggacagacagtgagggtatggctggtggaggtggtgggaaatactaagcaggaagtcaggatagggcaggaagatacaatttaaagttcttcttaaggacttctgttgagcttgaaagagaaggagcttgagggaaaattctaccctgtgcttattagttcttgcactggtataaagaagtacctgagactgggtaattcataaagaaaagagggtttaatgtctcatgggttctgaggctgtacaggaagcatgagttggcctcaggcatctttcagtcatggcagaatgccaaggggggagcaagcgccttcacatggccagagcagggggaagagagagagaggaaggtgatayacactttaacacaaccagatctcttgagaactttattatgagaacagcacctagggggatggtgctaagccattagaaactgtccccaagatcaaatcacctcccaccaggccccacttccagcattggggattatatgtcaacatggtatttgagtggggaaacagatccaaaccatatcataccccactggacttttcatgaagatgaaatcttgtcccatgtggggctctcagagttgggatgaaggtccctcaacatacattccaaagggccatgtttgaccttacctattactgaaaagctggttgctccttatgacgccgagaagccagttataaaataaggtgagagggaggatccaggatcgagatggatctttacaaaggcaatgattggcacctagggctggtaattcaggagatgacccttagggaggacaatcctcttgtgacccacccagttagactgcagcagtaaatgctaaagaggaataaaagcagttaaaatgccttttgcatcacaagagggagacaagtgggttctccactgagtcataatcaggggcttccattaagcagcccgttaactcagtggtgaggaagccccaggggcccacctacagaaacagacactcataaagaagtctctctgagacacagttcagcctgctctgtttcaaagtgcacacccctgtcttttactaggttccttaaaatgagtcatgtcacttactttggcaactaccactgttacagaatcatcttttatttgaacaccacttggaagtgtacaatgagttttcacataatggctgaaaaaaggctagaaagacagcaacttactgcatcactgctgtatactggggacctcactagaggatttgagccattgtcccatttgaccccaaaaccaaaccctgggtggaggtatcattaggactcccattttagagatgcataaactgaagaaaagagaagtttaatacattggcctgattcacatggcctttaggagatagattctggatttgaactcaggtctcttttcatgacagcacactgagcacactgtcacccatctgtaatatcattaaatccttcagcagctttatgaagtagggtttattagctttgttttccatttagaaaagctaagacccagagaagtaccccaggtcacattgcaagtaagaagcctaggattttaatccaggtattctgatgccaaaaattgtgctcctttcgttataccacagctgctctgacataccacaggacaccttggtgtatgtggagcagagagttcctcaagcctgtctttacgaatgcatgtgaatgcatacatgcagaaaggaacatgccacacagagacatagaggaaaaaagagactaccagtgtaactgattgctagactccaaaattctttggactcctttgaaatcataggttagcagggccattcccgaaaatgaagtaaatctgatggcaggaaatgtggagctcttgtccaatgtcctatttcattctcatgaaatgcaatgctttccatgtaggtcagcggcttgtgcaactagctgcaggcagtgtaagacaggcttgggtcagcccctttgacagtgccaggatcc

SEQ ID NO: 59392 - DNA, 1126 bp, Homo sapiens
aggcctgttatcctagtacaacatctgatctctgtaccttatgycacaatctcaggtgaactgacagggttagtggggagtagtattattcctggaagccattcccaaaccaggtggctagcaatgccttacctacacacggaaataactgagatcaatataaatatatagcactgggctagatagtccattgtccacttggtaccaccatcacttcttttaagtcagataattacttttactactatgactccaaggtagagttagccaataagaaaacttgaacaagattggaaggtgggtagaagtaaggtaaaataatagccatttttttcaggttgtgacagtcagacatggatttgcaatttttccgcaagctcccactcagaggttgtacagaaactgcatttcatagcctttccacaaacttacttcacagtcataatggcaagatatggtagtttcttagactgtctcataatcagtggcttctcccagccccacccccaggctggaggtatggatgtatggatattacctggattcctagacagaggctaatggtttagctggaaggacagggactttgaaagaataagattaccaggcatggtcgttacgcctgcaatgccagcactttaggaggccgaggcaggcacatcacatgaggccaggagtttgagaccagcctggccaagatggcaaaaccccatctctattaaaaatacaaaaatgggccaggtgtggtggtgcatgtctgtaattccagctactcctggggctgaggcacaagaattgcttgaacctgggaggtggggttgtagtgagctgagatcgcaccactgcactccagcctgggcaacagagaatccatctcaaaaaataaataaataaaatatgtaggaaagatgacagggccataaaaacctaagccattcttgaagaagaacaagaggggaagatttgccctagtagatatgaaaataaaggctgccctaccagctatcaagacaaagctacagtaataaaaaaaatagtatggtattggtgcaagagtagactgatgaaatagaagaaaaagcccagaaacaaatgtagagagatatggtgctatggtctaaatgtt

SEQ ID NO: 59393 - DNA, 1362 bp, Homo sapiens
tgcaggagacatggcctggatgccatccccagctggyagctccggggcagacatctctaccttacagatggggaaaggagcaacctacgaggtcggggcagggaggtcatatgggaaacctcgcctggtgagcatggtgacattatacttccccagggtctacgcttttagaaacaaatctttctagaaggcagcctattttctctggtgggtagcagagaatatggcagaagggcctcagagttgtcctgccatgcaggtagggcaggctcctggttccagcctctcccgcttcctgctggctgccccattcatgtgtgcacccagggcaggaagtgaggacctggcaggtccctaggatcagcgctcaaagtcatccactgacggcatggcccttctaacttgaggccccttggcgcagcagacctcagtcttcctagccagcagcgtcaccctagaggggatttcctgggtcccaaagggagggccagagtctgggagaaaggactgtggaggataccagcactgagtcctaagtggcccctttcctcaatctagaatccacagtagcccttgagaaagagtcgctgtggatctgctgggcaaccaaagtcattttcttggcatggtgaccacgcaaaactttcctggtatgatcacatcgaaagttactttttgtttttttaaaaaaataaagacaagagtttcaccatgttgtccaggctggtctcgaactcctgagctcaggcaatccacctgccttggcctcccaaagtgctgggattacaggtgtgagccaccgtgcccggcctagagttagtttttaagtttaaatttgctaatgcattaaaccccaccacacacacaggacacagagggcttcatttctcccagtttcacctggccctgctggcccctggaggcttctgctaagtccctcattggaaccaagaacccgcgcttctgtccccgcgccccccccccccaactcccctgaacaccagcaccagtggactagcacctggagtgtccggtgtgtgagtaggatgctggtttggctaacagggaacgagctgggactccctttatcaacccagtcaggaaacagaccagaagcaaaacccacaaagacagtatgtcctcctgctcagctatgcaaataggtggcagctgtttctgcggctgctttcagggggacagccccacctgtcagttccctgctgactctgttctacctgctctttgagatgagcctgtagccagtatatcccaacacatgccacccactgattccaggggcaccaggccaaggtcctgcccacccactctggtctgctaacctccaggctggtgagaacagct

SEQ ID NO: 59394 - DNA, 1362 bp, Homo sapiens
tgcaggagacatggcctggatgccatccccagctggtagctccggggcagacatctctaccttacagatggggaaaggagcaacctrcgaggtcggggcagggaggtcatatgggaaacctcgcctggtgagcatggtgacattatacttccccagggtctacgcttttagaaacaaatctttctagaaggcagcctattttctctggtgggtagcagagaatatggcagaagggcctcagagttgtcctgccatgcaggtagggcaggctcctggttccagcctctcccgcttcctgctggctgccccattcatgtgtgcacccagggcaggaagtgaggacctggcaggtccctaggatcagcgctcaaagtcatccactgacggcatggcccttctaacttgaggccccttggcgcagcagacctcagtcttcctagccagcagcgtcaccctagaggggatttcctgggtcccaaagggagggccagagtctgggagaaaggactgtggaggataccagcactgagtcctaagtggcccctttcctcaatctagaatccacagtagcccttgagaaagagtcgctgtggatctgctgggcaaccaaagtcattttcttggcatggtgaccacgcaaaactttcctggtatgatcacatcgaaagttactttttgtttttttaaaaaaataaagacaagagtttcaccatgttgtccaggctggtctcgaactcctgagctcaggcaatccacctgccttggcctcccaaagtgctgggattacaggtgtgagccaccgtgcccggcctagagttagtttttaagtttaaatttgctaatgcattaaaccccaccacacacacaggacacagagggcttcatttctcccagtttcacctggccctgctggcccctggaggcttctgctaagtccctcattggaaccaagaacccgcgcttctgtccccgcgccccccccccccaactcccctgaacaccagcaccagtggactagcacctggagtgtccggtgtgtgagtaggatgctggtttggctaacagggaacgagctgggactccctttatcaacccagtcaggaaacagaccagaagcaaaacccacaaagacagtatgtcctcctgctcagctatgcaaataggtggcagctgtttctgcggctgctttcagggggacagccccacctgtcagttccctgctgactctgttctacctgctctttgagatgagcctgtagccagtatatcccaacacatgccacccactgattccaggggcaccaggccaaggtcctgcccacccactctggtctgctaacctccaggctggtgagaacagct

SEQ ID NO: 59395 - DNA, 1362 bp, Homo sapiens
tgcaggagacatggcctggatgccatccccagctggtagctccggggcagacatctctaccttacagatggggaaaggagcaacctamgaggtcggggcagggaggtcatatgggaaacctcgcctggtgagcatggtgacattatacttccccagggtctacgcttttagaaacaaatctttctagaaggcagcctattttctctggtgggtagcagagaatatggcagaagggcctcagagttgtcctgccatgcaggtagggcaggctcctggttccagcctctcccgcttcctgctggctgccccattcatgtgtgcacccagggcaggaagtgaggacctggcaggtccctaggatcagcgctcaaagtcatccactgacggcatggcccttctaacttgaggccccttggcgcagcagacctcagtcttcctagccagcagcgtcaccctagaggggatttcctgggtcccaaagggagggccagagtctgggagaaaggactgtggaggataccagcactgagtcctaagtggcccctttcctcaatctagaatccacagtagcccttgagaaagagtcgctgtggatctgctgggcaaccaaagtcattttcttggcatggtgaccacgcaaaactttcctggtatgatcacatcgaaagttactttttgtttttttaaaaaaataaagacaagagtttcaccatgttgtccaggctggtctcgaactcctgagctcaggcaatccacctgccttggcctcccaaagtgctgggattacaggtgtgagccaccgtgcccggcctagagttagtttttaagtttaaatttgctaatgcattaaaccccaccacacacacaggacacagagggcttcatttctcccagtttcacctggccctgctggcccctggaggcttctgctaagtccctcattggaaccaagaacccgcgcttctgtccccgcgccccccccccccaactcccctgaacaccagcaccagtggactagcacctggagtgtccggtgtgtgagtaggatgctggtttggctaacagggaacgagctgggactccctttatcaacccagtcaggaaacagaccagaagcaaaacccacaaagacagtatgtcctcctgctcagctatgcaaataggtggcagctgtttctgcggctgctttcagggggacagccccacctgtcagttccctgctgactctgttctacctgctctttgagatgagcctgtagccagtatatcccaacacatgccacccactgattccaggggcaccaggccaaggtcctgcccacccactctggtctgctaacctccaggctggtgagaacagct

SEQ ID NO: 59396 - DNA, 1362 bp, Homo sapiens
tgcaggagacatggcctggatgccatccccagctggtagctccggggcagacatctctaccttacagatggggaaaggagcaacctacgaggtcggggcagggaggtcatatgggaaacctcgcctggtgagcatggtgacattatacttccccagggtctacrcttttagaaacaaatctttctagaaggcagcctattttctctggtgggtagcagagaatatggcagaagggcctcagagttgtcctgccatgcaggtagggcaggctcctggttccagcctctcccgcttcctgctggctgccccattcatgtgtgcacccagggcaggaagtgaggacctggcaggtccctaggatcagcgctcaaagtcatccactgacggcatggcccttctaacttgaggccccttggcgcagcagacctcagtcttcctagccagcagcgtcaccctagaggggatttcctgggtcccaaagggagggccagagtctgggagaaaggactgtggaggataccagcactgagtcctaagtggcccctttcctcaatctagaatccacagtagcccttgagaaagagtcgctgtggatctgctgggcaaccaaagtcattttcttggcatggtgaccacgcaaaactttcctggtatgatcacatcgaaagttactttttgtttttttaaaaaaataaagacaagagtttcaccatgttgtccaggctggtctcgaactcctgagctcaggcaatccacctgccttggcctcccaaagtgctgggattacaggtgtgagccaccgtgcccggcctagagttagtttttaagtttaaatttgctaatgcattaaaccccaccacacacacaggacacagagggcttcatttctcccagtttcacctggccctgctggcccctggaggcttctgctaagtccctcattggaaccaagaacccgcgcttctgtccccgcgccccccccccccaactcccctgaacaccagcaccagtggactagcacctggagtgtccggtgtgtgagtaggatgctggtttggctaacagggaacgagctgggactccctttatcaacccagtcaggaaacagaccagaagcaaaacccacaaagacagtatgtcctcctgctcagctatgcaaataggtggcagctgtttctgcggctgctttcagggggacagccccacctgtcagttccctgctgactctgttctacctgctctttgagatgagcctgtagccagtatatcccaacacatgccacccactgattccaggggcaccaggccaaggtcctgcccacccactctggtctgctaacctccaggctggtgagaacagct

SEQ ID NO: 59397 - DNA, 928 bp, Homo sapiens
gcccaaggcctcttccatccttgtcaaggggagtgctaaccttctctcctttcatacaatccagctctcttattttgaatctgcgtgtatatacatgttggttgagaccggtgcagagtgattgagactcgggcttgtgggtctggtaggttcgaggactaactccatcgcttgggagcatgtggccttgggcaagttacttaatccactgggaacaggggtatcgtaaccatcagatggggatactgtctgggattcccatcccctatatgggtctcaatcctctcagtttctgtggtctaacaactatgtgccagggactgggccaggcagaggctggggtatccgttagtaagatgggcacggtccctcgctgcctgctctgatttttgccccagctctgagagcagattaatggtattgtaagtcctcattgtatggttgaagtcgagactcaggggaagagaccctcccagaatctcccagcttgcctcggtaccataggagcaggacccccaggcttccaggtgcagcctcccaggtcggaagccagcaagctggggctgtagaacaggaggtggctgggcctggattcgctggcacygagtccttaaaggaaccctgggtagcagatgtggccgccttgtacatctgctcagcagtgcatcactcctaaaggcccaaagactcgtccggtcctgacactgagcacgtttcagaaaaggtcccaggaaagacatttgaattgccacagctgctcaaggcttgctccctcactcatgctgtgggcaaactaaacatcctctagtgggaccaggcaagcaggggacaaaatggaatgggggtgcgggggaggagaaaataatttgatattccaaaaaatgctgcagagtaatcattttgggggtgaaaatcagaatttcttggg

SEQ ID NO: 59398 - DNA, 732 bp, Homo sapiens
aaaaaaaaaatgggccgggcgtggtggctcacgcttgtaatcccagcactttgggagtccgagttgggtggatcacaaggtcaggagtttgagaccagcctggctaacatggtgaaacctgtctgtactaaaaatacaaaaattagctgggtgtggtggtgcgtgcctgtaatcccagctactcaggaggctgagggaggagaatcgcttgaacccgggaggcaaaggttgcagtgagccgagatcttgacactgcactccagcctgggtgacagagcgggactccgtctcaaaacaaacaaaaaaagatactgagagcgatggctcaggagaaagagaacagaagtcaggaggggcagctggcggcaggatgagccaaggacccgaggttttgcacttaggctgccacgctctttgtgaagggaattcctgtgagtgctcagatttcggccatttgtttccattcagggagaaaccccgttgcacacagcgtgtcggcatggcctggccaacctcacggcagagctcctgcagcaaggcgccaacccaaacctgcagacggaggaagctctgcctctgccaaaggaggccgcatccctgaccagcttggcggacagcgtccatctgcagacgccwctgcacatggcgatcgctataaccatccggatgtggtgtctgtcatcctggagcagaaaggtaagtaagtgggaatactgtccatccttttgactt

SEQ ID NO: 59399 - DNA, 737 bp, Homo sapiens
tcctgtcattataatgccccctgcctttccccagtgccctcctctctccaatccacagggaagtgcctcctgtattgcaatggtgtcctggagcctctgtacctgtgcccaaatggtgcccgctgtgccacctggtttcaagaccctacccgcttcactggcaccatggtgaggagcagctgggtccgtagggattcgtcggtgtccgtgaggagttcggtctggctgggcagcagacccaggagtaaagggattgggcaaggcacgcagaggtagccggttccgtcaggaagtgcttccggagaaggcagtacctccatggggtgtttgttttcttttagacagagtctcgctctgtcacccaggctggagtgcggtggtgtgatctcagctcactgcaacctctgtctcctgggttcaagtggttctcctgtctcagcctccgaagtagctgggattacaagcgtgcaccaccacctgccgctaatttttgtatttttagtagagacagggttttgccgtgttggccaggctggtctcgaactcctgcctcaagtgatttatccgccttggcctcccaaagtgctgrctgggattacatatgtgagccaccgtgcctggcctccataaggtttttgaagggtgaccaggtgtccgcctggacccagctgctggggtactgcatgtgtagaggcagggaggcctgagggctgtgggcagaggctgagggcgtcagg

SEQ ID NO: 59400 - DNA, 547 bp, Homo sapiens
tacgagaactggatcctgaagcctcgagggctgctcgggctctggcaggaagatctgtctgcgatcccgcttgtgatgggccgggtgaatgggggaggggctggggmtgggcagcccccagtccacctgggggggcaaaggagtggtcaggcccaggtctcccccgaaccccagcccacagaggtgccccggtggttggtctggggccgccttcccaggtctttcttccacccagctcttaccttgagagggttgacaggaggctgtgggaagcactgaaggcccccctggggctgtatatccaggatgtagagcaggtcggagggctgggactgtcccggaaggtggatgctgaggtgaagaccattcacagtcccagggccattgttgtggagctgaaggggtggtggtggcagggtgtggggagcttagcgcctcacccggagttctgaggacccgctcaccccagccagggacgcgaggctccccaatacctcataggtgtgctccactttgggtccccagctgtccaagctgttctgctccc

SEQ ID NO: 59401 - DNA, 1218 bp, Homo sapiens
cctgtttattttagggggaactctctccaacttggtttgaatatagcctcaggatttatcaagtgttggatttgtcaaggtgacattttaaagaatgttctaatataattattgcttttcctgtttgcagcctgtgtgtgtctttgaatcgatgttttgggttttgtacttgcttcctgaattggtgacctacagcaaggcactacgctaccctgaactacattatgctgaacaagtaaccagatcccactgagctacccagggtgaggatggcttggaggttgtgttacaaaagctacatgttattttgcccccccacatcacagagatgaaaagtagcatgaaaaattcatcacactccaactcagtcttccctggctataggcagcctgtttctctgacttgctctcagatttgcatttccatgtggattttctgtgcttctgcatgtgtccctttcttttgtttctctttagttttttttttttttttgaagagacagggtcttgctatgttgcccaggctggagtgcagtggtgcartcacagctcacagcagctttgaactcatgggctcaagcagtcctcctgcctcagcctccccagtataggtgtgcacagccatgcccagctaatttttatatttttagtagatatggggactttctatgttggctaggtgggtttcaaacacctgggctcaagcaatcctcctgccacagcctcccaaagcactggggttacaggcgtgaggcaccgtgcccgcccactgtatccttttttatgcccatttgccctctctctcggccagagacatggccataggggactttttggaatgggagggacctccagtttcacctcctcattgtataaaagaggagatgggagccagggccgggagtcaccacgggtaccagaagcagagtgggtcccctacctggggctctctgcctacggctggctgcctggaggcagaggtgttttatttgtagcacctccttttctttactgttaggagatcttgagactgactggccgttgccaaggtctgcactatccatgagctctgaggcactcacatggagacgtgtgacatctcccttggtgggacacctggtcccagctcaagttggaaatagcttctcaagggtcttttccccactttttctcccatctgtctcatgacaagccctttgcctctttgatcctaaatgaa

SEQ ID NO: 59402 - DNA, 687 bp, Homo sapiens
tcattcaaataaaaggctgggcatcggcacaccaaggcctcttccagcgatgctaaccatgtgtggggctaccccatgagagcccagcctgcctctcagcggcgaactgtggcccgcaagacaataaccttcacctgttgtaaagaaacacaacttaagagtcctcaaagtatttttgtgaacctgtataaaaagcgtattataatcctccatttgttcacattctcctaaaagagtatagaaaaagaaaccagccgagctgctgacctagtttagaataacatgtgaacacagcccaaatgcacacccacaagcgcctcgctagcggcgccatccaggttagaaaatctgtgtgcagagtgaggctgggccacgtggtgggggtgctgctggagccaaacgctctctttccataaggtggaaagattaaaacccagctgtttgaaatcacatttactaagtaacatttttttaacttaatggaaaaaagggatgtcaagggaaaaatttatcttcctttccaaaagaaatattggactatggatttataccaaacatgaaaagcgcattaaccgaaaacaggtactccctgtgttgctaaaacagtgattgggaaaaaggaatactaatctgaattgaatcaaactcttaactaaaaagttcmccattgctgtggtttgaaaggat

SEQ ID NO: 59403 - DNA, 576 bp, Homo sapiens
tgaggctgaacagacacctctcatgatcagagatggggtgtgggaaggaaggaagggtggtgaactgggagccggcagcgcgtcccagcgctgaacccgtggcacctggctgcttggctgtgagggctgatcttccagtgcccgagtccccgctgtgagcgccctgaggagcatgtgtgtctccgcactatgccctcagcggccgctggagtggggctcgtgtgtgccctgcagctgaaggggaaggaggcygaactggccggggtgtccgtggttgggggggtacaggtgttgggagtgggaagcatttccagccagtgagtttagggatgctgcctactcggtcctatcttggagagcctcagtgtacctttagcgtgctggagacgccagtggtccttctgtacagaaaacctcagtgttatttaacccagaatgtcctagatgtatgcgaacccagaacactctttccccacaactccagtcagcgcagagtaacctgtgctggaccagatgagcttgaaggagacttcccgctggaccattctcgaacttgagagtggagtagagggtgct

SEQ ID NO: 59404 - DNA, 576 bp, Homo sapiens
tgaggctgaacagacacctctcatgatcagagatggggtgtgggaaggaaggaagggtggtgaactgggagccggcagcgcgtcccagcgctgaacccgtggcacctggctgcttggctgtgagggctgatcttccagtgcccgagtccccgctgtgagcgccctgaggagcatgtgtgtctccgcactatgccctcagcggccgctggagtggggctcgtgtgtgccctgcagctgaaggggaaggaggccgaactggccggggtgtccgtggttgggggggtacrggtgttgggagtgggaagcatttccagccagtgagtttagggatgctgcctactcggtcctatcttggagagcctcagtgtacctttagcgtgctggagacgccagtggtccttctgtacagaaaacctcagtgttatttaacccagaatgtcctagatgtatgcgaacccagaacactctttccccacaactccagtcagcgcagagtaacctgtgctggaccagatgagcttgaaggagacttcccgctggaccattctcgaacttgagagtggagtagagggtgct

SEQ ID NO: 59405 - DNA, 527 bp, Homo sapiens
tagtaagtgtttatagagcacctgtatttggtgctggaggtgtaggaatgaaacgcattttctgccctctagttgctgtccaacctggtggagacagaaaagggaaaaatatgcgcaggtgtcaggcgctctgtaagagggcatgcgtgtggggagcctggggcctgttggcctcagtgggctgttgggtgggcggccatggtcttggtgagaaagttgctggcaggggcactgtgggcgtctgctggtgtactcaggatggccagagcatggcacggggtctccagttggggtggagggagatgagagtggaagggaggcagtgttcggaccgtgagaagmcacaggtgccccggagtgtacactgcatctgaagtgcactggggagcctttgaagagttctaagcagagaagtgatctgagcagatgtgtgttttgagagccgcccctgcactgcagcaccttggataaatgctctgattccctctgagtaaatattgagagtgaacttcatgctctttagataa

SEQ ID NO: 59406 - DNA, 527 bp, Homo sapiens
tagtaagtgtttatagagcacctgtatttggtgctggaggtgtaggaatgaaacgcattttctgccctctagttgctgtccaacctggtggagacagaaaagggaaaaatatgcgcaggtgtcaggcgctctgtaagagggcatgcgtgtggggagcctggggcctgttggcctcagtgggctgttgggtgggcggccatggtcttggtgagaaagttgctggcaggggcactgtgggcgtctgctggtgtactcaggatggccagagcatggcacggggtctccagttggggtggagggagatgagagtggaagggaggcagtgttcggaccgtgagaagacacaggtgccccggagtgtacactgcatctgaagtgcactggggagcctttgaagagttctaagcagagaagtgatctgagcagatgtgtgttttgagagccgcccctgcaytgcagcaccttggataaatgctctgattccctctgagtaaatattgagagtgaacttcatgctctttagataa

SEQ ID NO: 59407 - DNA, 722 bp, Homo sapiens
aaatgtttagtgacccccatcagtttgatgtattatactttaataaaccttactaatggcaaaaatgtaagcttatttcccgagatagatgagatttatttgrcagctttggaaatctgaagtgtccatcaggaagtgcagaggaaacaatgttgattcaagtcctcggcccatttttcaatcaggttatttttgttgttgttattgagttgcatgaacttcttatacatttctatgctaactgttgatgagaaatatggtttgcaaatattttctccaaatctgtaggtcaccttttcactttgttgattgtttcctttgctgtgcagaagctttttaggttgatgtcgtccaaattgtttatgtttactttggttgcttgagcttttggtgtaatatccaaaaaatatccttgccaatactaatgtcgagaagctcgtcccctgtggattattctataaatgttgtgggcttagtccttgtgtttaggcctttgagctgatttttgtgtatgatgtaagataagggtccaatttctttcttttgcacatggaaatccagtttccccatcattcattgaggagactgtcttttccccatgtatcttcttgctgtccttctcaaaaattaattggccctatgtgcttgggtttatttctgggctgctttttctatttcattggtctatgtaactgttttatgttagtattatactgttttaa

SEQ ID NO: 59408 - DNA, 722 bp, Homo sapiens
aaatgtttagtgacccccatcagtttgatgtattatactttaataaaccttactaatggcaaaaatgtaagcttatttcccgagatagatgagatttatttggsagctttggaaatctgaagtgtccatcaggaagtgcagaggaaacaatgttgattcaagtcctcggcccatttttcaatcaggttatttttgttgttgttattgagttgcatgaacttcttatacatttctatgctaactgttgatgagaaatatggtttgcaaatattttctccaaatctgtaggtcaccttttcactttgttgattgtttcctttgctgtgcagaagctttttaggttgatgtcgtccaaattgtttatgtttactttggttgcttgagcttttggtgtaatatccaaaaaatatccttgccaatactaatgtcgagaagctcgtcccctgtggattattctataaatgttgtgggcttagtccttgtgtttaggcctttgagctgatttttgtgtatgatgtaagataagggtccaatttctttcttttgcacatggaaatccagtttccccatcattcattgaggagactgtcttttccccatgtatcttcttgctgtccttctcaaaaattaattggccctatgtgcttgggtttatttctgggctgctttttctatttcattggtctatgtaactgttttatgttagtattatactgttttaa

SEQ ID NO: 59409 - DNA, 1213 bp, Homo sapiens
agtttcttctaatattttatgaccaacattttattaatacaacaatccaagttataccctattatttttctgttttttagtttttcatgtaagcaaatatataatatgcaagtcataacagttttttttttttttaaatatggctctctaattcttaagtcatcaatttatttttcttatcttagtgcactggctaggtcttccagtataataataaacagaattggtggcaattattcttttatgattttaaaaagaattctacttacatttcataaataagaattttgtatactgtgatatattagtagaagtcctttaccccttttccaggataattgtgtaacaatgtattttttggtttgttaataattttattatcgatgggtaatacctttttcaaaggtttttgttggtcggtttgtttttaggaaataagatttaaattgaaattcaatttatttaaagttataggtcaacataggttaactaacctataatgaaacagcctgatatgctctataacttttagagaaaataaatggcggtttattttttctggaactgctttcatttaaattatatatatttttaatttatacataaattatatataattcatatattttgtatatattttatataatattttatatattttttaaaatttctattttctgacagaaactaattcattttaaatttctgctgtagtgttacttttcttcaatttcctgtctaatattttttgtgacttctctatttcttggtttatctatattattaagcttcaaaaatttgtcttcattgctccttttcatctttaatggttattttaaatttcmattaagtctgctttgattattggtttctttgttttctgtgtttttttttctgtttctccaactattttttaaagattgattacttggctagtcgtggtggctcacacctgtgaacccaacactttgagaagctacagagggaggatcccgtgtgctcaggagttcaagaccagcctgggcaacatagtgatatcctgtctcaaaaaaaaaaaaaaaagttggattatttcctttccctcaaatttgtacgttcttttgtctaatgttttagtttttatatctttaaacttcatactttcaattcattacagctaggtatacacaatatttatttctattttcaaacatgttaccgtaatattttctca

SEQ ID NO: 59410 - DNA, 759 bp, Homo sapiens
ctttggctcgctctctcgttctctgggcaccagcgccatgttgagccatgttatgccaagccgagccaagccacgcccaagagcccctgcacagcatcagcagggcagttataccttttacaaacaataggggcatagagccaagtatgagcttacagaaacaggttatataacaagtagaggtgtgtgcctgtgcaccagtcccgctgagtcatgcaggccgggatgtctgcctcggcccattccttgaccaaagcacatccgtgtagcttacagcattcacagcctcagctgaaagctctggtttctagcttcctttaaaaaaaaaaaaaaatactgggagttttcttatacaagtctcctaaatgtwttgtggtgtataagccaagcttctaggtagcttatctaccatattactagaaacagttctatgttcagctttttacattttctttgataatcacatagatatttttaactcttaaatttcctttaagttgaatatggttatttcaagtgactattattgcctggtaaaagttatagtacataatacaaagctaaacagtgattattgtaactattggcgattatgaatggtatggggatttgtcccagtgagattgtggcacttgctgaatgtaccaaaacacatcatgccataacattatgaatgttattttattcaactcaaaaataaaatataagctctggatacaagtgactatggaaagtggaataaaaaacgaaattctctga

SEQ ID NO: 59411 - DNA, 759 bp, Homo sapiens
ctttggctcgctctctcgttctctgggcaccagcgccatgttgagccatgttatgccaagccgagccaagccacgcccaagagcccctgcacagcatcagcagggcagttataccttttacaaacaataggggcatagagccaagtatgagcttacagaaacaggttatataacaagtagaggtgtgtgcctgtgcaccagtcccgctgagtcatgcaggccgggatgtctgcctcggcccattccttgaccaaagcacatccgtgtagcttacagcattcacagcctcagctgaaagctctggtttctagcttcctttaaaaaaaaaaaaaaatactgggagttttcttatacaagtctcctaaatgttwtgtggtgtataagccaagcttctaggtagcttatctaccatattactagaaacagttctatgttcagctttttacattttctttgataatcacatagatatttttaactcttaaatttcctttaagttgaatatggttatttcaagtgactattattgcctggtaaaagttatagtacataatacaaagctaaacagtgattattgtaactattggcgattatgaatggtatggggatttgtcccagtgagattgtggcacttgctgaatgtaccaaaacacatcatgccataacattatgaatgttattttattcaactcaaaaataaaatataagctctggatacaagtgactatggaaagtggaataaaaaacgaaattctctga

SEQ ID NO: 59412 - DNA, 759 bp, Homo sapiens
ctttggctcgctctctcgttctctgggcaccagcgccatgttgagccatgttatgccaagccgagccaagccacgcccaagagcccctgcacagcatcagcagggcagttataccttttacaaacaataggggcatagagccaagtatgagcttacagaaacaggttatataacaagtagaggtgtgtgcctgtgcaccagtcccgctgagtcatgcaggccgggatgtctgcctcggcccattccttgaccaaagcacatccgtgtagcttacagcattcacagcctcagctgaaagctctggtttctagcttcctttaaaaaaaaaaaaaaatactgggagttttcttatacaagtctcctaaatgttttgtggtgtataagccaagcttctaggtagcttatctaccatattactagaaacagttctatgttcagctttttacattttctttgataatcacatagatatttttaactcttaaatttcctttaagttgaatatggttatttcaagtgactattattgcctggtaaaagttatagtacataatacaaagctaaacagtgattattgtaactattggcgattatgaatggtatggggrtttgtcccagtgagattgtggcacttgctgaatgtaccaaaacacatcatgccataacattatgaatgttattttattcaactcaaaaataaaatataagctctggatacaagtgactatggaaagtggaataaaaaacgaaattctctga

SEQ ID NO: 59413 - DNA, 574 bp, Homo sapiens
tggcaattaaagaaggactagggaaattatagaggagaaaagtaggggaaagcatttaaatagaagagagagaaaagctgaaagagacaaggatggtgaagaagttaaaaagacaaagagactcagtagaaacagtagatattaggcaaatgttgatagaaccttatgatcatttgtgctccagatagatccaccacagcaatcaatcaaaagagaaattgccctgtagcctaagtggcagaaactagagaagcaagctgtggtccacttctggattcccacttgaggctctccctcccagcccctgaggtgtgaaagtatacagttcaagataacttttcaaggagacattgattgcacaaaccaaaatgtatgtctgatgctcttgtttttctatgaagattttacagagtcattttcaatagttttaaaattataaataagatgcatacttaggaaataggatagaaaaatcacytgtgatccctcactcgttatattttggcatatgtctgtctgtctttttttttttgagacagagtcttgctctgtcacccaggctggaagtgcagtg

SEQ ID NO: 59414 - DNA, 1089 bp, Homo sapiens
ctatcttatatagttgcttaaaatgttatacataaataaaagatatatatatataaattaaatatcatgtatagagttggttaaaattttatatgtgcatgtaaactacattttatatatatatatatacactatatatataatattttaatattatcgtcagctgtggtgcctagggcagggctagaatgtctaatgacacaatctcatcaggcacaaatttcaggaggtaccaaaaaactgaaactaaactccatagtcacgatactgataaatattcaagacgtatataatgttttaattatacacacacatacagacagtgctaagagaccattagcttttttctcataatttagacaaaaccacttttgcagtgggccctgctgtgaaagtaaagggttaatgttgctcaaagaggggtggggcatttgcccccagctcctgagaggtgcacactagccttggaatgtcctgcctagtaggaatgtgtttatgtactgggggacctggggtaactggacaatctagcaatgtgatttagggtagagggggctattcatagcagagatttttagagtatgagatggacatactaggtgttaacaatatggttaagggtgggagctttgggtcttgaagtatcagctcagacctctggagaggctacagattgaggtcaactctgtgggccattgactgtggagccccagctgaagactctgaacactggggtttgggctagctwccctggttggcgatgcttcaggcattctgcacaagctaagactgtgaggctccgtgctgtccacaactccacaaggaaaggacagaaggagctctgtgtctgcaacttttcctggattctatctgtcccacatccctcttctcttggctgctatgtcaatctgtatccttgccacgtaataaaccataaccatgagtgtaatggtgaggtctgtcatcctatccaaagagccaaactgagggttgtcttggggaccccaaaatttgcagttgatgtcagaacagtgggtggtcatatggggattgtcccctctaacaatgaacttgaccaacccttacacc

SEQ ID NO: 59415 - DNA, 1131 bp, Homo sapiens
tgcatccagaacacaatgactggaaattttcaagggtatctatcctcttgttgttggaccttctttctttaaaaaaagcctgtaaacacattttttcatttgctttttccatattgattgaggcttaatctttaccaatagccattctaggatctggattttcaggatgtaaggtgtcttgtgtactctggtacatagctttgtcctcactctgtagcccaagtgaaggtgataaatatgtagtttggggctggcagcggtggctcagcactctgggaggccgaggagggtggatcatctgagaccagcctgaccaacatagtgaaacgccatctctactaaaaatacatattagctgggaggctgaggcaggagaatcgcttgaatccgggtggcggaggttgcagtgagctgagatcacgccattgcactccagcctgagcaacagagggagactctgtcttaaaaaaaaaaatgttgtctgggagtaataaagccatacttgctctgtagatgcaactgaatgcttggtgtcacttagagcaaatctttctgttccctggtacctttccaaatgtgcagagttctatgaatttttacagacagagcatcaatatgtgcaaattagcaccaaccactctgaaagtatatgataagcaatcctattctcttctgtctgccagttcgtcttcaaacattcccacacagttctccttaggaatttacatgagtacttgaagaacagatcctatggttgagatgtacattgttcaccaaaacctctgtcgagtttcaaaagttccatatgatccacaataacacaatattgaatggaaaaaacaatggtgaagaggaaatataaagacttggacgttgtgacaataagctcatggcttaggttcatgaatgctcaaaactatttttatctggattctcagtgtatgactctcctacagttgctataacaaatcactatagggctgagtccaatggctcatgcctgtaattccagcactttgggaggctgaggtaagcgatcacttaarttctggagattgagaccagccaaagcaacatatgggagccatatttctacaaaaaatacaaaaaattagttggatatgatggcat

SEQ ID NO: 59416 - DNA, 2381 bp, Homo sapiens
gcatatgaatatataaatactaatggtaataggtcacttataagacctcctaccaaagacacctggaaagaaaccaataatgaaaagtgattaaggttgggcctggtggctcacacatgtaatcccaggactttgggaggccgaggtgggaagtttgcttgagcccaagagttcgagaccagcctgggcaagatggcaaaactccactacaaaacacacagagacacacacacacacacacacacacacacacaaattggccagacatggtggtgcacatttttagtcccagctactcacgaggctgaggtgggaggatcacctgagccgaggaggtcaagtgtgtggtgagctgtgatcgcaccactgcattccagccagactgggcaaaagagtgagaccctgtgtcttaaaaaaaaaaaaaaaaaggactaaaagtgttttttaataggcacaagtttctttcattggaaagtttaaaatgttactgaattcccgaagattcattaagttcattttgcacgttgtatttgcatttgcatgagtatagcattgttatggcttatttttgagtaaagttaataagttactaaacctttgagttttatactcatattgttaaatagtaaaataatacccacagagatacctgtctgactttcaatatgtctttattttggtagaatttttataagaaatgacggagaaaactcagaatatttgggagatgttacgcagaaaaatagctactcatcatttctcctgtgtcaaataatattagccatttaataatgcaattgctagcttttgtaacacgtcttcatcatgtatttacatatactgtaaaacaaacataattatttcttagtgataaacactcagatatagactttaacagaaaatccctttacgggaaactgtcctttgactaagtacaactatagtaagcgatttcaaaagaagcagagaaaaaaaaaaaatcccaattatataattccataaaggctacagtgttatagctatttttaactgtaacacctttcagtgtttgtatttcgttaccaaggaattaaactatatataataaatgtgtatatatgcaacatacagtgctatgtgtgtatatgtataaaacataacttgtgtatacatataaaccatatggggtgtgtgtatatatatatgtatataacatatggtgtgtgtgtgtatatagcttaattcatattaaatctgactatagtattatgcataaaagtgatttgtaatttataccgtgcaaataaaataactgcagctgggtgtgtatatatatacacacacatacacatcccacagcaaagattaaattaagaaatacagagcttagctttagttcagcaagcttcaaaagggtttggatgtcagggttagttccctttaactaagcccataagtttttccctttaacacattccttttttctccccatttctgcttaaatgccttactggcagcctggcagcactgactttccttgtattctttttttttttttttttttttttgagactgagtctggctctgtcgcccaggctggagtgcagtggcacaatctcggctcactgcaagctccgcctcccaggttcacgccattctcctgcctcagcctccggagtagctgggactacaggcgcccgccaccgcgcccggctcattttttctatttttagtagagacggggtttcaccgtgttagccaggatggtctcgatctcctgactttgtgatccgcccgcctcggcctcccaaagtgctgggattacaggcgtgagccaccgcactcggcctctttttttttttttttttttttttttttttttgagacggggtcttggagtacagtggtgcaatctcggctcactgctaccsccacctcccaggttcaagtgatccacccacctcagcctcctaggtagctggaactacaaggcgtgcgtgtgacaccatgcctggctaatgtttgtatttttttgtagagatggagccttggtatgttgcccaggctggtctcaaactcatgggatcaagtgatcctcccgcctgaacctccaaaagtgctggggctacagacatgagccaccacgcctggcccctctctgtattctatctcctctttgggattaaatatagacagtaaatgttacaatggtacctataattagaggtaaacacacatagtggaaatatacaagagaaatttatcccatgacaagattcccctctttgtcctatccgacaccactagttcttcagtaattttaactagtattttatagctcacttagatggtggttttcagagaaaagaaagttatttataataaaatgtgattgattaaca

SEQ ID NO: 59417 - DNA, 670 bp, Homo sapiens
gggatccctgccttacagcttgagctgcaattctgaaacaatgggaaaagtccgattcacatccactgtcaaaaagtttcaggaggcttacatgtttgatacatagttgcaagtttctgccaatgcagactctatatgatatgtcctgtgtcactgaggggcttckggaggcttctgatggaccacttagtagcaggtttgatttttttcctttacacagtaaataaacccttggatagactaaattttaaaattcatcgttatcttctcacagtgtttgaagatttttttcctaattcctttcccatcaaattttgataccacagataaactttctatattttatgtaataactaatattttcatgcttcccctcccaataactggttttcacttccttgggggcagtattgcccctattgagaattcatggggtaaattaatagcattgaaacagcagatttcagagtactcttaaatataatattgttgtataaagctcaattaccataactcttatccgaggtagttgttaaaattttttaaagaaacacttcaggtctgctctgaagcatcctcttggattgcacagcaaagttcttagtttgggaaaactatgatcaccaaaatgggttcctgaacccagtaccccattacctgggcaagctgt

SEQ ID NO: 59418 - DNA, 670 bp, Homo sapiens
gggatccctgccttacagcttgagctgcaattctgaaacaatgggaaaagtccgattcacatccactgtcaaaaagtttcaggaggcttacatgtttgatacatagttgcaagtttctgccaatgcagactctatatgatatgtcctgtgtcactgaggggcttctggaggcttctgatggaccacttagtagcaggtttgatttttttcctttacacagtaaataaacccttggrtagactaaattttaaaattcatcgttatcttctcacagtgtttgaagatttttttcctaattcctttcccatcaaattttgataccacagataaactttctatattttatgtaataactaatattttcatgcttcccctcccaataactggttttcacttccttgggggcagtattgcccctattgagaattcatggggtaaattaatagcattgaaacagcagatttcagagtactcttaaatataatattgttgtataaagctcaattaccataactcttatccgaggtagttgttaaaattttttaaagaaacacttcaggtctgctctgaagcatcctcttggattgcacagcaaagttcttagtttgggaaaactatgatcaccaaaatgggttcctgaacccagtaccccattacctgggcaagctgt

SEQ ID NO: 59419 - DNA, 670 bp, Homo sapiens
gggatccctgccttacagcttgagctgcaattctgaaacaatgggaaaagtccgattcacatccactgtcaaaaagtttcaggaggcttacatgtttgatacatagttgcaagtttctgccaatgcagactctatatgatatgtcctgtgtcactgaggggcttctggaggcttctgatggaccacttagtagcaggtttgatttttttcctttacacagtaaataaacccttggatagactaaattttaaaattcatcgttatcttctcacagtgtttgaagatttttttcctaattcctttcccatcaaattttgataccacagataaactttctatattttatgtaataactaatattttcatgcttcccctcccaataactggttttcacttccttgggggcagtattgcccctattgagaattcatggggtaaaktaatagcattgaaacagcagatttcagagtactcttaaatataatattgttgtataaagctcaattaccataactcttatccgaggtagttgttaaaattttttaaagaaacacttcaggtctgctctgaagcatcctcttggattgcacagcaaagttcttagtttgggaaaactatgatcaccaaaatgggttcctgaacccagtaccccattacctgggcaagctgt

SEQ ID NO: 59420 - DNA, 653 bp, Homo sapiens
tatgaggatgatgcgttcacagataattgagaccaatgtgaattacacatttatattaagagcctgttagaagatattccagcctacctatatcactaatgtgacacaatcttaatatgatttatttctttggattaaggtggkggcattctttcttttttttcttttataaccccagtttaaactataaatctcacatgaatccagaaatgtactttgaaaagaagttaagctactcttgtagagcaaacaagaattttttattatttatttatttatttatttatttatttattttttgagatggagtctcactctgtcgtccaggctggagtgcagtggcgcaatctaggctcactgcaagctccacctcccatgttcacgccattctcctgcctcagcctcccaagtagctggaactacaggcacctgccaccacgcccagctatttttttttttttttttttttgtatttttagtagagatggggtttcaccatgttagccaggatggtctcgatctcctgacctcgtgatccgcccacctcggcctcccaaagtcctgggattacaggcgtgagccaccgcacccgcccgaagtttttattttttgagaactccttctgttccaatctcttgcactccacatggatc

SEQ ID NO: 59421 - DNA, 653 bp, Homo sapiens
tatgaggatgatgcgttcacagataattgagaccaatgtgaattacacatttatattaagagcctgttagaagatattccagcctacctatatcactaatgtgacacaatcttaatatgatttatttctttggattaaggtggtggcattctttcttttttttcttttataaccccagtttaaactataaatctcacatgaatccagaaatgtactttgaaaagaagttaagctactcttgtagagcaaacaagaattttttattatttatttatttatttatttatttatttattttttgagatggagtctcactctgtcgtccaggctggagtgcagtggcgcaatctaggctcactgcaagctccacctcccatgttcacgccattctcctgcctcagcctcccaagtagctggaactacaggcacctgccaccacgcccagctatttttttttttttttttttttgtatttttagtagagatggggtttcmccatgttagccaggatggtctcgatctcctgacctcgtgatccgcccacctcggcctcccaaagtcctgggattacaggcgtgagccaccgcacccgcccgaagtttttattttttgagaactccttctgttccaatctcttgcactccacatggatc

SEQ ID NO: 59422 - DNA, 651 bp, Homo sapiens
ctatcctctcaagatagtggtaccttaaatagctagcctctgcaattaatctggactgaaaaaaagttaggtgcaacaataggcttctcttttctatgtcttcatttttcaatttatcctgctctgttagtttttatgtgtaggaaggaaacatttattttaatctaagaaatatttatgtcttataatctagtaatagaagaagacaaaaaagatgtgatcttgaaaatatgaataattaaaatcaaattttgcaggccaactatttttctgagcatgtgtytctgtgtgtgtgtgtatgtgtgtatgtgtgagagagagagagagagaaagagagaaagaccaagagaaagataggtgtaaaggagagagagccttttctcataactatttttcctagcttaatattttaattgagagatattctagcacaattctacagtaatacaggcttgtattggataaaatacatgcctgacagacatgggagatggtaaaaggccctcttggttaagtactttctaagaggaaagatttagctgactctgaagcccaaataaaataatgcttgcaccctataatatatgagtccattttgaatttacataaatttctttaataccatgttttaatttatcttcttttcttaaa

SEQ ID NO: 59423 - DNA, 741 bp, Homo sapiens
agacccaaaccatatcaccgtattagacccactctgcattctgcagctctttatcctttcatactaaagtctcaggatgaccaaaacatttcttcttggttctcactcagatgggcttcttcccaacttaaaatataaactactcttcaggaagcactgtggcttactaaataaacagtgagtgatcctcagtgctcatcacagtgctgggcacttggtcaatgctcaaaaacatgctgaataaatgaatgcaaaaaagtctttcctcctcccacacctgcccrccagagaacaacccccctttgactataattttcctttacctacccaaatcttataaaatggccccacccatatctcccttcgctgactctctattcggactcagcccgcctgcacccaggtgaaataaacagccttgttgcacacacacacacacacacacacaaagaattcattgctcttagcttttgcactgtttccttttgtagaccttcctacataagtatttgtgtatatgtctgtatttcctgaatgaataactccaagtttcttgaggataggggcctgtcccttattaatttctctaagtccaacacattgtacagtgccaagcgcagagtggaggtactcagtataagtctgttgaaattcagtgaaatgaaggcagagtgatctgatactttggctggctttcagaaaaatcatctagcataggaatagaaaaactagaaatgaagg

SEQ ID NO: 59424 - DNA, 1144 bp, Homo sapiens
agctaagcaaaataaggcaaagaatgtaaaggagctcgtacaagacaacacacactttgggaaagtggagtccagggcccaatatccatggccatgccatgcatgggagcccagcaatcttgtgggtagcagactccatagaaaagtttagactcccttgattttccaatagatgagcagagaaggaaggcagttaagcctacatttacccttgggttgcaggttcctaacctcttggcaagaggaaacagcttagtccaggcatcaaagagaaatgtaatcctgataaggagaagatcagacctttctccaaaccacgtacacaggactgtmccacccagaggcttggaggagcataccctctcacttgcctgtgagattcgggagcccactgtatagggagccagtagactgtaattgtttcttgtttaattttccacctagtatgaactgaatcaagattcgggccactatacttcaaataacacccaagttattgttccagatattgtggttcagttattcggtcaagcaagaatagcctacaatatttaagtcccaggttcattgtaaacaaagaaaatccatcaaaaagggaatctctcaagagaaatccttttcaggctttcattacagactgcaaaggataaaaatctttcatcttgctgatggtttcatgtccccatacgcatttacagtgaggtgattgtttcgctcagctgaaggcttatctatcctttgaagaaagcccatctaaacagtgattgttaaatatgtgtgtggatcctggaaacccttcagggtcacccagattaacatccagacccagtatagtgccaaagagagaaaatgttgttaaactgtcactctcagacattcaagctctctcagctatcagatggatattttatcaagcagctgcctccattttaaaaactgagttagaaggaacttgcttccttcaggtctcacaaactcagtgtggaaccttggattaactgtgtaaccgctccatgcctctctttagatatctgtaaagtgggaaaagtaactgtccttatctcccagggcttgtactagccaaagttctttagcaaaatagaaccactagaagtaatagtatgtgtgtgtatatacaaatata

SEQ ID NO: 59425 - DNA, 1240 bp, Homo sapiens
agtttgagaccagcctgaccaacatggtgaaatcccgtctctactaaaaatacaaaaattagcaggttgtggttgcgcataatcccagctactcaggaggctggggcaggagaatcgtttgaacctgggagacggaggttgcagtgagcagagaccacaccaccgcactccaccctgggcaacagagcaacactctgtctcaaaaataaaataaaataaaataaaatgagggtgagaagtgagttcctgctgagagatttcccttgaatctgaacaccccgaatctgttgaccctgactcttcagcttctagggatgaacttggttatcaaaggcatttggggaactgatgaatggtatacatttaatgcctatgtatagcttatattcctgatggcaactttttagggccaatcctcagttctctactatctccagccatggggaccttgtgatctccaaatgcagtaggcaacaggctccctaaatataaatcttgggtctttgagttctctgtaactttccattggtagcaaacagtgaaatgatggatccccaggtggggcagtgtgtccatatagttttgtattataatgtttaattttgaaagtatataatatttaatttggaaaaagtacaagtatgtcagtctggttttcttatataaactacaaaatgagaaagataattggttggttgggatatgaagacaaaaaaattataaggatttagatacaggtttagggagagagcagaattaccttcttaattagcttatgaattagcttcataattatataatatgtgtccattgtatatatatgtrtgggtgtgtatatatatatgtatataaataaaatgtatagaggtcattttaccttccagtttttttagttagccaattataaatatttttccatgtggtttcaaaagccttcatgctttatatgtctaatagatgagagctatcccattgtgttgctataggataattctcttaaaccttatgccctgttgaatttttggtgtgagatttttgagtaaagggtaatagacagtgtgaccactcttgctttaattgccttattgtgaccaaaaagctggcccaaatttacatgacaatcagcatagggaagtgaaccaattttcaattcaactttaccatcacattcccttccagaagccactttcaaaatattacctcccacattgcacactccccttaccacaaacacccacag

SEQ ID NO: 59426 - DNA, 2338 bp, Homo sapiens
tccactatcaagaggcagtatccatggccaaccccttgaatttaggctagccttgagactggctttgactcttagaggttaccaaagtctcactctgccagttctgagcctaagcctcaagaggcttacatgcttctactctcttttggaaatgtgtcagcatcttgagattaaccccgggcaacaacatagcccagccttcattgtcatcccagattgcagctatcctagaccagccactccccagcccacctgccacctggctgcagacttatgagtgagtccagaagtcagccatgtctgccctaggtcagctaaaccaaccagctgggcartaacaaatgcatgtttactctttttatctgatgagttttggagtggttttttactcaaaaataacaacagatatggctataatggtgtctagtcatgtgatcctgattgtgctacatattccccaagtccctgcattctgaatggcagaaaaagtgtctggcccacctttatcctggctcagctggatttatgctgaccccagggaaacctttcaagaactgtggcaccaacatgggtattgtcctggtgtggcatccctcagagataggctcctaggaggatgcagttagcagcaatgaaggctataatgaagccaggggtcatgcagcttctgatgctctggttcactgaatctttgcttacgggatcccccatgaacatcaaaggtctgtcctacttaatgcttacatgcagcctgctgtggactgaattgtatcccttgacaccctcaattatatattgaagccctaatcccaaatgtgatggtatttggacatgggcctctgggaggtaattagctttaggtgaggtcatgaacgtggggccctcatggtggaattagtgcccataaaagaagagacagcagaaagcttgctgtctttctcttccatatgaggacagagtgagaaggtggcccttggcaagccaagaagagagccctccccaggatctgaccatgctggcaccctgatcccatacttccagtctccagaactgtgagaaaatcaacatcttttgctaaagtcaccagtctatggcattttgttatggcagcccaagcaaaccaatacacagctgtttctagttaggcagatgtttggcattgcttcaggggaaaataatttgaatgggtaaatgcatttgtcaccccagatgttttgacaatgtgaagagttagccaatatgtgctgtggctgtcccagggagtagtttctgggcaaagggagaaatttcaggaggggccagaagaagcttctttctcttctgtgccggggaagtacatgtttctttttggaaagagggtaatagaactctacatgcaagtcattggcccatggagatttgtgaaaagcatataattcccttcttttagctgtaaacagtctataataagcaactccccctgctagtatgcaattgtcttccttctttcagacactggtagccactgttgaatttatgattcaaaattgcagtaagtaaagtcttcacaaagtcaaatgagtgagaagcagaatgcaaaaagatgaaaagtatgactaggacttgtgccaagcagaatttccagtacccactcaactggcaggtcttaaggcataaatattaggcatggacaattgtgcccccactgagacttcctccatttcctgtaaaccaataattctgttaattctaaatttgtcacgtgtgacttggagagtcaggttttctgaccacacaactgcaggttgagcagactttttctacacgtgccagttaacaaatattttcagctttcctagctatgtatgtgataacagctcaattctgcagtcatcccatgaaagcagccacacacaatgcttggatgaatgagtatggccatgttcctaaaacacaccttaaagaggtgacaggctagattttgcctgtgggctgtattttgccaaggcctgctctactgggttaaatgaatcaatggccacaaggtgctttaagcagtgcctgtaatatggtgatctcttctgaagtgttggctattggttttccttgcctgtcatgaagcaagacagcagggactatgcgctaagaaaaatgggctaggaggtggtaaatttaagactcagtcaaataaaaacaagaataggggtgaatttggtagaggtacgcggagccccagtacttggtagagaattaatttaaacaatgtaattctcttgtggtgccaggaaattaacatgtcatgtcccatcatgaaataggctatcctccctttctcttccatgttagctttatgaactaa

SEQ ID NO: 59427 - DNA, 1477 bp, Homo sapiens
ttttaatccgaggaattttatctttatcttgaaaatatatataaatgtttattaggttatttaatttcatctagatcttaggaaagcatggattactaaaattcatatgtggtgtaatattttgccgcctccttgtgaagcatgacttggaaaaagaaatacatagttagttggctgaccctggttgctatcttgggcaaatcatttacctctctgaacttggctcttttctgtaaaatgaaaacagaaacggaggtcatagatatggcatagaagtttggtgaggcccagttgtgttaacatttgtgaaagaatttgtaaacattaaagtttaaagtttatttgttatgcatatataaacattattattcttatatgtgattaaaactgtagccaagcactctaaaagttttcctcctacccaagagatatcaaaatggaatgctgtgttttattacaactggctaaaacaactaaagaactttgaatgtgagtgactcccttacatcagtccttactgaaaactttctttacctacacacaataggacgtgttggaacactcatggacactgcacagctctattggctcgttccacactgtgcagagagcaagtttgacataaccactatcaactcatttgtgaatacaggttgaatatcccaaatgtaaaaatgaaaaactaaaatgctcaaaaatccaaaatgttttgagcactaacatcatgctcaagggatatgctcattggaacatttaggattttagatttttggatttaggttgctcaatcagcaagtctaatgcaaatattccaaaatctaaaaggatccaaaatctgaaacacttctgattgcaagcattttggatatagaatagtcaaccttaaaattcccaacttttacctttaacctagttcagtacatttcttcattggaatatattctcttgcctggcaaccaaataaacttgtacattctttttttaaaaatgtatttattggccaggctcagtgctcatgcctataatcccagcactttgggaggctgaggtgggcagatcacttgaggtcaggagtttgagaccagcctggccagcatggtgaaamcccgtctctactagagaaacacaaaaaattagctgggcatggtgatgcgtgcctataatcccagctactcgggaggctgaggcaggagaattgcttgaactcaggaggcggagcttgcgtgagctgagatcgcgccactgcattccagcctgggcaacagagcgagactctgtcacagacacacacacacagacacacacacacacagacacacacacaaagtatttattattgctgggagcggctgcacgcctgtaatcccagcactttgggaggccgaggtgggtggatcatgaggtcaggagattgagaccatcctggctaacacggtgaaaccccatctctactaaaaatacaaaaaaaatagccagg

SEQ ID NO: 59428 - DNA, 558 bp, Homo sapiens
caggtgtcctgattccacttcaagacttgaccagatgaccacaaagtactcttccagctcaaaaactccattcctgttacctttacagttttatctctacttstcatccactcagagccaactctttagttaaagttgacttctgtttcccaagcatgttttcctttgcttatgtagcccacttttctctcttaaaaaaaaagtcttatgccattgagccagttaaagtccaaaacaattgaagttcaaaggaatccatgtccaaattgtattcttttaccttgttcagtcaaacaaaattaaatcctagaattcatccttgtattagtctgttttcacactgctgtaaagaatggcccgagactgggtaatttataaacaaagaagatttaattgactcacagttctgcctggcttgggaggcctcaggaaacttataatcatgacagaaggcaaggggaagcaaagactttcttcacatggcagcaggaaagagaagagcaaaggagaaacttccagacacttataaaaccatcagatctcctgagaatgcactca

SEQ ID NO: 59429 - DNA, 558 bp, Homo sapiens
caggtgtcctgattccacttcaagacttgaccagatgaccacaaagtactcttccagctcaaaaactccattcctgttacctttacagttttatctctacttctcatccactcagagccaactctttagttaaagttgacttctgtttcccaagcatgttttcctttgcttatgtagcccacttttctctcttaaaaaaaaagtcttatgccattgagccagttaaagtccaaaacaattgaagttcaaaggaatccatgtccaaattgtattcttttaccttgttcagtcaaacaaaattaaatcctagaattcatccttgtattagtctgttttcacactgctgtaaagaatggcccgagactgggtaatttataaacaaagaagatttaattgactsacagttctgcctggcttgggaggcctcaggaaacttataatcatgacagaaggcaaggggaagcaaagactttcttcacatggcagcaggaaagagaagagcaaaggagaaacttccagacacttataaaaccatcagatctcctgagaatgcactca

SEQ ID NO: 59430 - DNA, 740 bp, Homo sapiens
aaatcaaccattcatattttatagagagctatgtttatggaacacattatctgacctagtaggtttatgtttctgaccaattttgctctttacaaatattgtcacattactgcatagatttgggggttgaaaaggacttagatgatgccttttaccaaaagaatgagttcgaacaaattgcttcatctttttaggccccatagttttcccataggaaaaactgaaaaaataaaaaagcagtttcctatagctgtgaagatgaaatgaaataatgcacttctatagcctagtaggtrgcagagactgagggatgaattggtattgctatatgcattgatattgttataaatccatactaattagttatgaataacacctggcttccaaatgttttatttttatttatttatttttttttgagacagagtctcactgttgcccaggctggagtgcagtggcgtgatcttggctcagtgcaacctctgcctcccaggttcaagtgattctccttcctcagtctcctgagcatctgggattataggcacctgccaccacacccagctaatttttgtatttttagtagagatggggtttcaccatgttggccaggctggtctcgaactcctgacctcaggtgatccacccccgcttggcctcccaaagtgctgggattacaggcgtgagccaccacgcccagccccaaatgctttaaatgatcacaaaagaaagtaaccaattgt

SEQ ID NO: 59431 - DNA, 619 bp, Homo sapiens
ccattagatccctggttctggaaggatataactgtgaaactaactgaatctcatatattaatccacctgtacttcctgagcaascacataggttgctggcctgggtattatgttcagcaatttctgctacatactgtttatgagatgcctcagagccaggcccaaggaatgttaggacaaactacccagaattagcaaccttcaggaaaatgaaggggaccttttaatttttctctccctaatcatagtttatcctcatgtacccatgctgcattgggtaggccaggtgtgttaggtagaataatgtgcttcctccccagagatgttcacatcttaatccctgaaacttgtgactatgttaggttacgtggcaaaaaagactgaaggttgcagatggaattaaagttgctaattaggtggcaagattatctcagactatctgggttcaatgtaatcacatgggttcttacaagtggaggagggcagtagaagaaagagaattagtgagatggcagcatgagaaagatttgactcagtgttgtaggctttcaaaatggaggaagagggtcactagctaagaaatgtggacagtgtctagaagctgaaacaggcaagaaaa

SEQ ID NO: 59432 - DNA, 971 bp, Homo sapiens
tgcatgtttatacaacacacacaatcttgaaactattgtttcatgaagtagtaatgactctcagtatgtgtaatgtgctctgatttttctccttttttttttttttgtgacaggatctcactgtgtcacccaggctggaatgcagtggcagtggcatgattatagctcattgtagcctcagtctcccgggctcaagtgatcatcctgcctcagcctcccaagtagttggaactataggctcatgccactgcgcacagctgatttttaattttttaattttttatttttttagtagaggcagggtcttgctctgttgcccaggctggtttccacctcctggactcaagcaatcctcccaccttggcctcccaaagtgctgggattccaggtgcgagccactgtgcctggcctaccatttttatttagatacwaatttttttaagtattgccaacaactgaggggagaaaaggaaaaaaaagtagtcatggcccactaaattaatttcttataatctactaaaggatccctatattgcagtttgaaaaacagtgctatacaaatggcagtaaaacattaacatctgggaaatttttttttttttgagacggagtttcgctcttgttgcccaggatgtagcacaatggcgcaatctcagctccacaacctccacctcccagtctcaagcgattctcctgcctcagcctcccgagtagctgggattacaggcatgtgtcaccatgcccagctaattttgtagaggcgggatttcaccatgttggccaagctggtcttgaactcctgacctcaggtgatccgcccaccttggcctcccaaagtgctgggattacaggtgtaagccaccacgcctgggcccatctgggaaatcttgatgaaggtgtccaagaattctttgtatgactctagtatttttttggaaatataaaattatacaaataaaaaataaatttaa

SEQ ID NO: 59433 - DNA, 714 bp, Homo sapiens
gatcatttcatatttcaaaataaagaccaaagactagggaggacacaacttcaggataaaaggcagcctttcaaattaaatttaattaaataaacttagttttctagaacactcaaaatattgttcttattatattattgatgagtagaaattattcacggaccagtacaatgtcactgacaattacttggcaatcacaggtgtacactatagatacagaatcagaaagacataatcctaggtcctggttctgacagctatcacctatgtgatcttggagaaattgcataatttttgtgaacctctgcaaaatgaggtatcttatccatacatttcaataaggtatttcatctawacattgcaataactactaccacacaacattctatgaatatcaaatttgatcacatatgtaaagtgcctcatataatgcctggagtatatcaaacactcttatgatatcatttgttatgatgattgacttaaaatcatgaggttcataaatttggagaggagactttaattcttatgaagtgttccagcctgtaagttggccatcttgacaggctgggaagtggcagagaccaaaagcgagcactttgaggatggggagtggaaaaataatttatgttgaatgagttggccaagtataaattttcagcagattatagtagaagctatgagtattcacaaagaggggggatgtgcacaggt

SEQ ID NO: 59434 - DNA, 2195 bp, Homo sapiens
atgtctgcctctaaaacatatgattctttctctctcttctctctatgcttctttctttctttctttctttctttttactatattttgctgttcactattgattactctgtcttttgtctcaagaagtcaagagttactacataacctggctttagttaagaataagggggtttagtgtacacataagtaaaggaagctggataaactctattagttctcttacgaaaagtgccctgcagtccttgagatgtacatttcacaaagcagttttctgctcagaactttgcaatgtgtcagtatcaggttatttacaattgtatttccttgctaaggtaaaaggtaagcacggaatgaaagcaattatcactgttttttttccacttgggctgtcaatgcaacatgcccctgtgacacagcctgacacttttaatgaattcccagggttatgcgacaataccactaactcccacatctgtcacacagagatagggattttccttccgttcttgagcttggrtgctaacattctttgtcccagctaatgaggatctgactttttatcctggaacagggcactttaataatgtgtctctacagatcgcattgaacaaaccctaaagtgtgattcagtcagagctgatttcaaatacaatgtttaataaaattcagtggaacatgcttagaggctttttttttctgtctgtagagatagctgcatacgttgtggagtcaaaaggcccatagttaaatttaccactttctctttacaacagcactgctttgccataagtccacttctatttgtgtgcttgcttgcctctttactgacaggaacttctgaaaatttgttttgttgaactctggcagaaatgcatgactgcctagcattatttaactgtctgtgctaggagaggcaagctcgcctctaggagtcataggctcttggctccctactcaaacatgactacaaagtgtctctactcactctgttttgttatgaaagacagaaaatagtaaaaggcaggatgtaaggtatgagccaatgtaggaaaacagttttgggggatgaaattcattagtatggacacttgacatgaactgaagcatgagttataatagagctttagcaacttaggaagaaagggtacaggctaagaaagacagcttcctaaaagtttgcctctggatggaaagtagaagcttaaaatattgggtgcagtcataagagatgtggtcaatatagcctagtttggaaaactcagaagatttattgcattaggtgagctgcatcaaggaaagtccaagtagcgggtaacattagcctcagatgtgcagctctggacagatttcaaattctcagcacattcaaagtgagatagtagccacgaactggagggatcatagggagataggatccagctagaagaagctatggagggtgtctaactccagcaagtggactgcagaagagaaaaaaagcttcagtactagaggaaagcttaggtaccacattccaaaatcaagccaaaagcccaatgatgacacctcaacaaagaaaagaagcaagacaagaaagggcatgagagaattggcaaagtgggttaaattttaaataaagcgttcattaagcaaagtgatcagtaagcaaacagatgtgaggttaaatgactttggcaaagcggacttttcccaggtgcagaaagagataaagggcaggctgcaatttgaagagcctataggtgcctaggacagaatccagtcaaaggcagcaaaactagctccatgtcccataggttgaggtgctgatgttcttaataggtagcttaccaagatcaatgttgttcagaaactgagtgaacctcaatgtacaggtggaaggcattagcagcaccagcagagaattgctgaaagaaggcaggggctgattggcaagtgaaatcatcacaggaagtttataaataaattctaataattagtcagctttagacaagcatttaaaaaaatacagcctctgctgctactgccttcaaaacaacaaagacaatgaatctaaaattcccttatatatattaatatatttaatcttgctatatgcataccacgtttattacctttgtttttcacttgcgaaaatccacggatagaaaatttttgtgacttttttaatatcccacagcagagccatgaagtaacat

SEQ ID NO: 59435 - DNA, 2195 bp, Homo sapiens
atgtctgcctctaaaacatatgattctttctctctcttctctctatgcttctttctttctttctttctttctttttactatattttgctgttcactattgattactctgtcttttgtctcaagaagtcaagagttactacataacctggctttagttaagaataagggggtttagtgtacacataagtaaaggaagctggataaactctattagttctcttacgaaaagtgccctgcagtccttgagatgtacatttcacaaagcagttttctgctcagaactttgcaatgtgtcagtatcaggttatttacaattgtatttccttgctaaggtaaaaggtaagcacggaatgaaagcaattatcactgttttttttccacttgggctgtcaatgcaacatgcccctgtgacacagcctgacacttttaatgaattcccagggttatgcgacaataccactaactcccacatctgtcacacagagatagggattttccttccgttcttgagcttggatgctaacattctttgtcccagctaatgaggatctgactttttatcctggaacagggcactttaataatgtgtctctacagatcgcattgaacaaaccctaaagtgtgattcagtcagagctgatttcaaayacaatgtttaataaaattcagtggaacatgcttagaggctttttttttctgtctgtagagatagctgcatacgttgtggagtcaaaaggcccatagttaaatttaccactttctctttacaacagcactgctttgccataagtccacttctatttgtgtgcttgcttgcctctttactgacaggaacttctgaaaatttgttttgttgaactctggcagaaatgcatgactgcctagcattatttaactgtctgtgctaggagaggcaagctcgcctctaggagtcataggctcttggctccctactcaaacatgactacaaagtgtctctactcactctgttttgttatgaaagacagaaaatagtaaaaggcaggatgtaaggtatgagccaatgtaggaaaacagttttgggggatgaaattcattagtatggacacttgacatgaactgaagcatgagttataatagagctttagcaacttaggaagaaagggtacaggctaagaaagacagcttcctaaaagtttgcctctggatggaaagtagaagcttaaaatattgggtgcagtcataagagatgtggtcaatatagcctagtttggaaaactcagaagatttattgcattaggtgagctgcatcaaggaaagtccaagtagcgggtaacattagcctcagatgtgcagctctggacagatttcaaattctcagcacattcaaagtgagatagtagccacgaactggagggatcatagggagataggatccagctagaagaagctatggagggtgtctaactccagcaagtggactgcagaagagaaaaaaagcttcagtactagaggaaagcttaggtaccacattccaaaatcaagccaaaagcccaatgatgacacctcaacaaagaaaagaagcaagacaagaaagggcatgagagaattggcaaagtgggttaaattttaaataaagcgttcattaagcaaagtgatcagtaagcaaacagatgtgaggttaaatgactttggcaaagcggacttttcccaggtgcagaaagagataaagggcaggctgcaatttgaagagcctataggtgcctaggacagaatccagtcaaaggcagcaaaactagctccatgtcccataggttgaggtgctgatgttcttaataggtagcttaccaagatcaatgttgttcagaaactgagtgaacctcaatgtacaggtggaaggcattagcagcaccagcagagaattgctgaaagaaggcaggggctgattggcaagtgaaatcatcacaggaagtttataaataaattctaataattagtcagctttagacaagcatttaaaaaaatacagcctctgctgctactgccttcaaaacaacaaagacaatgaatctaaaattcccttatatatattaatatatttaatcttgctatatgcataccacgtttattacctttgtttttcacttgcgaaaatccacggatagaaaatttttgtgacttttttaatatcccacagcagagccatgaagtaacat

SEQ ID NO: 59436 - DNA, 1340 bp, Homo sapiens
aaaaggattgacatcactaccttagaaaaataagagctaacctttactgtctagaaaccagaccctgttcatttaacagctcatttaatcccctaaaaggtaagtgctattcttattcctgggcacagagaggtgaggtgtctagcctcagtcacacagtgtgaacgtggcatggctgggcttcacccttggtagttgtcctccacagaccatgctaataaccaagagcattggaccatttccatgttcattcctccatcctttgggttatcctgagtcatcaccaagagcttacacccatctcttgcttacacccatcttgtcttggctttaactctattttcctagtatcatcaggtcacacttttatgtttcctggaaatccggaactgagctggaagaatattcagagatgcttaatactcatgtcttcatattgttggatgatatgtgggtcccctattctaagwgatttcaatcatagctgatatttattgaatacttactatacactgggtccatccttagaactttatgtgtgtgatggacataaagatggaaacaatagccactggggactattgcagggggtggggagggaggggagtgtggattgaaaaaactgcctattgggtactatgctcactacctaggtgatgggatccatatcccaaacctcagcatcacacagttatacccatgtaacaaacctgcacaggcactccctaatctaaaataaaatttgaagaagccccagttgcctaacggataaggcattggcctcctaaaataaaatttgaaattacaaaaaaaaagaacttgacatgtgttaacacttttacttctcactcccaccctgtctgatgaggtgggccctcctgtcatcacattctgcagatgaggaaatggaagcatggagcatggctgggataatgtgcccatgtcacacagagaacgtaacgaggcattcctgggattcaaacccaggctgtccgcccacaggcactaggcttctccccacttcactttactgtctttttcaagatagcctcttctgcatagtaattctatgaaacgtttttagagactctgtaatgaaagggttccatggttaaataagtttgtatgagtagggttaaataaataaaactaaagtttctctactcctggatttttttttttttttttaatttgagagggagtctcactctgttgcccaggttggagtgcagtggcatgatctcggctcactgcaacctccacctccctggttcaaacgattctcctgtctcagtctcccaggtagctggcactacaggtgtgcaccaccacgtctggct

SEQ ID NO: 59437 - DNA, 851 bp, Homo sapiens
gagagtttctaaacagcccaggtaagtcatttaacttttggtacctcattcttttttttttttaaatcagcagaagggagacaaaggacttaatttctgaggttaaggtaagaattataagtgaatgatgtatataaagctttagaactgtggatgacacctagtaagtggtcattaaatgttagttattattatcattattactactattctggaatacaggaggatttcagcaagtagttaaccatgagaactctaagggtaggcacacttagttatttctgcatcttctgcacatgccagtttgtgagctggtagctttcaatagatgcctttcagatgacttgagtggttcaataaatcagtatgagagaaatatcccttttctctaggaagctcaatgcactggtttcgcttattcttgaggttctagacacaagatcctggcctgggtgggaagacccccatgctattgggccaactctctaacttcatgtgtatcctctgtgagttcctctcgggtaaagaacatttgacccctgtttagaaagattgcctttcacaatctcccagttctctagatgggacttgctgagctgacagaatgtacagagaagaactaactatttttagggtgaactagaaagattagaactttgttctcttctcaaatagcaaacctccaacctgtgaaaatccagagaggagttattgaagagtcggaggtagggaggtgtttgttgcactctttattattattattattgytttttgaggtggagtctcgctctgtcacccaggctggagtgcagtgacacgatctcggctcactgcaagctccatctcctgga

SEQ ID NO: 59438 - DNA, 1120 bp, Homo sapiens
tgcatcccttaagcaaatatgtcacaaaaggcttgaatccaactctccttgagtccctcctcacttttcccaacaagaggccatccagccatcccaggactttgcagacactggccacactaatccaatgtggaatgtaaaagcaattaaagccacgtattttattgtttagcttttccataaagctaaaacttttccattcaaagaattatcctgtgtcttgagagcacttactttcttagggttaaaagtctcatttctttggatggcataatggttatgacagattgtaatttggtttttaatacctttaatggacagaactaaaagttgggaaagttatgatgttagtctgcttaattttttctttttaccattttaaccattttgaagtgtatggttcagtggcattaagtacattcacagtgttgtacaactatcaccaccattcacctccagaacctttttaccatctcatctgaaactctgttcccactaaacaacagctcctcattccccctctcttcccagtccctggcaaccacaattctactttctgatatttgaattgaaggtacctcttatcaatggactcatacagcatttgttcttttgtatctggcctatttcacttagcataatgccctcaagatttacctacgttgtggcatatatcggaatgttcttccttttaaagtctgaataatattccattgtatgtgtataccaagttttgcttatccattcatccatcagtggtgcctcgtttaattttacaggtcaccatgatccaaaagcctgggaaccactgatccagcctgtgcatatacttcagtgatgggcgctcactcctctccccatgcgggcattcctttgtattttatatttaatcctagaggacaacagagtgtggatctaactgaggaggagcatggtgggaaggtagagaatgattttcaggtctcaacagcctccctacacttcaagatttgttccctmcctttgtggatctagaagcccattgttcaactttcctaggaatgatcagatcctggaaaaaaggacaccaaccgcctacatttccagccacctttgcttgtgagggaatattatcaatgca

SEQ ID NO: 59439 - DNA, 1120 bp, Homo sapiens
tgcatcccttaagcaaatatgtcacaaaaggcttgaatccaactctccttgagtccctcctcacttttcccaacaagaggccatccagccatcccaggactttgcagacactggccacactaatccaatgtggaatgtaaaagcaattaaagccacgtattttattgtttagcttttccataaagctaaaacttttccattcaaagaattatcctgtgtcttgagagcacttactttcttagggttaaaagtctcatttctttggatggcataatggttatgacagattgtaatttggtttttaatacctttaatggacagaactaaaagttgggaaagttatgatgttagtctgcttaattttttctttttaccattttaaccattttgaagtgtatggttcagtggcattaagtacattcacagtgttgtacaactatcaccaccattcacctccagaacctttttaccatctcatctgaaactctgttcccactaaacaacagctcctcattccccctctcttcccagtccctggcaaccacaattctactttctgatatttgaattgaaggtacctcttatcaatggactcatacagcatttgttcttttgtatctggcctatttcacttagcataatgccctcaagatttacctacgttgtggcatatatcggaatgttcttccttttaaagtctgaataatattccattgtatgtgtataccaagttttgcttatccattcatccatcagtggtgcctcgtttaattttacaggtcaccatgatccaaaagcctgggaaccactgatccagcctgtgcatatacttcagtgatgggcgctcactcctctccccatgcgggcattcctttgtattttatatttaatcctagaggacaacagagtgtggatctaactgaggaggagcatggtgggaaggtagagaatgattttcaggtctcaacagcctccctacacttcaagatttgttccctacctttgtggatctagaagcccattgttcaactttcctaggaatgatcagatcctggaaaaaaggacaccaaccrcctacatttccagccacctttgcttgtgagggaatattatcaatgca

SEQ ID NO: 59440 - DNA, 805 bp, Homo sapiens
ttcccttcctggagccttgggtcccaaatgcctgggggacaagggtaaccaacacaactcttgctcacagrcacaggaaggaaccgcagagtctgtccagatcaatgcccttccactttgtagatgggtaacagcccagagatgggaagggacgtgcacaagatgggaatgggcgtgcccatggttgcaccgtgtggtgtggcagagcaggaactggaacacaggcggctggaagtgaaagtggagctcaggctttttagcagttactatgtgtgatttccttttcatcatcacatcaaccccatttttttttttcagatgagaaagggaaagtgacctcctaagattccacagcgagaggtgctaggggagccaggctccaaattaaggtcagcacccaaactctttccactgggctgccttggatttacatagatatccctacagtcccaagctgctaagtccagacctagcacttactgaaagctgctggcagtttctctgggaaataccatgagttacaagcagatgaaacaaatgagccagttgccctcacgcatcagtccattaagaaacaaatggaaatacattttttaaaaagtaataaaaaggcagggtgcggtggctcatgtctgtaatcccagcactttgggaggctgagacaggaggatcacttgagcccaggggtacaagaccaacctggacaacatagtgagaccctgtctcaataaaaaaaattttaaaaattattttaaaaaagaaataaatgaatgctttttaaaaaaatagatcaaggaaaccattt

SEQ ID NO: 59441 - DNA, 805 bp, Homo sapiens
ttcccttcctggagccttgggtcccaaatgcctgggggacaagggtaaccaacacaactcttgctcacaggcacaggaaggaaccgcagagtctgtccagatcaatgcccttccactttgtagatgggtaacagcccagagatgggaagggacgtgcacaagatgggaatgggcgtgcccatggttgcaccgtgtggtgtggcagagcaggaactggaayacaggcggctggaagtgaaagtggagctcaggctttttagcagttactatgtgtgatttccttttcatcatcacatcaaccccatttttttttttcagatgagaaagggaaagtgacctcctaagattccacagcgagaggtgctaggggagccaggctccaaattaaggtcagcacccaaactctttccactgggctgccttggatttacatagatatccctacagtcccaagctgctaagtccagacctagcacttactgaaagctgctggcagtttctctgggaaataccatgagttacaagcagatgaaacaaatgagccagttgccctcacgcatcagtccattaagaaacaaatggaaatacattttttaaaaagtaataaaaaggcagggtgcggtggctcatgtctgtaatcccagcactttgggaggctgagacaggaggatcacttgagcccaggggtacaagaccaacctggacaacatagtgagaccctgtctcaataaaaaaaattttaaaaattattttaaaaaagaaataaatgaatgctttttaaaaaaatagatcaaggaaaccattt

SEQ ID NO: 59442 - DNA, 805 bp, Homo sapiens
ttcccttcctggagccttgggtcccaaatgcctgggggacaagggtaaccaacacaactcttgctcacaggcacaggaaggaaccgcagagtctgtccagatcaatgcccttccactttgtagatgggtaacagcccagagatgggaagggacgtgcacaagatgggaatgggcgtgcccatggttgcaccgtgtggtgtggcagagcaggaactggaacacaggcggctggaagtgaaagtggagctcaggctttttagcagttactatgtgtgatttccttttcatcatcacatcaaccccatktttttttttcagatgagaaagggaaagtgacctcctaagattccacagcgagaggtgctaggggagccaggctccaaattaaggtcagcacccaaactctttccactgggctgccttggatttacatagatatccctacagtcccaagctgctaagtccagacctagcacttactgaaagctgctggcagtttctctgggaaataccatgagttacaagcagatgaaacaaatgagccagttgccctcacgcatcagtccattaagaaacaaatggaaatacattttttaaaaagtaataaaaaggcagggtgcggtggctcatgtctgtaatcccagcactttgggaggctgagacaggaggatcacttgagcccaggggtacaagaccaacctggacaacatagtgagaccctgtctcaataaaaaaaattttaaaaattattttaaaaaagaaataaatgaatgctttttaaaaaaatagatcaaggaaaccattt

SEQ ID NO: 59443 - DNA, 805 bp, Homo sapiens
ttcccttcctggagccttgggtcccaaatgcctgggggacaagggtaaccaacacaactcttgctcacaggcacaggaaggaaccgcagagtctgtccagatcaatgcccttccactttgtagatgggtaacagcccagagatgggaagggacgtgcacaagatgggaatgggcgtgcccatggttgcaccgtgtggtgtggcagagcaggaactggaacacaggcggctggaagtgaaagtggagctcaggctttttagcagttactatgtgtgatttccttttcatcatcacatcaaccccatttttttttttcagatgagaaagggaaagtgacctcctaagattccacagcgagaggtgctaggggagccaggctccaaatyaaggtcagcacccaaactctttccactgggctgccttggatttacatagatatccctacagtcccaagctgctaagtccagacctagcacttactgaaagctgctggcagtttctctgggaaataccatgagttacaagcagatgaaacaaatgagccagttgccctcacgcatcagtccattaagaaacaaatggaaatacattttttaaaaagtaataaaaaggcagggtgcggtggctcatgtctgtaatcccagcactttgggaggctgagacaggaggatcacttgagcccaggggtacaagaccaacctggacaacatagtgagaccctgtctcaataaaaaaaattttaaaaattattttaaaaaagaaataaatgaatgctttttaaaaaaatagatcaaggaaaccattt

SEQ ID NO: 59444 - DNA, 749 bp, Homo sapiens
tcccagtgccagagctcaggatagccagggccagactagcaacaaggatgacagggccaagtccctgaagacagccctgagggcttcaatccccaggatgtggcccagctcagcctgcagatttggggagaagggagatgaaggccacrtgccaggctggggttgtccaggaaagtccttcccctctctgggcctcagttaccccaactataaaatcagtagactcttgactgctctgtggccctcaacttgaaaatgcagagaaagggcaaaggcaccatctcttctcccctactctcctctccccttccctcccctccctccctccctctcttctcttctcctctcctccttcctcctgtggctcctcttacaagcacctgccctgcagttgaagaaacacgtccatgtgtttgcacttcaagaataggtatacataggccgggcacggtggctcacccctgtaatcccagcactttgggaggctgaggtgggcatatcacctgaggtcgggagtttgagaccagcctgaccaacatggagaaacccagtctctactaaaaatacaaaaattagctgggcatggtggtgcatacctgtagtcccagctactctggaggctgaggcagaagaatcgcttgaacccgggaggcggaggttgtggtgagccgagatcacaccactgcactccagcctgggcgacaagagtgaaactccatctcaaaaaaaagaaagaaagaatagatata

SEQ ID NO: 59445 - DNA, 749 bp, Homo sapiens
tcccagtgccagagctcaggatagccagggccagactagcaacaaggatgacagggccaagtccctgaagacagccctgagggcttcaatccccaggatgtggcccagctcagcctgcagatttggggagaagggagatgaaggccacatgccaggctggggttgtccaggaaagtccttcccctctctgggcctcagttaccccaactataaaatcagtagactcttgactgctctgtggccctcaacttgaaaatgcagagaaagggcaaaggcaccatctcttctcccctactctcctctccccttccctcccctccctccctccctctcttctcytctcctctcctccttcctcctgtggctcctcttacaagcacctgccctgcagttgaagaaacacgtccatgtgtttgcacttcaagaataggtatacataggccgggcacggtggctcacccctgtaatcccagcactttgggaggctgaggtgggcatatcacctgaggtcgggagtttgagaccagcctgaccaacatggagaaacccagtctctactaaaaatacaaaaattagctgggcatggtggtgcatacctgtagtcccagctactctggaggctgaggcagaagaatcgcttgaacccgggaggcggaggttgtggtgagccgagatcacaccactgcactccagcctgggcgacaagagtgaaactccatctcaaaaaaaagaaagaaagaatagatata

SEQ ID NO: 59446 - DNA, 749 bp, Homo sapiens
tcccagtgccagagctcaggatagccagggccagactagcaacaaggatgacagggccaagtccctgaagacagccctgagggcttcaatccccaggatgtggcccagctcagcctgcagatttggggagaagggagatgaaggccacatgccaggctggggttgtccaggaaagtccttcccctctctgggcctcagttaccccaactataaaatcagtagactcttgactgctctgtggccctcaacttgaaaatgcagagaaagggcaaaggcaccatctcttctcccctactctcctctccccttccctcccctccctccctccctctcttctcttctcctctcctccttcctcctgtggctcctcttacaagcacctgccctgcagttgaagaaacacgtccatgtgtttgyacttcaagaataggtatacataggccgggcacggtggctcacccctgtaatcccagcactttgggaggctgaggtgggcatatcacctgaggtcgggagtttgagaccagcctgaccaacatggagaaacccagtctctactaaaaatacaaaaattagctgggcatggtggtgcatacctgtagtcccagctactctggaggctgaggcagaagaatcgcttgaacccgggaggcggaggttgtggtgagccgagatcacaccactgcactccagcctgggcgacaagagtgaaactccatctcaaaaaaaagaaagaaagaatagatata

SEQ ID NO: 59447 - DNA, 643 bp, Homo sapiens
ttttttctttttttttttttttttttttgagatgaagtctcgctgtgtcacccaggctggagtgcaatagcacaatctcagctyactgcaacctctgcctcccaggttcaaacaattcttgtgcctcagccttcccagtagctgggattacaggcgcatgccaccaagcccggctaatttttgtatttttagtagaaatggggtttcaacatgttggccagctggtctcaaactcctgacctcaagctatccacccgcctcggcctctcaaagtgctgggattacaggcatgagccactgcacccggcctctattcactttaaaatgatcatgatctactaattgctttcataacccaatagttaacaatctccattttgaaaaataggggcatagaaatctacttgggtttgaattcagattctgctacttccaagctgagtgcctttaagcagggccctcagcctctgattctcggtctgtaacctagaggttttaatcccgcctgctggagaaggtggatgtgaggattaaacatatataaagcccaaagcatcacagctgggcatagcgagcagtcagtaaaaggcagaggttgatatgatgtcacatgagaaactgagactctcagcggaaggaatga

SEQ ID NO: 59448 - DNA, 643 bp, Homo sapiens
ttttttctttttttttttttttttttttgagatgaagtctcgctgtgtcacccaggctggagtgcaatagcacaatctcagcttactgcaacctctgcctcccaggttcaaacaattcttgtgcctcagccttcccagtagctgggattacaggcgcatgccaccaagcccggctaatttttgtatttttagtagaaatggggtttcaacatgttggccagctggtctcaaactcctgacctcaagctatccacccgcctcggcctctcaaagtgctgggattacaggcatgagccactgcacccggcctctattcactttaaaatgatcatgatctactaattgctttcataacccaatagttaacaatctccattttgaaaaataggggcatagaaatctacttgggtttgaattcagattctgctacttccaagctgagtgcctttaagcagggccctcagcctctgattctcggtctgtaacctagaggttttaatcccrcctgctggagaaggtggatgtgaggattaaacatatataaagcccaaagcatcacagctgggcatagcgagcagtcagtaaaaggcagaggttgatatgatgtcacatgagaaactgagactctcagcggaaggaatga

SEQ ID NO: 59449 - DNA, 643 bp, Homo sapiens
ttttttctttttttttttttttttttttgagatgaagtctcgctgtgtcacccaggctggagtgcaatagcacaatctcagcttactgcaacctctgcctcccaggttcaaacaattcttgtgcctcagccttcccagtagctgggattacaggcgcatgccaccaagcccggctaatttttgtatttttagtagaaatggggtttcaacatgttggccagctggtctcaaactcctgacctcaagctatccacccgcctcggcctctcaaagtgctgggattacaggcatgagccactgcacccggcctctattcactttaaaatgatcatgatctactaattgctttcataacccaatagttaacaatctccattttgaaaaataggggcatagaaatctacttgggtttgaattcagattctgctacttccaagctgagtgcctttaagcagggccctcagcctctgattctcggtctgtaacctagaggttttaatcccgcctgctggagaaggtggatgtgaggattaaacatatataaagcccaaagcatcacagctgggcatagcgagcagtcagtaaaaggcagaggttgatatgatgtcacatgagaaactgagactctcagcrgaaggaatga

SEQ ID NO: 59450 - DNA, 1667 bp, Homo sapiens
cagttcatgactgggctagtgctcaccaaatatattcatccacgactctgcacttccatgactctgctggaaactgaccacctgttcccttgcagttatactgggaccaggtgatccagttctgatggattgtgagtggcagtgacattcaccacatccagtctgaggcaacttgaagctaatatgcctcttccccccatttctccccctgccgcagcagccccagaggctacatgttccacataatgtcactacaaaattaaagagaactcaatcttcactgcacttcagcacaatgagaggtaaactattattgggtgaaactgctgaaatgcttgtggcttattactgcaccacagcttagcctagcccaactaatacataattagtagcccttgggaccttaaagaataaagttatctctctttcccatatccactccaagttatgcaaactttttggtttttggttttgttttcatataacgcgtcaaattcccgcatcatgccaactgacatctgcttaacaccttccggtttgtgtagacccttctccaagtcactgcctaaaactcaccaggcccagatgggcctgacttgcaggagaacagcactaacccccttccagttccactttcaggaatacaccacagggccacatcaggtatgcttggaggcgggaggtcagatcctactgttgatgcaaacagagtttcctgtgaatcaaattctaagtatatatcacaggtgcctctgctaagcccatcttctcatacagttttttttacaattgacttttaatggagaccaggaggtcttgttacatttcctcctaggccaccatgccagcctcaggacagctatcacccagctgaagagaacaggacaaactgggaggaatagtaagaaagtgctgcaaagtgaccacagtttggtgtttcttgctcctgacgggcccaggcttttgggggatgggaatgtgtggagaagggaaggttctatgtgagctatgcttacggtgactgtttcttccaagctgaaaatcgagatacagatcagatcgaaatattatgccattttggagagggagggattcatttggatgctcacattagagaattttaggaatatagagggatcctttgggtcaagaagaaagaattcttggccactggggttgccaggacaatctggaggatatgattatagcagatcctgttgtctggaggcctcagagaaggaggggctctaaactgctaccatgaaggttgaaagagagaagaaagatccagcggagtgctattcacaggtagaaagcaaggaaattgggctttagggccaagaaagcctgcattcaaatcctggctccaccatcgatctatcgtatgaaccttaagcatgtccctaaacttgtctaagctatagtttcctcagttgaatcttatttaaatggcagcatccaccttgaggaactgcttgaaagttgaagggtgaaggtctatagacgccatgctcttagaaagcactggagctgggagtgccattgctcaccccttcttctttcactaggtactaggtaattytcccactatgtacttaactgccactagataatggatgaaaagaactgtctgtaaagagaaaaatattcactttagtaaaaatgtt

SEQ ID NO: 59451 - DNA, 615 bp, Homo sapiens
aaatgatcagattagaatgggtggcaacaactgttgtgataaccaagactctacacaatagcgcttatattccacctctctccctgggcactcagcaagcaagtgcagacgggatcttgctcatgcacccagcactccctctgggcccatgggaaaagtgaggcttccctccctcagggatgctctcccaaggtgttgcggcaatcttcctgagccagaaaccagaaggaggaggacagcagctaatgtttattgagtgttaacaaggtactttacttaatcctccaattaacctatgcaataaaaaacaytgcccccattttatagatgaggcaactcaaggtctcagagataaagtgacttgtccaagatcacagaactaataagcaatggaacccagagcttgaagggaggcctggctcaaagcaccatatgctatggtgctgtgggaagtgtagagataaatattccagaataaatatgccctttaaggagttttcagtccagttggcgagatgaacaggtacaagtaccataaaatacaaagtagaatgtgataaatggtaacgtacaagcaatgaactccaggtgcccacaggaataattcatttgacc

SEQ ID NO: 59452 - DNA, 987 bp, Homo sapiens
gtgcctgccagtgactatgattgatataaagacaaaaagacatagtaatatcttccatgccctcaaaaaactcactgtttatgagaaattaagacacatataaacaaaagcacaaaagtgatacatcttggtgaggattaggatagatataatattagctgacagatacaaaagagaaaaagggaggaaaaaaaagggagagaaagagaaagacagggcactgattctgttccaggcactgtgtgtcattctttacgtgctgaatgtttttatccttaaaacagccctacacaataggtctgattgctttcagtttttatcacgtttcataaaagagakaacttgcttttatactcacacagcaaaacaacagaaatgccggaattcaaatccaggcctgtctgatttacaagtcatgtttttaattgctcaggaaccttacctcctatcataaaaatcagaactcaaggcaggatgcctgaatctgcttggagatgtcacaaaggttgggtgagggtacagagatcacactaggaggaaaactggttaagctaacaggactccacttggacaggaagggattgttgaaaagcatttcaccttcagagaggagcctgcagtttgctgtggtgcggcgttcattgattctacagtatgatgtgatgtagggtggacagatccaggtatgcttacaggtctacaccagaacattccttaaatcctttgctgaggagcatgaacttagtccctcaggaggacaccttaggaggtttcacaatgagagatgccattgaaagttgagtgtgggagtacagtgaaaggttgaagctgcacagacacgatgcagttaagcagtgaccgccacagccaggcaagtgccggggaggacttgtacaaggagggctctgggtcagatacagcaatgcatggagagacatgaaagcctatatatttgtgacagtgatatcagattacagtagacttagg

SEQ ID NO: 59453 - DNA, 987 bp, Homo sapiens
gtgcctgccagtgactatgattgatataaagacaaaaagacatagtaatatcttccatgccctcaaaaaactcactgtttatgagaaattaagacacatataaacaaaagcacaaaagtgatacatcttggtgaggattaggatagatataatattagctgacagatacaaaagagaaaaagggaggaaaaaaaagggagagaaagagaaagacagggcactgattctgttccaggcactgtgtgtcattctttacgtgctgaatgtttttatccttaaaacagccctacacaataggtctgattgctttcagtttttatcacgtttcataaaagagagaacttgcttttrtactcacacagcaaaacaacagaaatgccggaattcaaatccaggcctgtctgatttacaagtcatgtttttaattgctcaggaaccttacctcctatcataaaaatcagaactcaaggcaggatgcctgaatctgcttggagatgtcacaaaggttgggtgagggtacagagatcacactaggaggaaaactggttaagctaacaggactccacttggacaggaagggattgttgaaaagcatttcaccttcagagaggagcctgcagtttgctgtggtgcggcgttcattgattctacagtatgatgtgatgtagggtggacagatccaggtatgcttacaggtctacaccagaacattccttaaatcctttgctgaggagcatgaacttagtccctcaggaggacaccttaggaggtttcacaatgagagatgccattgaaagttgagtgtgggagtacagtgaaaggttgaagctgcacagacacgatgcagttaagcagtgaccgccacagccaggcaagtgccggggaggacttgtacaaggagggctctgggtcagatacagcaatgcatggagagacatgaaagcctatatatttgtgacagtgatatcagattacagtagacttagg

SEQ ID NO: 59454 - DNA, 987 bp, Homo sapiens
gtgcctgccagtgactatgattgatataaagacaaaaagacatagtaatatcttccatgccctcaaaaaactcactgtttatgagaaattaagacacatataaacaaaagcacaaaagtgatacatcttggtgaggattaggatagatataatattagctgacagatacaaaagagaaaaagggaggaaaaaaaagggagagaaagagaaagacagggcactgattctgttccaggcactgtgtgtcattctttacgtgctgaatgtttttatccttaaaacagccctacacaataggtctgattgctttcagtttttatcacgtttcataaaagagagaacttgcttttatactcacacagcaaaacaacagaaatgccggaattcaaatccaggcctgtctgatttacaagtcatgtttttaattgctcaggaaccttacctcctatcataaaaatcagaactcaaggcaggatgcctgaatctgcttggagatgtcacaaaggttgggtgagggtacagagatcacactaggaggaaaactggttaagctaacaggactccacttggacaggaagggattgttgaaaagcatttcaccttcagagaggagcctgcagtttgctgtggtgcggcgttcattgattctacagtatgatgtgatgtagggtggacagatccaggtatgcttacaggtctacaccagaacattccttaaatcctttgctgaggagcatgaacttagtccctcaggaggacaccttaggaggtttcacaatgagagatgccattgaaagttgagtgtgggagtacagtgaaaggttgaagctgcacagacacratgcagttaagcagtgaccgccacagccaggcaagtgccggggaggacttgtacaaggagggctctgggtcagatacagcaatgcatggagagacatgaaagcctatatatttgtgacagtgatatcagattacagtagacttagg

SEQ ID NO: 59455 - DNA, 763 bp, Homo sapiens
ttcctgcctctctctgcacagcagaccatgaggcccgtctggcaacaccacaaggggacctgggccggggcagcagagcagcccccagacagcgaggacaccccagtgcgggacgccagcccagcaccaaagggcaggttcctaaacactcatgttcattccttcctcacattctaacttgttagaattagaaaaatggtttttatgtaaacagtgttgttctaatcactgacaacatattaattttaaacacttttgatccaaacccaactccttgccaggagtaggacactgaggacttggggtggccctgatgtccttgaagccacagtcagctgtttatcctcctcatgtcccctccccacccaagttccagcttgcctggggcttgttctgggaccctaagaaccccaggatgcccacatcgccaggccagcagggccaatggtcatgcagggactgcgggacaggttcccatcatctcctgtgttagcccattccacctgggaaaccaagcgactgccgtggctggcttatttytccctctgccaacccccatctacaatgttctggggaaaacaatgagaggtggaaaaggtaacatacaaccaccttccacccacatcacttccagtgaggcagctaagtccaccaacagagcgtgggagagtctttcatccaaaaatcccaacacgtcgcatgcagcgacaggaggctgtgctggggaaacccaaggcctggctcagcctccatactctaaggg

SEQ ID NO: 59456 - DNA, 564 bp, Homo sapiens
caaaaaggtgtaatcttaggatcactgaatgaatgaaaatcgaatatcaagttatgaaatgtagagctataactgcttaactactcttgtagttattgtatacagtacttgacattttactttataggggacattaaatactcaagagaaggcaaatgaggttgtcctaaaaacatatgtagaaagatttacaaaaaatagttgaagaaaccaggaaatgtctgttttggagaaaagaagacttaggggatacaggatccctgtctccaaatatttaaagcccttacttctgacagaggatgtcctctgtgtggctctagagggtacaatcacaggatcaggcggaagacttaggttgcagataagaaactgccctctaacgatgaasgctgcccaacaataatcggttgactcttaagtctgggaggactccttgtcattagaaatgttcaaacagggtttggctaatcaaacttctggaaggctattgaagtctgctggggatattgtacagtggaatagcattttacttcaaagttaggctctaaagtcagtaaggcaaaa

SEQ ID NO: 59457 - DNA, 580 bp, Homo sapiens
aacaaagatacagaatcaacctaaatgcccatcaataatgaaagggtaaagaaaatatggtacatatacacaatggaatactattcagccatgaaaatgaatgaaatcatgccatttgcagcagcatggggatggaattggaggtcattatgctaagggaaataagccaggcacagcaggacaaatatcttatgttctcaatcgtatgtggaagcttaaatatttcattccatggaggtagatggtagaaagatgacagagactcagaagtagggggaaagggagagcagatgaaaggaagtgggttaaagaatacaaacctacagtaaggtagaagaaataacgtcaatgactgtagttaacaaaaacgtgctcgcgtgatggacaccctaaatcctcggatttcatcagtatagattcattacatacatgtaacaaaattttacatgtacctcataaatttatacaaacaccaccaagaagaaccctgtttttcttggagccagtgaactgccaatgtgtctgtgtagcaaagttaactayttagagaagcaaggctcccaggaaaataggtccttga

SEQ ID NO: 59458 - DNA, 1284 bp, Homo sapiens
agccctgctccccagcacacagagaagatggaattcagctgctgtcagctccttctcattcagggacctaggaaaccaggtgagcagtaaaggattatctgaccacaccaggaaggtgaggagcccaacgtggacacaacccaaattaactccccatcacactgtgaggcaggtcaagggcctcatatatgcagcttgccctagctcccatcaggggctgcccggtgaggagctcaaggcctacagactcagtttctccagaggcttgacccgagcattatttgaaaagtaaacctaaaggggcaaaataggcaaagccatactccgaacccaagtagagcgttatccgtgaagacatttccctcttccatactgcagagcttagagtgctcaagcccctttggaggcccakacagccttccccttccaggtgttctgcttagccaaaaccacatggcggaagccacggaagccagcgccttccttccttagggccttttcattcaaaatgcagggattgcaccaggaactggttagaaaggggcatcttaggctcgcaccagacctcctgaatcaatctctgcctttttacaggatccccaggtgatttaaaaaaaaaaaaaggctcttgagccatcaccagggggcccctggacaccagtgccgatggcatctccattcccctagctggactggttgaccaggctcagctaaagattctggcaccagaagccaagggctgtttgctcagtgccaatgaatcttgggtcattgctcagcactgacattatctgaggacttctgcagccaagagctggttctccatccttcagcgacagttttacagcagataatgtctgcacgacatgggcggaggaggcaaaaccctcccctactcctgccagtcctcatttgtctttcatgctttcccttaaagaaataaagcaccaagaaaacgaagcctttgaagaattccaccattccgttatatttcaaggcaccccctcattaagggaaggttggaggatttaaaattaaacacacacaccccagcctgcggttgccctgcatctttctagggatgtaacttacccagctctgtaattactttattaagggaaagagctgtctctggaagctgggctccgtttgttctcctcgtaggtacgtgccacctgaatggcacaggcaaggctgctgtgcagttcaagggccaggcccgtccttcctgccagccttgacccagacatcctggctgaccccagccaaggcctgaccatcaag

SEQ ID NO: 59459 - DNA, 1284 bp, Homo sapiens
agccctgctccccagcacacagagaagatggaattcagctgctgtcagctccttctcattcagggacctaggaaaccaggtgagcagtaaaggattatctgaccacaccaggaaggtgaggagcccaacgtggacacaacccaaattaactccccatcacactgtgaggcaggtcaagggcctcatatatgcagcttgccctagctcccatcaggggctgcccggtgaggagctcaaggcctacagactcagtttctccagaggcttgacccgagcattatttgaaaagtaaacctaaaggggcaaaataggcaaagccatactccgaacccaagtagagcgttatccgtgaagacatttccctcttccatactgcagagcttagagtgctcaagcccctttggaggcccatacagccttccccttccaggtgttctgcttagccaaaaccacatggcggaagccacggaagccagcgccttccttccttagggccttttcattcaaaatgcagggattgcaccaggaactggttagaaaggggcatcttaggctcgcaccagacctcctgaatcaatctctgcctttttacaggatccccaggtgatttaaaaaaaaaaaaaggctcttgagccatcaccagggggcccctggacaccagtgccgatggcatctccattcccctagctggactrgttgaccaggctcagctaaagattctggcaccagaagccaagggctgtttgctcagtgccaatgaatcttgggtcattgctcagcactgacattatctgaggacttctgcagccaagagctggttctccatccttcagcgacagttttacagcagataatgtctgcacgacatgggcggaggaggcaaaaccctcccctactcctgccagtcctcatttgtctttcatgctttcccttaaagaaataaagcaccaagaaaacgaagcctttgaagaattccaccattccgttatatttcaaggcaccccctcattaagggaaggttggaggatttaaaattaaacacacacaccccagcctgcggttgccctgcatctttctagggatgtaacttacccagctctgtaattactttattaagggaaagagctgtctctggaagctgggctccgtttgttctcctcgtaggtacgtgccacctgaatggcacaggcaaggctgctgtgcagttcaagggccaggcccgtccttcctgccagccttgacccagacatcctggctgaccccagccaaggcctgaccatcaag

SEQ ID NO: 59460 - DNA, 599 bp, Homo sapiens
ccggggcagaatgagaggcggagacagggagaggtgtgctggggagggaggagcacggctgtgctgtgtgtgaggactggggcaggtgctctgagggaggtgggcagccctggggccttggccacacactagctgtgtgctcttggacaaggcactttaattatgtgagcgtctgtctcctcatgggtgaaaaggttgcatttaatgatggctcccatctcccagggagggctgctgtgagggtccaatgagcagccgcacacagagtgcctgacatagagcttggcacacagaaaggacccaaatggtagcagccactgcctggaagccttgcattgtttacctttatgcatttaaaaaatatgtaagtccccatattgatatttggtcccatcaatcccatttcttctcaagaaaggccaaggagagctgaccatgggagtggaggtgggtggagagragcatcctgcaccacctcagcaatgcccactttcttctccagaactggtgtccacctagggcaccccctagaaagtcctaccatgcaccacaccccagtgtcaaaggaagccaggcaaaggtcccgcagctaccagctt

SEQ ID NO: 59461 - DNA, 1477 bp, Homo sapiens
tgcatttcatctccattcaccccctggacctagccttctccttccatgctgtttctgatcaacccatccaagttaaagtgygaatgaggtacagtgaggtgtgtgatgggggacctgtcctaagcctgaggcacactttcccacgggtgaaatagcagtcatcagggagctaactgggaacaggatcagtgattcagagatggctttcccaggcctgtgaattgaccctgcctgggaggtggtgaaaacactgtggtatgacgaaaaggtacagcctttgaagttaaacagttctgagttcaaatctggttttcatcccttccaggctgtgtgaccttaagcaagtatgtaacgtctctgatgttcagttcatcctgcataaaatgggatgatgaggcgtgcctcacagggtcattgggaggattgaaggcgattgaagcatatacagagtgcttaacagtaccaggcacagaagagacagctgataactgttcattcccagattttccccctcaaacttgctcctgctccagtagccctggaggtgctgctgcttgcttcattttcccaggtccccttgtattcttcattggtgttttgcagtactaagaacaaggtatgccctccccatcccagtgcagactcccagggaggaaaacctctctgagtcctcactggacaggggacgggcacatgccagtgcctgtccacacagccaggtggaagtcagggtaggtcaggcaggcatggggattaccaaatggtaccatgaggccacagacctcccttacccacctatttaggctcagccgtctggtcaaggaggaagcccagtccagccatcgtgcaggacaggcggcagcaggaggcatgagactggaccccatcagtgggcatcctgacagtggtggatggcacggcatgaataacacatgaagcctccataattggtgttattacacatgcatttcatctccattcataatgattggacacttaaacccagccgccgttcctctgccgagtgctgctgtcatccttctagccgagatcccagcagctgtcgagatcagcccctgccactctgatgctgatgcgtatggttcctttttctttggagctcagagttccaggaaatgtcagtttgtgggaaggagtgagactggttcttctgaccagaccaccctctcaactgccatggtgcatgttgtctgcctttaggggcttcctcaccatctaggcagtcagcggggacatcctaaggtgagaggcaggagaagagactatggataataggctcagccagcagaaagtggtccagggtcattccttgcagcaacctgcctcggagcattccttcatacagtggacttcaaactagtgtgcattaggattacttagaaggtttgttaaaacattgctggatcttacccttggcatttctcactcagtagctttaggtcaagtttgaaatttg

SEQ ID NO: 59462 - DNA, 761 bp, Homo sapiens
ggaaataattctaaccaggaataaaaagaatggaaggaaatataccaaatgttagtagtgcttatgttagtagtgatgagattatggatgtttactgtttcctttttataaaaatgatatatgtttattatatgatacttaaaatagcataaaacactgcaatatgtttgtttaaaaatacttctgcacatgtgctctctaatttaaaaagtcagacaaatcttcctttggtgagatggcagcacgcttcattccatagtcatcactcaaagcagcctgaaggtttcaagaataggctagaatccttttcttttttcaggattacaagctaattccttgttcttttcacctaagatttgaaattttcagcacacataactcatgagaaagtacaatccagcataaataccttgtgataaactttgatatattttgagtcatatcataagaaaaaatttcatagtgttcagctttcttactgcaggtatatagcttctctcrttgttgctgcctctgccagtctgagtctgaacctgcgaatgattttctctctctcatattttctgcccttgtcttcggtttttgttcctggctatgtatatcccagtatggtttattctattgcttctggtagtctttcttgtctgatcaaattcctaaaaagtatttttggctctttccatctctgtctcttgtaagcagcccacacaatgcaactgataattcatgctttaggtatttgtagccaatgtcttgtgcat

SEQ ID NO: 59463 - DNA, 1198 bp, Homo sapiens
gggtatatctcctgattaatgtaggctgcctcattttacttctcaatgttgaaatttatccatgtgaagtatctctcatggtcaatttattttgtgatggagttggaataatgataatgagaagactttctcagaggtagtgaaagaaagtaccaacagcacaacctgaatatggcaggtacacacatagcaacsttccactcacgacctattcttgcaatgcttgaggggttaccagagatgacatgcagtggctgctttgaacattcctgttgaccattaagtccctcagatacttgaatagaattgtaacctctcactcccactctccttgacccaccaccacaccttgccccagggataaataacccttgagtttagagaaggaatgttaggaagggcgagacatgtgttaattctataattaagagacagtatttcccttctgacctttccccaaaagcgtgttaccagctaagtctttaaaataaaaacccattaacatgggtaaaattgtttctgacttacttgtttcacctaccattggaaatgtccaagtcctattacttgatttttgtaaacaaatttcactttggacagtcacatgtgcatatgatctgaaagcctcagcacagtagccttttgcagaggagcatgtataacttaaatcaattgccacgatggtcaaaaagacaagactgaggaaagtgtaactattttagagaggaaatgaaggcctccatgctattttgcagaagtgcagagagattttcattaaaattttccttcctttttgcctactttttaatcctaataaaattactcccgtctttcaaatttcccctccccctaaatcaaaatgctgccacactctcaaaagctccctgcagtttatagagatgatgtcatctgctttaaaacatctgaataacttgtcctgttgctgaataaatttgttcaacatctaggttccatggctctatacaacctgattcatactgcttactttgtcagtaatctttattaatatttcatcatcgcttttctttccaaagggctgaggtttgcacttctcctgcaatgctgggagggagtgatagaggcagaaagccttactgatttacataaagattgcaaactattattctctgagtaattttaaagtgcacacattgcataccactttccgatgtaatca

SEQ ID NO: 59464 - DNA, 687 bp, Homo sapiens
gcaagatcaaggtgctggcagattcagtgcgtgatgagggcccacctcctggtttataggtggccgttttctcactctaacctcacatggtggaaaggacaaggccgctctcaggggcctctttcataagagtgcagatcccatttgtgagagctcccaaaggcccttccttcttctaaaataatcactttgggagatagatttcaatgtatgaatttgggggggacacaaacacccaggtcatagcactgctctgtggaaatagagcacagttgggtaggcacaaagtcagggagcagggagacaaatagttagagctttattgagagagagagagacagacacagacagacagacagacagacatggaatgagaggtgaggtgcctggggtgctctgagacagaattgggaggtgcamccacagccggccctgataccccctgcaccagatgcctcccacggccactctgggctctgatccctctgctcaggcctttgcagtttgtccaggcccagcccctgcaaagatcctggctctacatagactccttcctgctcccagggctgcctgacagcggctgcctcctgtgggcttcactgttgatgccaagcaggcaacaagttgcactcctccccacagggctcatcctcaggcaaacctggggtggcgggagcaggagcctgt

SEQ ID NO: 59465 - DNA, 2227 bp, Homo sapiens
ggctgcctttgtgggcattgcagaccaaattcgggtgcagggccctctgcaaactcaggttgaaaatgcaaatcaggtaatggagtcagtgataaattgatgagcgaagatgaagtatatctagcttttaaaaaataaaagggaggatctgccacaagtggtaacccttagagacagtgaacatgggaaagaggcagctagctcagcccagcacctctgcacacagggttcactctgcagagctgctgggagtggagagggagtgggcattccacagctacatctgcaaggcaggaccgttgccctgggtgcagtgcagaggcaaagcatctttatgaccaaggcacatcctcagcttattctgacatttacctccatccgtgtgtttttaaggcaaatccaccgcacatttctgaaacaccctcctgggaatcgatcgttagtcaccaaatttcaatggaactcaaagcagagctcatgctgtgatgaatgccttttctgtttctaccagtgtgatcttccaggctttaaacttgccattacttctgaccaattcatttctttttttttttttattttttatttatttatttaatttatttatttattttttaatttttttttttattatactctaagttttagggtacatgtgcacattgtcaggttagttacatatgtatacatgtgccatgctggtgcgctgcacaactaacgtgtcatctagcattaggtatatctcccaatgctatccctgccccctcccccgaccccaccacagtccccagagtgtgatattccccttcctgtgtccatgtgatctcattgttcaattcccacctatgagtgagaatatgcggtgtttggttttttgttattgcgatagtttactgagaatgatggtttccaatttcatccatgtccctacaaaggacatgaactcatcattttttatggctgcatagtattccatggtgtatatgtgccacattttcttaatccagtctatcattgttggacatttggacatttgggctataaagacacttgcacacgtatgtttattgsggcactattcacaatagcaaagacttggaaccaacccaaatgaccaattcatttcaattaaggaatttttgagtgtctcctatggccctttgtaatatgatcagtggactggaagtgaagccccagccaacactgctctaggtatctgacggagagcttgatgtctcttctgtttcttttcacccaccagtgggtatcatgcttctgagacactggccccactgccctggcttcctggccctacatgggaccttctgatggtcttgtccatttttattgtcctgtgggatctgccccaggttctagaaatgaaagctctgcccagcccagcagggagcctccaggatcctgctccgtgctgtggcctcagaattttgtatctcaccctttcttactccatgtagtgctttgtattttacacaccaacgagtatcatagttaagtgcactctcactacgatttgagtcactggcacacacagagggacgaaggaaagcaaaacattctactctcaacataggcacacatagtgtcaaaaagaggacttggctgtcctctcctggcaaggccacgtgtggcacaccctgaggttagacacaggccaagtcgccacaggtgccttcttcccagcggacggctgtcctgcctctccctgagctggttattgatgggaggagggtgaactgcaaaccagccgcagggacagagtagggaggcggaggagaaccagggccagtctgtcgccttcagaggtgacctgaatttgggaactccccacttctccgaactgcaggggagcttcccgcgctgtctcccaggctggagtgcaactctgcgattacagctcgctgtagcctccaccctccagcctcaagtgatcctcccacctccgcctcccaagcagctgggactacctacagatgtgtgctaccatgcctgcctaatttttttttaatgtttaatatttgttaaagatgaggtctcaccatgttgcccaggctgtccagcctcagcctcccaaagtgttaagagtcacaggtgtgacaaaagcacccagccctgttgtcaacgttctgtcttattcgtggcaggaaactcccttaagaggggttttatggcaatcctcatttctcagaattttatgctcttattcagaaaa

SEQ ID NO: 59466 - DNA, 878 bp, Homo sapiens
tccattggaggcaaccaatgcacccaaaggccagttaatcaatagccaataactaattatggagtttatggccctgaacaatgaacgtctgggaaatttttatactgattccactaattatggctatcaatctcctccagttaggcatcattgattctcagaagtcatcaaagaatttaaggtaactaattacaagctctgtcttcataattaaacaatataaactagtttgtactcaaatgtctataccctgcaatgttacatagttattagggagcaggtaaacaatgaacaaagtggataagggagagaaggctggaaaacagcagggaccatctgtcacactttttgcatgaccgctcatagaaatcctcttctgtaatgttcattttatttgcccctttctcaaagaactgcctttctggattycatcaggaaaataaaatgaagttgtttgcaagatgtctctctgttgccagcctatacatggacctgccctcatcaccaaccttcccagcagattctctcctccttccctgccacaggcaaggatgtcagcccctggctgcagacctctatctcactctggctttcccttcttgagcatcttattagttaccaagttctgatttttttcttcctttactttcatctaaacaaaccacaaacttctcccagatagccaatcaatcaaactcctgtttctattttagctgggaagaagtgatatagaatagaagtgtttgtactaccctcataaaacatgtgatcccaatggcatggaatgatagctacacaagctacataaaatacgtgtctcacaatccaaatttggagcctgcttcgactttgctttgtccaaatgttttccttaccct

SEQ ID NO: 59467 - DNA, 614 bp, Homo sapiens
cacaaactctgctcaaaatgtttacattaaaaaagaagaaagatcacaagtatacaacctaactttactagaaaggaactgggaaaaaaatwaaaaaaaataaaaaataaaaaatgaaaaaaaaaaaaaaaaacaactaagcccaaagttagccaaaggtgggaaataatagatattagaacagaaataaacaaagtagagactaggaaaacaatagaaaaaaatcagtgaaagcaagagttgttttttacaaagctaaacaacattgccaaacctttagctagatggagaaaaaatgtaggagattcaaataaataaaatcagaaatgaaagaggacacattacaactgatgccacagaaataaaaatgatcctaagagattaccatgaaaatatgtcagcaaaactagacaaccaaaaataaatttaaaactttctagttatatacaacctatcaatactcatcatgaagaaatagaaattgtgaatagaccaaaaatgagtgagaagattgaattattaataaaaaaaaaactcccaaaaaagaaaagccagaaaactgaagaggagggaacatttccaaattcattttatggggccagcattaccctgat

SEQ ID NO: 59468 - DNA, 614 bp, Homo sapiens
cacaaactctgctcaaaatgtttacattaaaaaagaagaaagatcacaagtatacaacctaactttactagaaaggaactgggaaaaaaataaaaaaaaataaaaaataaaaaatgaaaaaaaaaaaaaaaaacaactaagcccaaagttagccaaaggtgggaaataatagatattagaacagaaataaacaaagtagagactaggaaaacaatagaaaaaaatcagtgaaagcaagagttgttttttacaaagctaaacaamattgccaaacctttagctagatggagaaaaaatgtaggagattcaaataaataaaatcagaaatgaaagaggacacattacaactgatgccacagaaataaaaatgatcctaagagattaccatgaaaatatgtcagcaaaactagacaaccaaaaataaatttaaaactttctagttatatacaacctatcaatactcatcatgaagaaatagaaattgtgaatagaccaaaaatgagtgagaagattgaattattaataaaaaaaaaactcccaaaaaagaaaagccagaaaactgaagaggagggaacatttccaaattcattttatggggccagcattaccctgat

SEQ ID NO: 59469 - DNA, 614 bp, Homo sapiens
cacaaactctgctcaaaatgtttacattaaaaaagaagaaagatcacaagtatacaacctaactttactagaaaggaactgggaaaaaaataaaaaaaaataaaaaataaaaaatgaaaaaaaaaaaaaaaaacaactaagcccaaagttagccaaaggtgggaaataatagatattagaacagaaataaacaaagtagagactaggaaaacaatagaaaaaaatcagtgaaagcaagagttgttttttacaaagctaaacaacattrccaaacctttagctagatggagaaaaaatgtaggagattcaaataaataaaatcagaaatgaaagaggacacattacaactgatgccacagaaataaaaatgatcctaagagattaccatgaaaatatgtcagcaaaactagacaaccaaaaataaatttaaaactttctagttatatacaacctatcaatactcatcatgaagaaatagaaattgtgaatagaccaaaaatgagtgagaagattgaattattaataaaaaaaaaactcccaaaaaagaaaagccagaaaactgaagaggagggaacatttccaaattcattttatggggccagcattaccctgat

SEQ ID NO: 59470 - DNA, 576 bp, Homo sapiens
tgcmgctttattatttgaagaaatccctcctatttaacactatgaataaaaataattaactgctttatatatttgccccatatatagtttttaaatcaggcagtatacttggatatgaaaacttggcttcagtaaaattaaactgtgttcatattttcttcaaattgtttactcaccattacccttaatgtcttccctgagccacacatgctcattcaaaaccataatttgtggatttcttgccttaggctcaaacactcattttcaccacttcatatcctcaatgatatctattttctactttatgcacctaatattttaagtctcctagtttttttcagacattaatttcctgtgtctggctctttattgatacttctcggatatgaaggtcaagtgttaaaagtgggatttttacacatctttttattaactgctgtgatgaactgttatagaaaaacaaaataaaatgacaagaaaaaaacaaaactgtcctgaagagaaaggactcagtttccattagttccagatattatactttaagataatgatgatgatgatgattttttttttttt

SEQ ID NO: 59471 - DNA, 576 bp, Homo sapiens
tgcagctttattatttgaagaaatccctcctatttaacactatgaataaaaataattaactgctttatatatttgccccatatatagtttttaaatcaggcagtatacttggatatgaaaacttggcttcagtaaaattaaactgtgttcatattttcttcaaattgtttactcaccattacccttaatgtcttccctgagccacacatgctcattcaaaaccataatttgtggatttcttgccttaggctcaaacactcattttcaccacttcatatcctcaatgatatctattttctactttatgcacctaatattttaagtctcctagtttttttcagacattaatttcctgtgtctggctctttattgatacttctcggatatgaaggtcaagtgttaaaagtgggatttttacacatctttttattaactgctgtgatgaactgttatagaaaaacaaaataaaatgacaagaaaaaaacaaaactgtcctgaagagaaaggactcagtttcyattagttccagatattatactttaagataatgatgatgatgatgattttttttttttt

SEQ ID NO: 59472 - DNA, 1306 bp, Homo sapiens
agtgctaaggccttagttacagccatcattaaccaccagttttgtgagtgaatgagacttcagatcataccacctctcagtcttggagtcttccagttgagaccccagacattacaaaacagagaaaagtcatctatactgtgccctttccaaattcctgatccagagaatccataaacataataaatggttgttttataccattaaatactggagttatatattgcacagcattgtaaccagaatttttgataaatgataggtcttgtaatgtcagaactcctcagatataatggaataatattataattaccaacaacttcattattaacattatcatcatactcatcaccattattaaaatgacagtatttcataagtgtcctaaatattttctcttggaaaatacaaagtcaagggaaaagcattactcaatttattcaaagattctctaaacttaactttcctgtagtacatatttcttgaaatgaagaatgcctataatgtttataatgtgttcttgccactgaaggcctgagtcaggggaaacttccagaagtgtttgacaagctgtatgtgtttgtttattttaattatgctgaacaatcaagagaattgaaatagagtactgtgaagacaagcatttttttgcaagttcccaaacaatgcatgtttaatgtgcccaacttcttatactagctatagggaaaaaaattacctaaacaagccctttcaataggcacttgatgcttttttgatggtaattggcagcaagataatttgctcttgtttatttctagtgagtttatacaattgtttttaaaaagtaaayttttcactcttagtagaacctgtacacaatactatgtcatatgtcaccagggagtgacagatgctggtaatgtggttggctgcctggctggttctcagcaattccttgggttaatgagacttttatggttatgttttattcttccatcttctaccctcacttatctctaatttccaccttccttcttgctgaaacttataaaggcaaaataccttttgaaatatgtgaaatagccctatgtctttgacggcaaagtgccagtgtcaaaaacgaaggataaaaaacagcagtaaaactagaaactatgggagtttctttataccttaaattacccaatatatgcagttcttagaagttaaatataacttggactttggtaaattatattttagatatactattaggttttaaactgaaaaaaatcttgttaaatctctatttattttgtaaatgtaaatgttcaaatattattaa

SEQ ID NO: 59473 - DNA, 1638 bp, Homo sapiens
atacctaggtgatgggttgataggtgcagcaaaccaccatggcacacgtttacctatgtaacaaacctgcacattctgcacatgtattccagaacctaaaataaaataaaatttaaaaaaaccatgattataaggaggaaatctattgaaagaaaatacatattgccaataaaaatatagaaatctttctgatcattagggaaatgaaaattaaagcaccaattaagaaatactttctaggctatcatattggcaaaaattagaaaactgataagattgaagagtgccaagtatatggagaaattcatgtcctgttagtgagaacagaaaggctcgccacaacatttttggaaagtaatctgacaatacctattaaaataaaaatgtatgatccatttgtcctaacattctcaattatgggattctaaaaacaaacaaaaaacttatttaataaccactttgcatgtcctttggtcaattacatatcctttgctcaacaatggattatgtaatttgttgcttcttatctgtaacattaatcacaacttttctttcattttgatatttataattgttattttttataattaaagaaaaataactttgaagtattatcaacaaaacttaaaaacaatttacaagaaaaaaatcctatatataggacatttgagaaagtgggcttaaatatttaatagtaactagtgaattgcaactaaatgtcagaaaaacaaacaaggaaacatgtatctcttctatttggtgacttctttgaattgatgatattcccaatmttgcttaaagaactaaagtaaaatttagcatagctcctcctaattttggcacagctggtcttctctactctcggaaaagtaagtagagtaaaaaaactccttccttagacagtgttctccattcttttcctgtctctttgagctcttctctgtctttgtctttgccttctgcatgcataacaatcataacaggattcctatttaaataaacacaatttttttgtcagactgagggcaggcctcttaaagtgaagtctcttagtgaggaacccaagaatattccttgcagcaaattttctctgagtgagccttatgcacagtaaagtttgagacttgttacctgaaatgatgagctacttcagggttcctgcatacatctgtttcagacacaccaaatttatccctgctgttgaaaagggcattgaacttcttctggtctctatattttgagtcagttccaatctcattcctgactctcagacttttatctccccttggaggactcacaaatacctcaaagccccttgagcctactcttcctcctgattttcctctttccgtgactggcattgcacctgacagctgccagaaccagaaactgggaggtaaccccaatttctgttctttcccactgtattcattcactaatgagctcctgtttattctgccttctaaatatccacattccactcaattctcaatagtaccactgtcactagccttagtctggcccacatcatctctcattgaaattattataactgtaattttcatgtttcccctgtctctattaaagtcccattgtaactgagtacccccatttttctaagaggaagagagtgaatta

SEQ ID NO: 59474 - DNA, 2224 bp, Homo sapiens
gcccggaaatatgggaagaaatagcactacttcccatgttttttaaactggaattagatctgaaatgagcactttggtttgacaggttctctaatattgccctataaactatttgtattattgtggtgttttagttcattttgactgctttaacaaaaatgccaaaaattgtgtggcttatcaacaattaagacatatttctcacagttctggaggctgaaatgtccaatatccagaaaccagcatattggtgtctggtgagggcccattcctcataaaggatgtcctcttgctgcatctttacatggtgaaagggactagctagctccctggagtctcttttttaagggcacaaatcccattcatgacgattctgccctcatgatctattcacccgccaaagccctatcttctagtattatctcattggggactgggttttatcacatgaatttgaagaagatacaaacatttagactatgacatgtggtattaaaaaccccgaattttctattgtctcttatcacctattcaaccaggaaagaataataagataaattttactatcccctggacataagatttcaaaataatgtctagtcacttggaatctrgtagtgacatagaaaacaaaataatctgggaatctaaaatgtcttaataatgaatatatatacacacatacatatatattcatatatattcattattaagaaactaagaaaataaatatacatgcattacatatatattcttatagacacatatacatatatatcatgtatcacataaacctataataactaaaactcaaaaaagcaaaataatttgcgtacaatcaccctgcgtataactaaagtcagaaacccagctgtaagaccaatgttagcgtcattgccatttgttttagtttcccaggccaagattctaccaccgtctgatcagtctcttctctataatagtgataaattccttttagggttgttatttgtaaaggattctaaaataaggggaaataattatttttttctcttgaaaaatttaagtgcctcacaggacatggcatgaaataagaaaatgtaagtggcacccaaatatgactaaatgagtcagccttcttactcatatcctggaagtcatgttgcgatgtattcaggatatcattcggctcaaacacttataaatagctcctaagtgactgtttgatttcccgacttcccctaaggatgactggcttcagtatgtaatccttatacaaattagcagatttaagttaactccaaggttagcaatagtcaagggtataaggatttaaggtaacaataccaccaacattgagaagtcacgtatgaggccttcaagatcaaagattactacttcaccaaattcatttctcatctctcttctttccattctctaaatttataattttcttagataccattaccattagttatattcactagtattctctaaataagaaatcagatctggatcctatacttcaacagttcatagaataaacagtaatatatactgattacctaatatgagctatgtaccatgctcagttctgaagatataaaaatgataaaatgattttctttgagagttttgcattatggcaattctgtaacacttagaaaagaataaaatatgtaatcatcttaaaatctctaagcaaatatctcatgagcatctcagatttaaatgtcctcgtcaaatataatccccagcaccatcaatcaagttttctaaaatatatccattcaccaacagatcctgttgattttacctccactggttttaaatatgtaaaatatacactattcttcatctcttgtgctgtcaccttaatctgagccactattctttttcactaggattcctacaataatctctttagatctttttcctcttctactgtttcatcctcctcatcaattttccattacattagggatatttattaaaattataaatgatctatctgtatccatgaagccatcaatattcttttcatttcatttaggctaaaaaaaagtaaatcattaccctattctacagcaccatgaatgccaatccttatactgttcctccaatcctatttccttccaactttcttctcactttttatgttccagacattacagatttctttctccttctcatctactcaactctttttctatcttacagtctttacaggtattatgtcctgtgc

SEQ ID NO: 59475 - DNA, 2224 bp, Homo sapiens
gcccggaaatatgggaagaaatagcactacttcccatgttttttaaactggaattagatctgaaatgagcactttggtttgacaggttctctaatattgccctataaactatttgtattattgtggtgttttagttcattttgactgctttaacaaaaatgccaaaaattgtgtggcttatcaacaattaagacatatttctcacagttctggaggctgaaatgtccaatatccagaaaccagcatattggtgtctggtgagggcccattcctcataaaggatgtcctcttgctgcatctttacatggtgaaagggactagctagctccctggagtctcttttttaagggcacaaatcccattcatgacgattctgccctcatgatctattcacccgccaaagccctatcttctagtattatctcattggggactgggttttatcacatgaatttgaagaagatacaaacatttagactatgacatgtggtattaaaaaccccgaattttctattgtctcttatcacctattcaaccaggaaagaataataagataaattttactatcccctggacataagatttcaaaataatgtctagtcacttggaatctagtagtgacatagaaaacaaaataatctgggaatctaaaatgtcttaataatgaatatatatacacacatacatatatattcatatatattcattattaagaaactaagaaaataaatatacatgcattacatatatattcttatagacacatatacatatatatcatgtatcacataaacctataataactaaaactcaaaaaagcaaaataatttgcgtacaatcaccctgcgtataactaaagtcagaaacccagctgtaagaccaatgttagcgtcattgccatttgttttagtttcccaggccaagattctaccaccgtctgatcagtctcttctctataatagtgataaattccttttagggttgttatttgtaaaggattctaaaataaggggaaataattatttttttctcttgaaaaatttaagtgcctcacaggacatggcatgaaataagaaaatgtaagtggcacccaaatatgactaaatgagtcagccttcttactcatatcctggaagtcatgttgcgatgtattcaggatatcattcggctcaaacacttataaatagctcctaagtgactgtttgatttcccgacttcccctaaggatgactggcttcartatgtaatccttatacaaattagcagatttaagttaactccaaggttagcaatagtcaagggtataaggatttaaggtaacaataccaccaacattgagaagtcacgtatgaggccttcaagatcaaagattactacttcaccaaattcatttctcatctctcttctttccattctctaaatttataattttcttagataccattaccattagttatattcactagtattctctaaataagaaatcagatctggatcctatacttcaacagttcatagaataaacagtaatatatactgattacctaatatgagctatgtaccatgctcagttctgaagatataaaaatgataaaatgattttctttgagagttttgcattatggcaattctgtaacacttagaaaagaataaaatatgtaatcatcttaaaatctctaagcaaatatctcatgagcatctcagatttaaatgtcctcgtcaaatataatccccagcaccatcaatcaagttttctaaaatatatccattcaccaacagatcctgttgattttacctccactggttttaaatatgtaaaatatacactattcttcatctcttgtgctgtcaccttaatctgagccactattctttttcactaggattcctacaataatctctttagatctttttcctcttctactgtttcatcctcctcatcaattttccattacattagggatatttattaaaattataaatgatctatctgtatccatgaagccatcaatattcttttcatttcatttaggctaaaaaaaagtaaatcattaccctattctacagcaccatgaatgccaatccttatactgttcctccaatcctatttccttccaactttcttctcactttttatgttccagacattacagatttctttctccttctcatctactcaactctttttctatcttacagtctttacaggtattatgtcctgtgc

SEQ ID NO: 59476 - DNA, 744 bp, Homo sapiens
tcaaaatgattgcaccagacacaggttacagatcatgcatatgttttcaaacaataaagatgtaattttagaaacagctgagaagttaccctgtccttgttcttcaattagctataacgttgctgggctggagatctacttggagcagtccctcatgcctagttagttttgcttgtcagtctatatgataggtctctggatgccaggagaacatgtcaaccccaraaagtgattttatgaggaagcccaatttaacttttatgttttcactcaggcagtcattatttatactaataaaagatttcaaaattgacttacaatgtcaagtgtataaggatgccagtgttttggtggtctgaacagtgaatcaaaggggttaataagaatccagtgcatgccactgttcattgagctgcctggtttgacagcacagcatacttttgaatgtcaactcaacttttaaaaataacttggactcttaaacccttacgtctgtataataatttatagacatcagattagaatcccatagagtgctttggaaatttatttaggtggcctttattccaggaaaatctcatcatgtaagtttgatagctaaaactgtgttaaatgttccaggcaattgcctgctaacttgaaatcgtgtacactcaatataaaaatgatagccactaaattttcaaggaaaatatgacagtttttattttcttattgaagtcagtgtttataccctaagctcaa

SEQ ID NO: 59477 - DNA, 597 bp, Homo sapiens
ctttccgtttctccacaaaactgtttttttgaaatccatgcatacagacaaacatacatttaagttatttgttttaacagtaaatatgtatttaagtcatttactttaaatcagtagtctgaaaaaatctcaattaataaatctattttctcttgaatggggcactaggttgattccaatttttggctactatataccatgaggctatgaactttcagatacatgttgcatataaacattgacagtttctcagtagtatacacatacctagaagtgaaataaatgtgtcctaggtaagagataagcattttcaacttttttgtaaagcayccaattttctccaaatgattagattcattttcaactccaccagaattttttttcctaaaaccattctaacattgcaaggtggaccaactttttgccaatctaatgtgtgtaaaatggcattttacttctatttttatttgaattaaagaaagtgtatgtattgtggaaggttttgtcccttcagttctcctcttttctatgaaatgtgtgttcataactttggcccatttttatttaatttgtgtctatctttaaagttatatttaa

SEQ ID NO: 59478 - DNA, 597 bp, Homo sapiens
ctttccgtttctccacaaaactgtttttttgaaatccatgcatacagacaaacatacatttaagttatttgttttaacagtaaatatgtatttaagtcatttactttaaatcagtagtctgaaaaaatctcaattaataaatctattttctcttgaatggggcactaggttgattccaatttttggctactatataccatgaggctatgaactttcagatacatgttgcatataaacattgacagtttctcagtagtatacacatacctagaagtgaaataaatgtgtcctaggtaagagataagcattttcaacttttttgtaaagcatccaattttctccaaatgattagattcattttcaactccaccagaattttttttcctaaaaccattctaacattgcaaggtggaccaactttttgccaatctaatgtgtgtaaaatggcattttacttctatttttatttgaattaaagaaagtgtatgtattgtggaaggttttgtcycttcagttctcctcttttctatgaaatgtgtgttcataactttggcccatttttatttaatttgtgtctatctttaaagttatatttaa

SEQ ID NO: 59479 - DNA, 779 bp, Homo sapiens
tgaaggtctcgtttctacatgaagtgctcccttttctrgctctcctccccagcccaatgcaaatacacatcactttgtgttctcttcccatctcctgctcctgattcacggtttcatctgacacacagagagctttgcctctgagaagtctctgactgaattgctggtgtttcaagaggaattggtatttctgatgtcatggcatcttccaaactgtatttatggtattaattttgaggactagccagtttattgtggttttattagtcacatatgcatatgaaaatattccaactgtacaaaattgtgtacaaacaaaaacaaggacctcttcttccctatgtggctgggtttctttacaaagttaaacactgctataccgataaacataaagcaatttgtgtacatatagaacatggagcatattcagtatttgactttaattacaattaatatttacttctccatattcattcaaagcttataaactctaagagctgagtaattgtattttctcttcttaagttaagctttttcatggcccctgcccattggcaggcactgagtatatatatgttaaatatgtcgacacatattttagacatgtaattgttagaaaattactaaaaaatgtggaacatatataaaactatctgtagtagagacaattatgtaaatgtgtttgcaaatgtcattcaatatgttaagaagtaaacaaaataaagtttaataaagctaaccatttttaaagtaaattgtcatttttcgttcatatatca

SEQ ID NO: 59480 - DNA, 779 bp, Homo sapiens
tgaaggtctcgtttctacatgaagtgctcccttttctagctctcctccccagcccaatgcaaatacacatcactttgtgttctcttcccatctcctgctcctgattcacggtttcatctgacacacagagagctttgcctctgagaagtctctgactgaattgctggtgtttcaagaggaattggtatttctgatgtcatggcatcttccaaactgtatttatggtattaattttgaggactagccagtttattgtggttttattagtcacatatgcatatgaaaatattccaactgtacaaaattgtgtacaaacaaaaacaaggacctcttcttccctatgtggctgggtttctttacaaagttaaacactgctataccgataaacataaagcaatttgtgtacatatagaacatggagcatattcagtatttgactttaattacaattaatatttacttctccatattcattcaaagcttataaactctaagagctgagtaattgtattttctcttcttaagttaagctttttcatggcccctgcccattggcaggcactgagtatatatatgttaaatatgtygacacatattttagacatgtaattgttagaaaattactaaaaaatgtggaacatatataaaactatctgtagtagagacaattatgtaaatgtgtttgcaaatgtcattcaatatgttaagaagtaaacaaaataaagtttaataaagctaaccatttttaaagtaaattgtcatttttcgttcatatatca

SEQ ID NO: 59481 - DNA, 862 bp, Homo sapiens
tagtactcattaattatcatggttttcaattacattttgtttgtatctatatataggcactacgtatttataacatgaacacaaatatatatatatatatatatacacacatatcagaaattgtgctatctataaatacatagaaacataaatagaaattataaacttataaaaattgtacagcttataatttcagttcatttatgatgttagacttttttccagagagaatttacctttattctcataggttgctagatgcattagaaaatttatgttgctattacacaatatacaataaaagagaataagatgacttttagctctgtgtgtgtgtgtgtgtgtgtgtgtgtgtgtgtgtgtgtatctcagcatctctagctgtcctcataaagaggctagtcccaggttactttacaagtcccccatattaggaaactcagtattttttatttttctaaattatttcctagtgacctcaaataacttttaagacaatatatccacttgtctctgataatwcagatttcttctatgtcttttttgttactttcttccacaggtattttacagataataggtaaaatgcttaagtttttgtactgttgtgtcttgttttcgtttctggctaaatgctctctgagaagcttgaaaagaaaaatactctttctcaaatttcacggtttttttttttcctttaaagaaacattgatttttctccctagtgttccttatagaagcctgattctgtttttgtttattttcttgttcatatgctatactaatgtcatttcctggaaataactagcagctgctatggcagacagcaggagtgcttgtggtatcttaaatctgtccctta

SEQ ID NO: 59482 - DNA, 669 bp, Homo sapiens
atagttttcactgcagagagttagaccgttcacattaataaaataatcacattaattataaaatcaccaccattcttttaagtttctcatattcattctcctctctccatccccattaaaactacctaatatcatattttttcctaatcctggtcttagcctagcagattcctttgtcccttagccctgacaattttttaatctgtccctcacatgccactatggtacctgcctgaaatatacaataatcaaaagctagcaatggttaaactcttcagtggtttcctgttattctgaaaaaatatcccaagttttgtgacatgagatactaaggccttcacaactacctttccactagctctggtcctgactggctgttaatttaccatgccgattatacttctaagtccttaacatgtcaaggccttgaggattgaccttgtcccttctacctgaaattcttaatccttccttatggctaatttagtgttagaaactctctccatgtttgcatagcacactatacctaaccatgtattctaataatttttccacttctcatctcatgctgtaatttgtatgagtgcagagatgtgtcamttgtattaatattctatcaccagtttatagctcagtgcttactctggagtgctccatgacttcatttca

SEQ ID NO: 59483 - DNA, 977 bp, Homo sapiens
ggaaagaaggaataattacgttataatcaatggataaggttgattccttgacagtagattgtaatctttttctacttatctggatcattctattcctttatttcacttttttctctcaattaactgaaaagaaaggtgaagaaataatatagatatgggaattgatgtagaaataggaaacatattttagatagcaagtgagggaagcgtttcatagaggtatgtccctagctttaggaattcatctttctgaaggtttcacttgatgataaataatatagctgtaagtcttgaatttgattgaaataaaaatctatgtgtattttgtgttataaaaatctaaagcataaagtcatcattgaagtttaattttccatctttgttaaaccttgctgctaataagtatgctgaaaagaggctcagaattttctacccactacagattgccagtaattgatcaagcaaatctatcaattctaaagttgaattaatttttaaaatcagggtttaaaatgaatttcttactcatatattttattttcagttattctcttcttttgtgttattaactgtaaaatattaccacacttttttaggtcataaaggtcaaagctaatagacaaaaaaagcttccagcatggatgatgagcaaattagatgcctctctgctcagcatgaggttttttcagctgcaaaagtaaaatgaatcaaccatggaattaccccaatgcactaatagctaccgctgtagtggtagatmgttatatatctgggcaattaaattttaaatgtaagtaacgttataaaataggtcaatattaaattttaaatataaaaataaaatataattaaaatgaatttaataaggttgcttaacttgtaattcacagtttacataattatatcatggatgggaagatatttatgtatgatattcttttttggggaggtaaatattcttaaaagcattagaagca

SEQ ID NO: 59484 - DNA, 1225 bp, Homo sapiens
tgcatgttgggcttaatacctagatgatgggtttataggtgcatcaaatcaccaatgcacacgtttacctatgtaacaaaacctgcacatcctgcatgtgtactcygtaacttaaaaataaatatttctttaaaaatgctactttaacctttgcctggagagagaatatatgataataggttgtccttttattgtgaattaataaatttaatttcacttttaaaataatgaatttgtttaattttttatctctaagaagttcatttttattgggtgatactaccatggaagcaaatttgtcaaagcaacacatgctcaacttgtaagatatccgtttgacagcttattgtcgtttctctcaggtagctttgcagtttgcaccatttttcttcctcttgcttttcttcctccttattcatgttattccaatttgttatatgtagcacatctccactggtatataatcaacatatggacaggactttgtctattttatttactgctatatccccacctataataaggcctggcttatattagttattcaacagatatttgcattaccttttatgcctgcattttattattactgagtaaattagttcattaaatgcttttctttttcaaaaattgatctctaaataaccttggaaaacatagaagtcagactgattaacatcaattactttttttttttcagtcacgtagcctgttgctgtctaggcctacatctcttcattgaggtgtaattcacaataactatttctctcttatttatggtgatgagatgtgggaaaagagttttccatttttttgcaaagatgtacataatcatcccccaagagattgtttcatcagaacttggctgacagctccaggtttgtgagtgagatgtaaatcatcatatgtccaggttagctgtgtctctcctttacagcctttctaccaaaatctttcaaatggtgcttctggaggctgctgcttttttctgaagatttcctctcctcttctctttccatggttccttttattttgcttttgttgaggctccttttttgacttgagaacaagaatcttcagtgaatcaataattttttcttttaaatctcaagtccaatccctctacagaaaggaggaggtataagatgtaactcaaaatagatggaagagaggagctcaagaaatcccctatttctgggtattaactactttcttctataatatc

SEQ ID NO: 59485 - DNA, 1225 bp, Homo sapiens
tgcatgttgggcttaatacctagatgatgggtttataggtgcatcaaatcaccaatgcacacgtttacctatgtaacaaaacctgcacatcctgcatgtgtactctgtaacttaaaaataaatatttctttaaaaatgctactttaacctttgcctggagagagaatatatgataataggttgtccttttattgtgaattaataaatttaatttcacttttaaaataatgaatttgtttaattttttatctctaagaagttcatttttattgggtgatactaccatggaagcaaatttgtcaaagcaacacatgctcaacttgtaagatatccgtttgacagcttattgtcgtttctctcaggtagctttgcagtttgcaccatttttcttcctcttgcttttcttcctccttattcatgttattccaatttgttatatgtagcacatctccactggtatataatcaacatatggacaggactttgtctattttatttactgctatatccccacctataataaggcctggcttatattagttattcaacagatatttgcattaycttttatgcctgcattttattattactgagtaaattagttcattaaatgcttttctttttcaaaaattgatctctaaataaccttggaaaacatagaagtcagactgattaacatcaattactttttttttttcagtcacgtagcctgttgctgtctaggcctacatctcttcattgaggtgtaattcacaataactatttctctcttatttatggtgatgagatgtgggaaaagagttttccatttttttgcaaagatgtacataatcatcccccaagagattgtttcatcagaacttggctgacagctccaggtttgtgagtgagatgtaaatcatcatatgtccaggttagctgtgtctctcctttacagcctttctaccaaaatctttcaaatggtgcttctggaggctgctgcttttttctgaagatttcctctcctcttctctttccatggttccttttattttgcttttgttgaggctccttttttgacttgagaacaagaatcttcagtgaatcaataattttttcttttaaatctcaagtccaatccctctacagaaaggaggaggtataagatgtaactcaaaatagatggaagagaggagctcaagaaatcccctatttctgggtattaactactttcttctataatatc

SEQ ID NO: 59486 - DNA, 1225 bp, Homo sapiens
tgcatgttgggcttaatacctagatgatgggtttataggtgcatcaaatcaccaatgcacacgtttacctatgtaacaaaacctgcacatcctgcatgtgtactctgtaacttaaaaataaatatttctttaaaaatgctactttaacctttgcctggagagagaatatatgataataggttgtccttttattgtgaattaataaatttaatttcacttttaaaataatgaatttgtttaattttttatctctaagaagttcatttttattgggtgatactaccatggaagcaaatttgtcaaagcaacacatgctcaacttgtaagatatccgtttgacagcttattgtcgtttctctcaggtagctttgcagtttgcaccatttttcttcctcttgcttttcttcctccttattcatgttattccaatttgttatatgtagcacatctccactggtatataatcaacatatggacaggactttgtctattttatttactgctatatccccacctataataaggcctggcttatattagttattcaacagatatttgcattaccttttatgcctgcattttattattactgagtaaattagttcattaaatgcttttctttttcaaaaattgatctctraataaccttggaaaacatagaagtcagactgattaacatcaattactttttttttttcagtcacgtagcctgttgctgtctaggcctacatctcttcattgaggtgtaattcacaataactatttctctcttatttatggtgatgagatgtgggaaaagagttttccatttttttgcaaagatgtacataatcatcccccaagagattgtttcatcagaacttggctgacagctccaggtttgtgagtgagatgtaaatcatcatatgtccaggttagctgtgtctctcctttacagcctttctaccaaaatctttcaaatggtgcttctggaggctgctgcttttttctgaagatttcctctcctcttctctttccatggttccttttattttgcttttgttgaggctccttttttgacttgagaacaagaatcttcagtgaatcaataattttttcttttaaatctcaagtccaatccctctacagaaaggaggaggtataagatgtaactcaaaatagatggaagagaggagctcaagaaatcccctatttctgggtattaactactttcttctataatatc

SEQ ID NO: 59487 - DNA, 1225 bp, Homo sapiens
tgcatgttgggcttaatacctagatgatgggtttataggtgcatcaaatcaccaatgcacacgtttacctatgtaacaaaacctgcacatcctgcatgtgtactctgtaacttaaaaataaatatttctttaaaaatgctactttaacctttgcctggagagagaatatatgataataggttgtccttttattgtgaattaataaatttaatttcacttttaaaataatgaatttgtttaattttttatctctaagaagttcatttttattgggtgatactaccatggaagcaaatttgtcaaagcaacacatgctcaacttgtaagatatccgtttgacagcttattgtcgtttctctcaggtagctttgcagtttgcaccatttttcttcctcttgcttttcttcctccttattcatgttattccaatttgttatatgtagcacatctccactggtatataatcaacatatggacaggactttgtctattttatttactgctatatccccacctataataaggcctggcttatattagttattcaacagatatttgcattaccttttatgcctgcattttattattactgagtaaattagttcattaaatgcttttctttttcaaaaattgatctctaaataaccttggaaaacatagaagtcagactgattaacatcaattactttttttttttcagtcacgtagcctgttgctgtctaggcctacatctcttcattgaggtrtaattcacaataactatttctctcttatttatggtgatgagatgtgggaaaagagttttccatttttttgcaaagatgtacataatcatcccccaagagattgtttcatcagaacttggctgacagctccaggtttgtgagtgagatgtaaatcatcatatgtccaggttagctgtgtctctcctttacagcctttctaccaaaatctttcaaatggtgcttctggaggctgctgcttttttctgaagatttcctctcctcttctctttccatggttccttttattttgcttttgttgaggctccttttttgacttgagaacaagaatcttcagtgaatcaataattttttcttttaaatctcaagtccaatccctctacagaaaggaggaggtataagatgtaactcaaaatagatggaagagaggagctcaagaaatcccctatttctgggtattaactactttcttctataatatc

SEQ ID NO: 59488 - DNA, 630 bp, Homo sapiens
atgacagcaggacaataagatatgagcgaagtaaaaaggaaagagaagataagagattactgataaacggtgaagcaaaccattgtatcagctatttctggtgatgtcaatttggtgacatatcctggtgaagtgggttaattgcatgtgtgtgtcaagttgcttcttttctgatgcgggtttgacttttctcattttgactgcttttccagaggtgaaattagagtaaagaaagaaagaaagaaaaacctctacagtcaaaaactggtctaggcagtttatatcacctcacttaattattatcaaatgcttgggaagagataatattattctcattasagagatcatgaaactaaggctcagaaaagtcaaggagtttatttataatcacagaactaggaaatggctaagatggagacttgaatctatgttcatcttgatgaggagcctggtttcatcccacagcacagtcgcccacaactgcaaatgtcatgtactttccgcagcgcctcctatgacagcaaaaagagtaagagttttgggatttctaggcagaacacttatgtaatcaagtatcttagagatatttttcaatctccaagcaagctggggattgaactatgtaagtgg

SEQ ID NO: 59489 - DNA, 959 bp, Homo sapiens
gcattgtgatagcttggaagtttagtccacctatttgattctgtcaacttgttgatacagtaaccattgcaatgacaagttgaccattttgagaagtttatgaaccccatcagctctctcctgagagaataatgttgaataaatgaagaaaccaaaccaaatatttggacagcattatcaacaaataaaaggtataacatatgacttagcaaattttttagctatgtctttaaatttttgactgaggttaggtcaagggkaggcacatttaataggcaacatttcataacaagaatgaaaaatgatgatgattcaaatcccaagttatttcccgatcattgcacaattttggtaaacctttaggaagaaaatttgatttcatctacagatcctcttctagtgttccactgattatattactataggaaatatatgttctttgcccttttcattttagaaattcttgtttttgtcattattcactcaacaaacatttctcgagaatcaggcaaacataaattaaaaatggttgacatgttagaaacacaaacaggtgctgaatgagcagagaggacagatatctgatccatgctggctaagtgtgtgagcaggggcttgctgtgagatgtgccatgtgcccggaaatggagggcttcgggccggagtaagaagtgactgatgggatggaggggtagggaatgatgttccaggaagaagcagcagcagtcagaaaggcaagggtggtggaaaagaaccatgtgtttggcagcttcatggcaatggggcagaggctgttgggagctcgcatgttgacagatggtcaagactttgtaatccatgagcaaagctggaccttcttctgagaataaagggctatctttaaaaagtttaagaaagttactaacatgaggaagtgatccttttggggttgataggtgtgatgattgggtttctatgca

SEQ ID NO: 59490 - DNA, 1132 bp, Homo sapiens
aagaccaggctgtgaacaatattttaatttttaatacacatttggacttgttgagagtctctgttttaataatgttgcccttttttcctctaagaacaggctgaatattccttagagagacactttggaaatcscactatggcctgcacggcggatatctgctcttttggggttgagggaaggagcttgaatgtctctaagagcagaataggaagggaatagggttcccagatggttccagaggatgctgaacgttcactgaatgaacccctataagtatttcccctgtgctgctggtaggaaaaataccgatagagtttaaagcaaggaaggatggatggaatgtaagatggattgattcacaggtcagaaaccagatgctactgcaagtgatccctcaatgacatcatactcaacaaaacaagacaaatgttcttggtacccttccagcgcttcattgtttttcattgcctgccttaacaggatttagaatcacacggtcccagctgttaacaggtatgtaccatcacgctaccacttcaggcacatcagggaaaacatacacttggcttcctttctcagtccatacaagcattttgaacagacatgagaagagtttaagaaattgtggagggcgacacaggaccatgcctcccatgtctgacaaatggctgtgttctctgatgactagcgtgggatccatcaccctgcctcctaatccagggccttcctccagcccagctcactgcccgggtactgctgccctgtcatctctgcccttcatccctcttagaagccaatccccacttcccagtaggtggcagatacttctggtgtcctttgtacctttctcaacagccctccctgacattgcacattcaggattaggctcctgcactaatagatgacagtaacctgttattttctcagtgtggatctgtcagacttgcttgggcataaacacagttccctggtatcagcagtaccataaggtgccaggatccactgacctaagtttgctgagagatgctgaacaaaggtaaattttcctaatttgcagattgtattgtgaagtcaaattgagactattaatttggccacctttcccatcgggtaacttaggcagcttggt

SEQ ID NO: 59491 - DNA, 1132 bp, Homo sapiens
aagaccaggctgtgaacaatattttaatttttaatacacatttggacttgttgagagtctctgttttaataatgttgcccttttttcctctaagaacaggctgaatattccttagagagacactttggaaatcgcactatggcctgcacggcggatatctgctcttttggggttgagggaaggagcttgaatgtctctaagagcagaataggaagggaatagggttcccagatggttccagaggatgctgaacgttcactgaatgaacccctataagtatttcccctgtgctgctggtaggaaaaataccgatagagtttaaagcaaggaaggatggatggaatgtaagatggattgattcacaggtcagaaaccagatgctactgcaagtgatccctcaatgacatcatactcaacaaaacaagacaaatgttcttggtacccttccagcgcttcattgtttttcattgcctgccttaacaggatttagaatcacacggtcccagctgttaacaggtatgtaccatcacgctaccacttcaggcacatcagggaaaacatacacttggcttcctttctcagtccatacaagcattttgaacagacatgagaagagtttaagaaattgtggagggcgacacaggaccatgcctcccatgtctgacaaatggctgtgttctctgatgactagcrtgggatccatcaccctgcctcctaatccagggccttcctccagcccagctcactgcccgggtactgctgccctgtcatctctgcccttcatccctcttagaagccaatccccacttcccagtaggtggcagatacttctggtgtcctttgtacctttctcaacagccctccctgacattgcacattcaggattaggctcctgcactaatagatgacagtaacctgttattttctcagtgtggatctgtcagacttgcttgggcataaacacagttccctggtatcagcagtaccataaggtgccaggatccactgacctaagtttgctgagagatgctgaacaaaggtaaattttcctaatttgcagattgtattgtgaagtcaaattgagactattaatttggccacctttcccatcgggtaacttaggcagcttggt

SEQ ID NO: 59492 - DNA, 647 bp, Homo sapiens
taagaattccagagatatgtagcacaagaccagtatggcacattttgaatttcataggcattcaggctcctttagctctctgctgaaatatccatagggtgtaactcatgtgtccaagatggttcctagagacaacagaccagagttccagacagcagactggaaggcaggaaggcaggaaggcagagggctgggtcccaccatggtggggtataacctagacttcctttacaacaacatttctgcttgtatcccattgctcaaaagtttgtcacacttatagctttaagaatactgagaagtgtagtttctacctgagtacatgagttccttgaataaaattgagtttctgataacaagtaaaaatagaagaagggctgttggggtcaaccactagcagcttctgccatattccaatatcaaatatccaaacctattagaaaattatgggccgggcctggtggctcacgcctgtaatcccagcactttgggaggccgaagcgggtggattacaaggtcaggagatcgagaccatcctggctaacatggtgaaaccccrtctctactaaaaaatagaaaaaattagccgggcgtggtggtgggtgcctgtactcccagctacttgggaggctgaggcaggagaatgg

SEQ ID NO: 59493 - DNA, 647 bp, Homo sapiens
taagaattccagagatatgtagcacaagaccagtatggcacattttgaatttcataggcattcaggctcctttagctctctgctgaaatatccatagggtgtaactcatgtgtccaagatggttcctagagacaacagaccagagttccagacagcagactggaaggcaggaaggcaggaaggcagagggctgggtcccaccatggtggggtataacctagacttcctttacaacaacatttctgcttgtatcccattgctcaaaagtttgtcacacttatagctttaagaatactgagaagtgtagtttctacctgagtacatgagttccttgaataaaattgagtttctgataacaagtaaaaatagaagaagggctgttggggtcaaccactagcagcttctgccatattccaatatcaaatatccaaacctattagaaaattatgggccgggcctggtggctcacgcctgtaatcccagcactttgggaggccgaagcgggtggattacaaggtcaggagatcgagaccatcctggctaacatggtgaaaccccgtctctactraaaaatagaaaaaattagccgggcgtggtggtgggtgcctgtactcccagctacttgggaggctgaggcaggagaatgg

SEQ ID NO: 59494 - DNA, 906 bp, Homo sapiens
agagtgcccccagcccaacttgatgtgcatctagggaatgattcctgtatgctcatgaagaacacagaattgctgaaggcccttggatagcccctcaaaccccaccccaggcccagtgacatgctggggcctcaggaagaactttgtcagcaaggacagtcactggaccagaaggagccctttggatgggtgcaaggcccatccaagcagcagtctgagtagttcaatccctgcaggccaatgggacaacagatctcagtagatgccaacttggatacctgtctatttttcctagcatttgatcccctcaaacttaggcctgacaccatggaaaaagagagagggaggtctttaaattgcctaggattacatttctgccactcagatgaatctaaacctgatatgaattgtagacattcactattttctgtattaaagaaatgcacctttttaaaattagaaatggactcatatttcttgcccacttgagtctgtggacagagattmacattctacacacatattgctagttattttttcctgcattcatgtctggtctccagagctagactgcaagatattcaaggctccagagtagccctcttttctttctactaagcactttgtacataacaagacacattttgagagaaatcctatggaataggatgtgaataattgttttgtttatacattattaactagaacatcagttcaagggtttctcagctctgatttcatttataagttgtacagttttccccaagtattcatttttcacattaagaaataaatattgtcaagcaccaccacaggcaaggtcttacttctacctcttcctggggatgtagtccttgtcctcagggaacttgttattggagatgtagacaagttgtagctgattgc

SEQ ID NO: 59495 - DNA, 1180 bp, Homo sapiens
atgaaaattaagtatctgagtaaagttagaaaaaattagaaaaataataaaaagtaaaatgaggaaataaggcagatataccaccagattgtatgatccatgaccataacaagtgtagatgagaatattgagccagaactccagccctataaggaaagtgtaaattggtataaccatttttaaaaaacaatttggcattatgtaatataattaaagatgtacatagtgcatgattcagcaattccactcctaggcatatattctagagaatttcttacatatgtgccccaagggacacaccataagaatgttcacagtaacrttgtttgcaatagcaaagaaatacaggaaataacgcaaatgcccatcaacagtagaatgaataaattgtgataattcacacaatggtatactatgcagcaatgaaaatgaataaactactgctacgcacatctgtatggatgaatgtcaggaaccacgctgagtgaagaaagcaagttgctgaagtataaatatagtgtgatctcactcgtggatttagcagctttcaaacctagacactttattgtttagggatgcaaatgtatgtggtaaaatggcaacaaaaagaaaaaaaatgacaaatgcaaattttgggtcagtggttgctccaggcggaaagagagcagagtggtgtcagggaggaggcacaagaggcttcaaaggtaatggtaacatctgggtataaaatgtcaacaacagtttgcaaaagccagaattctccgatgttttgtattagaaggaatagatgggtactaaattcctgtatcttggtttcctcaattagtatcatctgaatgtcccaggtgaagaagctaagtcctagggacaagatttggacctttgaatgcaggtttctccatgtcgatccaagggcagctgtgctgtagccaaccctggggactaaagcaaattagaggtctgtttattctctacacttgtggaggtgtgtgttatctagatttacaactattcctgaagagaagacagcatgaaacacgccattcattccacactaaattacaattggaacataactgaagagaaacgtttcttaagaaacgagggactttcattcttcacattaaatccttctgttctctttgacttttcactataagcagagcttatattcagtggg

SEQ ID NO: 59496 - DNA, 1180 bp, Homo sapiens
atgaaaattaagtatctgagtaaagttagaaaaaattagaaaaataataaaaagtaaaatgaggaaataaggcagatataccaccagattgtatgatccatgaccataacaagtgtagatgagaatattgagccagaactccagccctataaggaaagtgtaaattggtataaccatttttaaaaaacaatttggcattatgtaatataattaaagatgtacatagtgcatgattcagcaattccactcctaggcatatattctagagaatttcttacatatgtgccccaagggacacaccataagaatgttcacagtaacgttgtttgcaatagcaaagaaatacaggaaataacgcaaatgcccatcaacagtagaatgaataaattgtgataattcacacaatggtatactatgcagcaatgaaaatgaataaactactgctacrcacatctgtatggatgaatgtcaggaaccacgctgagtgaagaaagcaagttgctgaagtataaatatagtgtgatctcactcgtggatttagcagctttcaaacctagacactttattgtttagggatgcaaatgtatgtggtaaaatggcaacaaaaagaaaaaaaatgacaaatgcaaattttgggtcagtggttgctccaggcggaaagagagcagagtggtgtcagggaggaggcacaagaggcttcaaaggtaatggtaacatctgggtataaaatgtcaacaacagtttgcaaaagccagaattctccgatgttttgtattagaaggaatagatgggtactaaattcctgtatcttggtttcctcaattagtatcatctgaatgtcccaggtgaagaagctaagtcctagggacaagatttggacctttgaatgcaggtttctccatgtcgatccaagggcagctgtgctgtagccaaccctggggactaaagcaaattagaggtctgtttattctctacacttgtggaggtgtgtgttatctagatttacaactattcctgaagagaagacagcatgaaacacgccattcattccacactaaattacaattggaacataactgaagagaaacgtttcttaagaaacgagggactttcattcttcacattaaatccttctgttctctttgacttttcactataagcagagcttatattcagtggg

SEQ ID NO: 59497 - DNA, 1180 bp, Homo sapiens
atgaaaattaagtatctgagtaaagttagaaaaaattagaaaaataataaaaagtaaaatgaggaaataaggcagatataccaccagattgtatgatccatgaccataacaagtgtagatgagaatattgagccagaactccagccctataaggaaagtgtaaattggtataaccatttttaaaaaacaatttggcattatgtaatataattaaagatgtacatagtgcatgattcagcaattccactcctaggcatatattctagagaatttcttacatatgtgccccaagggacacaccataagaatgttcacagtaacgttgtttgcaatagcaaagaaatacaggaaataacgcaaatgcccatcaacagtagaatgaataaattgtgataattcacacaatggtatactatgcagcaatgaaaatgaataaactactgctacgcacatctgtatggatgaatgtcaggaaccacgctgagtgaagaaagcaagttgctgaagtataaatatagtgtgatctcactcgtggatttagcagctttcaaacctagacactttattgtttagggatrcaaatgtatgtggtaaaatggcaacaaaaagaaaaaaaatgacaaatgcaaattttgggtcagtggttgctccaggcggaaagagagcagagtggtgtcagggaggaggcacaagaggcttcaaaggtaatggtaacatctgggtataaaatgtcaacaacagtttgcaaaagccagaattctccgatgttttgtattagaaggaatagatgggtactaaattcctgtatcttggtttcctcaattagtatcatctgaatgtcccaggtgaagaagctaagtcctagggacaagatttggacctttgaatgcaggtttctccatgtcgatccaagggcagctgtgctgtagccaaccctggggactaaagcaaattagaggtctgtttattctctacacttgtggaggtgtgtgttatctagatttacaactattcctgaagagaagacagcatgaaacacgccattcattccacactaaattacaattggaacataactgaagagaaacgtttcttaagaaacgagggactttcattcttcacattaaatccttctgttctctttgacttttcactataagcagagcttatattcagtggg

SEQ ID NO: 59498 - DNA, 1180 bp, Homo sapiens
atgaaaattaagtatctgagtaaagttagaaaaaattagaaaaataataaaaagtaaaatgaggaaataaggcagatataccaccagattgtatgatccatgaccataacaagtgtagatgagaatattgagccagaactccagccctataaggaaagtgtaaattggtataaccatttttaaaaaacaatttggcattatgtaatataattaaagatgtacatagtgcatgattcagcaattccactcctaggcatatattctagagaatttcttacatatgtgccccaagggacacaccataagaatgttcacagtaacgttgtttgcaatagcaaagaaatacaggaaataacgcaaatgcccatcaacagtagaatgaataaattgtgataattcacacaatggtatactatgcagcaatgaaaatgaataaactactgctacgcacatctgtatggatgaatgtcaggaaccacgctgagtgaagaaagcaagttgctgaagtataaatatagtgtgatctcactcgtggatttagcagctttcaaacctagacactttattgtttagggatgcaaatgtatgtggtaaaatggcaacaaaaagaaaaaaaatgacaaatgcaaattttgggtcagtggttgctccaggcggaaagagagcagagtggtgtcagggaggaggcacaagaggcttcaaaggtaatggtaacatctgggtataaaatgtcaacaacagtttgcaaaagccagaattctccgatgttttgtattagaaggaatagatgggtactaaattcctgtatcttggtttcctcaattagtatcatcygaatgtcccaggtgaagaagctaagtcctagggacaagatttggacctttgaatgcaggtttctccatgtcgatccaagggcagctgtgctgtagccaaccctggggactaaagcaaattagaggtctgtttattctctacacttgtggaggtgtgtgttatctagatttacaactattcctgaagagaagacagcatgaaacacgccattcattccacactaaattacaattggaacataactgaagagaaacgtttcttaagaaacgagggactttcattcttcacattaaatccttctgttctctttgacttttcactataagcagagcttatattcagtggg

SEQ ID NO: 59499 - DNA, 560 bp, Homo sapiens
tatcaccaacagatggatcttctaaaatcagatcatgttactcaccttcctagaaaccttcatgggctccctattactcccagttcctttagtgtagtgttcaaggccctttacagtccagctttagctgtcctccctgctctcctccaaaccccactactcycctttgtggaatctcctcttgagccagagccattcatgtcttttcctttctacgtctcataccctgtaccttatctccactgttaaaatcctgccagtcttctatggtctgtctgaaagacttggtcagccccagcataatccacaagggacttgcactggccctgagttatcagaccactcgtggtcgtcaacacacctcttcttgctatggttgattaggttttggtgtcaccctcttgaatgagatagaagcttctgtaggttagaaactttatcctgcacatctctgtggctgtctccagtgcttttctcttcagagctcaacaactataaaacaaaagagattttaggtgatttttcattacattttacctgtgttatggctgagagttcaa

SEQ ID NO: 59500 - DNA, 560 bp, Homo sapiens
tatcaccaacagatggatcttctaaaatcagatcatgttactcaccttcctagaaaccttcatgggctccctattactcccagttcctttagtgtagtgttcaaggccctttacagtccagctttagctgtcctccctgctctcctccaaaccccactactctcctttgtggaatctcctcttgagccagagccattcatgtcttttcctttctacgtctcataccctgtaccttatctccactgttaaaatcctgccagtcttctatggtctgtctgaaagacttggtcagccccagcataatccacaagggacttgcactggccctgagttatcagaccactcgtggtcgtcaacacacctcttctygctatggttgattaggttttggtgtcaccctcttgaatgagatagaagcttctgtaggttagaaactttatcctgcacatctctgtggctgtctccagtgcttttctcttcagagctcaacaactataaaacaaaagagattttaggtgatttttcattacattttacctgtgttatggctgagagttcaa

SEQ ID NO: 59501 - DNA, 617 bp, Homo sapiens
cagatccccaagtgcaagtgattgttcattcatctgataaacatgattaagcatccacaacatgttgaggtgctgggaatacaaagatgaattttcccttaaggattcacaggctggcgtgggagacagactgataaataaataccgaagggagaaagcrgccataaaaaaggtggggcatgtcctggtttgccctgggtagccctggtgattccttttgtagcagcataattattaatagtgctcttggaattaacagaagagtctgagaatgagcagtaagtggtgtggtcccctgggaaatggggtacagccctgcctgaggagctaggagatgggatggaggacccttaggtgatgagtttgccgcatggataaagaataggactctaggctcaggagagaattttctagtcagagggaacagtgttgactcagtcattcatcatacgttatttgggtgcccaccgtgagccatgtactagtgtacctactggggacacaatggacaaaaatcttggcctttttgtgcttacattctagcacagagagagacaaaacacaagagacgttaataaaacaaatggcattttaaatggtgacaagtgctgtggaga

SEQ ID NO: 59502 - DNA, 501 bp, Homo sapiens
cccaatctccagctcccctcccctccctggaggtggggaggtggggttgaaagattcccccccactctaatcacaggcttggtctttctggtaaacatccctatcctgatgctactgaggggccccacctgagtcccctcatttgcataacctcaggtatgggcgaaagggacttgttatgaataatacaagatactcctgtyacccaggaaattccaaaggctttaggagccctgtgtcaggaacctgagacaaagaccagatacatttgtttttataccacagatgtggacatgtgtattatacattgttcttaagaagccatagaaagcttgtcctgaaatactcgaatcctggcttcctgaagccaggttattgttggagtttctgtatacaattttagaaagctgaattagtaggccacctttttccaagacatgtttaagggtagcaacagttcaactcaataaacatttgagtgttgtgtgcccaggatcccat

SEQ ID NO: 59503 - DNA, 1094 bp, Homo sapiens
gttttgtttttgagatgggggcttgctgtcacccaggctggagtgcaatggcacaatctcggctcgctgcaagctccgcctcccgggttcatgccattctcctgcctcagcctccagagtagctgggactacaggcgcccgccaccacacccagctaatttttttgtatttttagtagagacagggtttcgctgtgttagccaggatggtctcaatctcctgatctcgtgatctgcctgcctcggcctcccaaagtgctgggattacaggcgtgagcgaccgcacccggcctattgcatctcaaaattaactataattctttttttttttttttgagacagggtggggtctcactccatcacccaggatggagtgcagtggctactatcattctcagtatctaataatctagtccatattcaaatttgccacttgtccccrgaatagttctatggatggtttgttcaaaccaggatctaatcaaagaccatgcattgcatttgatagagtaactccattttgatatgatccaaatcttgtgttcttcagggatcctatgggcatttggatgattatttatgccccattacaattcttggttctatttcctatattcctattgtaccagctttccaatcctgagtctttagataagacactgctttacttctgacagagtacccagtgagtgctttttttattttttatttttttccctgaaacagggtcttgctctgtcacccaggcttgagtgcgctgctgcaatctcagatcactgcaacctctgcctcctgggttcaagcgatcctcatggctcagcctcccaagcaactgggactacaggtgtacacgatcacacctggccaatttaaaattttttttttagagacaggatatccctgtgttgcccaaattggtcttgagctcctgggctcaagcagtctgcccaactcaacctcccagagtgttgggattacaggtgtgaaccactacacccagacatgagtgcattctttataagggtcaaaagcacgtcttcttcactgacccagtgacagattacctgatttacaacagaatctataacactttgg

SEQ ID NO: 59504 - DNA, 551 bp, Homo sapiens
cagggtctcactctgttgtccaggctggaatgcagtggtgtgatttggctcacagcaacctctgcctcctgggctcaagcgatcctctgacctcagcctcccaagtagctgggactataggcgtgtgccaccatgcctggcaaacgttttgtattttttgtagagacagggttttgccatgttgcccaggctggtctcactrctgggctcaagcaatccgcctgctttggcctcccaaagtgctgggattacaggcatgagccaccacgcctggtgcttgcaaacacgaaaattaagattttctcatttcaatcaagattttctcaggattaggcaacgaaagtaaaatgaatttggaggttgacatcagactgcagctatcatccgcagtccctaattttaagtttttaataaaaatagcttcatgatttcagtaagaaatgatataaatttcataaatacatgatataaattaaactttatcactttatacttatcatgtactggttttatatattggaagctgggatgagatttcatttgaaaagagg

SEQ ID NO: 59505 - DNA, 591 bp, Homo sapiens
tatttacgaaaaacaaaatcagcactaaaatcaacacccaacagtttccaagtttgtttacagctcagtaggacacattatgaaaaatactgcagttgtattattttaattatgcaaaataagattaaatgggattattacatgcaactttatttcttaagstcataaacatgtatttaagtgatcaaaataaaacataaactattccagaagaaaaaataagaaaatatccatttttttctcccagcataaagtatcaagttttttttttttttaactaaaaaacaaatgttgcacatttaaagcaaggcaactttaaatatgttaatttataggattaataaaattattccattttattacttatttcctagaaaagtatagtggagatatgagtagagataactaatgttattttcctgaagaaaagttaatatatgttaatgggggatgggatatgcgccatgattcttatttaatctttgtttttagaggtacagcagtacagtaaacttaaacttttaagctataggaaaataaaattgggcttctctctctccattacactttgctttgactatagaagaaaaa

SEQ ID NO: 59506 - DNA, 524 bp, Homo sapiens
tcccttgmatgaaggatcaaatagatgagccaaagtgctcacatctatgagttgaatgttgtgatttgaaaaatgactaattttaatcaatgttcaccatagttataacttgaagttgactaaactgtaattcaaatagtaaagagatagttcatgagaactgtcagagcactggaataaatgacctgtagctcctgaatttgtaaggcaacataaaatattatggagtttttaaaaggcacatcagaatgaaatgagtttagtaacagtctagctggagttgtgaagaattttggattattctgagcttcacaaagaagcccatgatacatgggatttatataaagttataatttgtgatacaaatagttttaccaagtcgatagtgtaaatagctggaaggagtatgtatgcgatttgttgacaaggtgttcagtacattatatttgtggtcgctaacaaacacatagtacatatctattactcccataaagtgtattttaatgagtaaaattctttgcagt

SEQ ID NO: 59507 - DNA, 524 bp, Homo sapiens
tcccttgaatgaaggatcaaatagatgagccaaagtgctcacatctatgagttgaatgttgtgatttgaaaaatgactaattttaatcaatgttcaccatagttataacttgaagttgactaaactgtaattcaaatagtaaagagatagttcatgagaactgtcagagcactggaataaatgacctgtagctcctgaatttgtaaggcaacataaaatattatggagtttttaaaaggcacatcagaatgaaatgagtttagtaacagtctagctggagttgtgaagaattttggaytattctgagcttcacaaagaagcccatgatacatgggatttatataaagttataatttgtgatacaaatagttttaccaagtcgatagtgtaaatagctggaaggagtatgtatgcgatttgttgacaaggtgttcagtacattatatttgtggtcgctaacaaacacatagtacatatctattactcccataaagtgtattttaatgagtaaaattctttgcagt

SEQ ID NO: 59508 - DNA, 681 bp, Homo sapiens
tcctgtctcagcytctcaagtagttgggactatagatatgtgccaccacatctgactaatttaaaaaaaaaacattttgtagagacatagtcttgaactcctggcctcaaggaattttcctgcctcggtctttgaaagacccaaggttataggcattagccactgtacccagcctggccacgagtgatgattaagtaaaaaaatgggcaatcctctggctagaattgtcaacaggtaataaaaatgaggggtgttttgctatgagtgcctctatttatgacatgtgtctctgataagagaatcagtaaaccaacattttgcaggttaaatagttttatcaaactctatggagcttgatagctataagaaaatcctgtgttacttataaaaagcacacaaacacttcataacttaactctctaataagattcagatttttagttgtattttgttaaagtgggtcatcgacaaacacatgaagcgagaaaagctgattctttttccttttacttcaatagcttttggggttcaagtgggtttttgttacatggatagattgtattgtggtgaagtctggggtttcagtgtacccatcacccaaatggtgtgcattatacctaacaggtgattttttaatcctttgtttccctcccacactctctctttctgagtctgcaatgt

SEQ ID NO: 59509 - DNA, 681 bp, Homo sapiens
tcctgtctcagcttctcaagtagttgggactatagatatgtgccaccacatctgactaatttaaaaaaaaaacattttgtagagacatagtcttgaactcctggcctcaaggaattttcctgcctyggtctttgaaagacccaaggttataggcattagccactgtacccagcctggccacgagtgatgattaagtaaaaaaatgggcaatcctctggctagaattgtcaacaggtaataaaaatgaggggtgttttgctatgagtgcctctatttatgacatgtgtctctgataagagaatcagtaaaccaacattttgcaggttaaatagttttatcaaactctatggagcttgatagctataagaaaatcctgtgttacttataaaaagcacacaaacacttcataacttaactctctaataagattcagatttttagttgtattttgttaaagtgggtcatcgacaaacacatgaagcgagaaaagctgattctttttccttttacttcaatagcttttggggttcaagtgggtttttgttacatggatagattgtattgtggtgaagtctggggtttcagtgtacccatcacccaaatggtgtgcattatacctaacaggtgattttttaatcctttgtttccctcccacactctctctttctgagtctgcaatgt

SEQ ID NO: 59510 - DNA, 681 bp, Homo sapiens
tcctgtctcagcttctcaagtagttgggactatagatatgtgccaccacatctgactaatttaaaaaaaaaacattttgtagagacatagtcttgaactcctggcctcaaggaattttcctgcctcggtctttgaaagacccaaggttataggcattagccactgtacccagcctggccacgagtgatgattaagtaaaaaaatgggcaatcctctggctagaattgtcaacaggtaataaaaatgaggggtgttttgctatgagtgcctctatttatgacatgtgtctctgataagagaatcagtaaaccaacattttgcaggttaaatagttttatcaaactctrtggagcttgatagctataagaaaatcctgtgttacttataaaaagcacacaaacacttcataacttaactctctaataagattcagatttttagttgtattttgttaaagtgggtcatcgacaaacacatgaagcgagaaaagctgattctttttccttttacttcaatagcttttggggttcaagtgggtttttgttacatggatagattgtattgtggtgaagtctggggtttcagtgtacccatcacccaaatggtgtgcattatacctaacaggtgattttttaatcctttgtttccctcccacactctctctttctgagtctgcaatgt

SEQ ID NO: 59511 - DNA, 776 bp, Homo sapiens
taggaatgcttatagtttctgtaacaacctttaaagtaatattaaattttgtttgatggataaagtcattgatataattctgtcttcggtgcttgcaagacggtgtttgtatataagagtgtatttgtgctttgtgttagaacaattgatatttctagattactaaataaagcactatagcaataacatttataatcaggaacaaaacagaatgaaataatagaaacatttaaaaatttttctatgagtgctatacatggttattcatttactataatcttcacccttttaaaatgtactatagggacctccaagtttgacctgtttaaataaattcttacctacagaacagaaacaagcacaattcacgttcatgaataattctgcacggtaaaaaataacaaaccagactacaccctttttatrttggagatttctcccttcctctccctttctttaaactcctctgtgttgtgcatacattactatatcatgtagttattcttagcaaagtttacataagctcgaaccatcttggcaacttttctttagtaaatgcagactaaaaacatgaaaactgtgacagtgctgttggaaaaaaaataggtcccaaatagtgcatgtcataatgaaaggaaaggtagctttgaagaggcatgtgacatgtttgcaactacagctcagatatgcctcttggaaagtaataataattgcctatacacaggagaaaggtttctttgcagcttcaatgacataggcctttgaagaaaagattt

SEQ ID NO: 59512 - DNA, 776 bp, Homo sapiens
taggaatgcttatagtttctgtaacaacctttaaagtaatattaaattttgtttgatggataaagtcattgatataattctgtcttcggtgcttgcaagacggtgtttgtatataagagtgtatttgtgctttgtgttagaacaattgatatttctagattactaaataaagcactatagcaataacatttataatcaggaacaaaacagaatgaaataatagaaacatttaaaaatttttctatgagtgctatacatggttattcatttactataatcttcacccttttaaaatgtactatagggacctccaagtttgacctgtttaaataaattcttacctacagaacagaaacaagcacaattcacgttcatgaataattctgcacggtaaaaaataacaaaccagactacaccctttttatattggagatttctcccttcctctccctttctttaaactcctctgtgttgtgcatacattactatatcatgtagttattcttagcaaagtttacataagctcgaaccatcttggcaacttttctttagtaaatgcagactaaaaacatgaaaactgtgacagtgctgttggaaaaaaaataggtcccaaatagtgcatgtcataatgaaaggaaaggtagctttgaagaggcatgtgacatgtttgcaactacagctcagatatgcctcttggaaagtaataataattgcctakacacaggagaaaggtttctttgcagcttcaatgacataggcctttgaagaaaagattt

SEQ ID NO: 59513 - DNA, 720 bp, Homo sapiens
actcaccttaccactcactggccccacatgggtgaggccttgaaagtcatttaacaaagtacttggaactgaaggaacgaaaaactagagccgtgtgtcattttaacaatctgttatttagtctctgtgacacttttattttatcgttggtggttgatttttattttaagatatataaactaagattcattcattttttaaggtatgtaaagaaagattcattttttatgattttgacaaatgcacagaatcacgtatccaccaccagagcaacgatatagaaaattctcatcacttcaaaaattcccgtgtttctgttttgtagtgaattcttcactccaccatcaaaccttggcaaacactattctgtttgttgttgttgttgttgttttctgagacggagtcttgctgcgtcgcccaggcgacagagagcagtggcttgatcttggctcagtgcaagctctgcctcccaggttcacgccattctcatgccccagcctcccgagtagctgggactacaggtgcccaccacaccacrcccggctaattttttgtatttttagtagagacggggtttcaccttgttagccaggatggtctcgatctcctgacctcgtgatccgcccttctcgccctcccaaactgctgggatcagtttatcttttaaaagaatatcgtgtaaacagaatcatacgtatgtaactgtttaagtctggcttc

SEQ ID NO: 59514 - DNA, 2691 bp, Homo sapiens
ggtacaggttataaacgtgtatcagaggtagaacaaagacaagatggaatcactcaccctgtaccagaccctcagatgcctaaccttagtccctacccgctcaactgcatgtacactttatgcatatatatcacctatggatagtgtcactgagcaccagtcagaatcataggaatgtaactgctgcttcatggccctgcttctcccaccttctgtaccacatgcatccttctattaggaaattatatactgtgcctcatggaacctactttggagactcattctcagtctgcactgagtctgtgtttccaggcttaagaccccaaacttggctcaaaataaacctaaccataatttctctaagttttagtgcctgttatttcacttttcagttgatagctttaaatgacttattggtgttaaaaaatataagggctaaaacccttatattttcatttctataaatttgtatatttataattatatacaaatatcaattatatgccatttcaatgattggtattttaaatacatattttgatagatttgaataatatttacatattttattattttttgtgtagtgattattttactacaaatttgtaaatttataatttctacaaattttactagttactttcaatgtacaacactatgtgattctatgtttatgtaaaggtggattggtctaggcagtatgagttttggttatgagcctgaagagcttgaaaactacttgactacaaagcaattgttaacaacttcacagcaactttacaagaacaaagtagttgctaagaagccattgcaagtatttgagaaaattcatgtgataaaaacaatgtgttagtaagaagcagattaattggattaaaaaataagtgattagaaaggtaaataatacatgaacttgagaaactgaaagaatggcattgcccatagaaaagtaggatccagctggagatgttcatgaaattttagaacatgaaaaacttttccaatatggccaggatgaaaagaggaaggagtacagaatattcttgtcctgtaacttgtatccacttttaacgaccactgccacctggtggcttgtgaccctgtttccactgaaggaagaaaccctgtttattcttgattttgcatacctaagcagggataaaaacaggataaaaagaacactggcctggaacaccagggatctaagttcctggagcgcaggggttaaagaccatagtatgtcttgttcgttgagatcgtttaactacaaatacctatacttcaacgatttcttatgaaatttgcagccaaatctggaatccagaaagaattctgacatgaattaaaatcttcaaatcccatcatgtatgttgaattactccttttttttttttcaacaagcctcatgtctcccatcctgttagaccttggtaatgtaagcccgtatctctctcctgagttactgagtaatagaagacatggcaagcacaatagctaaggaaagaggaagtgataggtggacagtcacagtgagaaacccaggaaaaatragcagcctgcaatatttcaaggaataagtttacagttgtatttttctgaagcaacattgtgagatgagtacctagctgctactgattttgattctgagaacgaaacttcctctcacgaccaacattcccacacctataactttgtatcatttgccaagaacaacctattttatgacttcttgatgcttttctgcatgcgttctgctgcttggaaattctaccctgtacacatttatttcagaaacccctagttcaaaggttacccctgctataaagccttccaacactctctccaagcagaggcaacatttcttccctctgttccacaattgattgcattttgttttcaccttactgtattcttactaaatcctcattatactcctgtctaaacaacatgtactctcttagtctgtttgggcccctgtaataaaatactataaactaggtatcttataaacaatagaaatttatttcttatagttctaaaggctggggagtccaagatcaagatattggcaggttccgtgtctggtgatggtttgctttttcatagacggaggcttttaaatatgtctttgcatggtggaaggggcaaggaaggtctcttttacaagaacagtaatctcattcatgaggttcctcccatgtgatctaatcatctcctaagggccaccacctcctaatattatcaccttggggctaaggtttcaacatgtgaattttggagtgacacaaacatttgaatcatagcatgtacaacatctgcttaaatgtgtatcagtattactgcacttaagcctttttggcatcaaacactgtgtcttttaaatctgtattccagatattattttggttgatggctactagaacaaacagtgcctctgtctcaccctccaggatgacaattctggggagaaattgaataaccctgtgacagacattgagaacatatgattttatgaggggtaggacataaatgcagagtttctgttagagtttgcatacttgtaacatttatgaaccctgagctcttaatcagtttcttagggctcagaaaacataggtggtattagagctcagaaacctaacaagtgagtttcatcatgaaggataacaaagggcttggctcttttattga

SEQ ID NO: 59515 - DNA, 702 bp, Homo sapiens
tttgtaaggatgatcaggctgttctgcttttataattgtactttaaaatgggtagctcttagctatagaactccccaatttccatgaaatttggtgcaaattagacactgaagaaaatatattctagagaaaaatgtaaaatatatcaacattactgctctcatcgggttatgtggtctaatggaaaaaaaagaacgaataccagaaacctctgagtttagttttatctttgttcttcctcagtgttctgggtaatttattttgtttttatttacttcatccaacccaaaataagtgtggttggtaaacttatgcctattccactggatctgatgactaaagtttggatgccacttaggagtgagaatgcagcagttcatttgagatgamgacaggagtctgttccttagggcttatacagagatgtaagtcaatcattcttttgagtctagctctcatgctgattccaaacttagttgtgaagtcatcgttcagagggaattttaagtggctactgctataactttttaatccaagtgacaaaagtacaatgtcttttaccttttgtatcacaaaccttttgtcattcctgaccctaaaatacaggaaataaatattgctgggaagaaaggaattaaaaactgttctatcaaatctgggactttcactgacagaggagataaagaacctacatgagtactg

SEQ ID NO: 59516 - DNA, 623 bp, Homo sapiens
tttaggacaataaatggtccctctgtgttcccacagttgtgtgttcacttggccagtggaatgctagttatctgttaattattgatgtgtttgtttcacttgccagattgtaagttccccaagggcaggaagcacattttataaaccagtatagccagggccctagcacatgagagatgctctgtaayggtgcatcacaagaatatctttgaaaattgtaaattaaaaagccatataaacatatctgactcctcctctctacctccactgtgcacttcacacacacacacacaaacacagtctgctcacacacacacatgctaaccagcttgcttttaaaagcccgtaatgtttttggttttaccatggccattgcatgtgcccagaatattacggtttcagtgggtacatcccttcttctactctcaggtgagcattttacattctccttactgtggcttggctctgcttttatctctgcttttacaattagaacagctgcatctttacatctcaaaatcccatttctcctttttcaaatttgttgtagaagaaatagacaaagagtagtgcaaattaagggaatgcatttgccacctgctgaagactgaatgtttgtgttc

SEQ ID NO: 59517 - DNA, 293 bp, Homo sapiens
tacttctccttcagcatggagtaagaggagggatttgagggaatatccaaatcaggaaggaggaaatgtcctctctaaaaattcctctcaaaactttctaagaatttattctaaaatattttggtgtttgttttagtataaaaatgtcatttccccaaatctgagtaatatcgacagtgcatgaaagaaaatatagcattttcatcctgcaggtttagtwgcctgggggaagtcccacaatccctggcttaataaacacagcattacgctatagttttgactctatagaattc

SEQ ID NO: 59518 - DNA, 532 bp, Homo sapiens
aaagaactaatggcttctggctttagtgtttacatttttcactgtgggtcaggtttctgtaaactgtgctggagctacaatggccttcttttggtgccacacacaccaaatgagcacccacctcaggccttgctgctggcttctcctggggttttggtggccttttcttatgtcttgtgcctcctctttcttgccatttagaatctcagtttaaattctatattcttatgtgayttgtttaagccaacttaaaagagatactgttgaggaaaaagggaaaatttgactatagttttggtattgaaaagtattaaagactacgtattcgtttttagaaagccaactttactgtagacgtgccctttcacctaatggtgctatgatttggggttagatatgtaacttctgtgagcctcagtttactccactataaaatgagaaaaactgacagggtggcatgcaatttaactgagaaaatcatatagagtacttagcacagtgacaaacacatagtaagtgattagaaactcca

SEQ ID NO: 59519 - DNA, 998 bp, Homo sapiens
ggagagaaatgtatttctgttttcaacttactttgaaatgtatcagaaacaggtgaattaattgacagagggatggatacatacatgatcaaacaagtataataaaatgataattatagaatctaggtggttggtacattgagaatttgctgtaccttttttataatttttctgaatgtttgaataaatttcaggtaacatgttgaaaaaaaatagaatatatatccaaccaacacttgcatgaagtatggcttagaaggaggtagaaaggcttattggattttcagcttttcatgatagtttctatctgttgaccatgggctaagtattaggctggatatatcacatacatatattatctaatttattattcaaaccaacaccaacagaagtttggacatcaacactttaatgatgagacaaatgagattcagtgaggctaagtatcrtgacaaaatttgcccttgttaaaccatgtgttaatgctatgtgtagaagtcgccacaatgagcatttccttcctctcatcccattccccatataggactatctggcaatgcccacaggaaatttttcccttcctccaacctcctctccttcctactcttcagccttcttttgtagtttggtgggactaagcagctgtggtgagaagaagaaaagtagacaagagttatctcacccaaaaagagcccatatttattgaccaatgaggaggaatgggaatgaaaggaaacaaagagaagaagctgtggaggaaacatgtgaatatgatagagaaggagaaggaaatgagggagaaagaaaaggcttcaaaacaggttggtgacccagctgagtgcagggggaatagacgaaaattttttttaatgctgcagtggcatatattaataaattacatatttactattatttgagggatacagtattgaagttacttttatttctttgcaagaacaatacttctttgaatgtgatatttctgtgctctatatttt

SEQ ID NO: 59520 - DNA, 2686 bp, Homo sapiens
tgtttcaactaattattcaaaaacatttttaagcattttgaaataaaggatttttttccaccttggctttctctttttgagcaagccatatagtatatacacacacatatgaatgaatctattcagatatatatgttcatatatagatatataggtatatctattcatatatatatatatatttatttatttattttttgagtcggagttttgctcttgctgcccaggctagagttcaatggcacgatctcagctcaccgcaatctccacctcccaggttcaagcaattctcctgcctcagcctcccaagtagctggaattacaggcatgcatcactacacccagctaattttatatttgagacggggtttctccatgttggtcaggatggtctcgaactcccgacctcaggtgatccacctgccttggtctcccaaagtgctgggattacaggcgtgagccaccgcacccggcccattcatatttttaatgtagtactatgcttcataaaatttctaaatattttatgagcttattctcccaacatgactttaaaactgatcttataaaaaccttcatctatttttatttgcttgtcataggtagaaatctcagttttctaattcagatgtgtaataaacaaaaattatttttctaaaattgaatttattttctatttttagccctattctgtcagaatgtcaaaaccataatcccaattattattactcagtctcccctctccttttcaaggaaccgtgtcaaggatccatgtgtcttacatagtctaaagacattgaagggcagggctgggcatctagtcctaaatgtactctgtcctcattgacttctattgagtcacatattgtcttgcttgtttcttagtgatcagtctgtacatattgctactaaattattctgggctgtcatctaatgcattaaattcagcaaatctctttcttctttagtaccactcttaggcaaagagaaattcttctgttgctcccacaacaaattatgctcatggactttctgagctctattaatctccaatctgctcagaaattttatgtaactgtctttatttttgctctgttttgtgttgcatggatttcattctgctgcctctgtgcattctgggacacaaggagctctgtgatgcttctcaggttctacttgtataacacatacttctgccacctttttctggagactcactaccttgttaaggtgctactgggagacagggtacaattggactatggtcttagttgcctcaaacatgtccaagataaatggatggaataaaaataacaaaaaatacagaataatcttgattggctatttacatgcttttagatgcatttttatttatttatttatttatttattttaatatgaagttatttccattttccaattgcaggcttttcctcttaactgggctttgtattctatctcctattttctgaggcatttttttttcacatttaaccactttttatttactgacttattctgttgatgatgatgacgatgatgacaatgatagttgtatcagtcaggacaaagtcaggaagacagaacccatgccaggtagttcagtagaggaatataacatgggaacctacttgtaaaagtgaaaaatgagatgaaaaaccaaatgggtcatagtaagacaacccagagcttagcaacaggtgaaaggtgttatcatccctatagctggaagtacaaatgggacacaatgatgcttctcargttcagagactgaaagtcttcaaggagagctcacaccatggagaagggacaggttctgttgagatctagcatggaacagacagaaagagagaggaagaaatataaatatcctgatttctccttttctttcttcctagtgttctgctagtgcattcaggatcctgaaacaaattagaagtcaatggacaagggtccttggaaatgcaggagtcagacatttgtggtgacaagcaaagcaatgggcatcagggaatgaacccaagagtaaacaaattaatcacaggtccaatagccaaaggacaaaaacatatgtagtctttaccaacctttgatttagatactactattattcccactttagaggagagaaaactaaaacaacgtcatgtttaaaaaaaatggtaataaaaataaagaacaggttgtttagggggccgaaggaaaaggagaggtgtggagagaacattaattcttcttttagattgattaacttgttaaaatcaacagataccccttcagtaaataacaatgaagtgaaaacgatcaagcagctcccattaaaaaaaaattcctaattcttaatttttccttgatgttcttctatcattcgtaatcaaacttcttgaaagatttttataaattactcatctttaattcttgtattttcactaacattatacatggaaacattttataattcttccactccattggaacaatactggacaaggaccccagatggttgttcatcatgacacgcagtgagggcttttcatgtttcattccatcttatctgacccttctctgttttttcttggcaaatttctgcctgttaacataaaacaccctagaaactaaaaaaaaaaaaaaaaaaaaaaaatccaggcagaaagttggagaaagtagaaaaaggaggccacatgca

SEQ ID NO: 59521 - DNA, 2686 bp, Homo sapiens
tgtttcaactaattattcaaaaacatttttaagcattttgaaataaaggatttttttccaccttggctttctctttttgagcaagccatatagtatatacacacacatatgaatgaatctattcagatatatatgttcatatatagatatataggtatatctattcatatatatatatatatttatttatttattttttgagtcggagttttgctcttgctgcccaggctagagttcaatggcacgatctcagctcaccgcaatctccacctcccaggttcaagcaattctcctgcctcagcctcccaagtagctggaattacaggcatgcatcactacacccagctaattttatatttgagacggggtttctccatgttggtcaggatggtctcgaactcccgacctcaggtgatccacctgccttggtctcccaaagtgctgggattacaggcgtgagccaccgcacccggcccattcatatttttaatgtagtactatgcttcataaaatttctaaatattttatgagcttattctcccaacatgactttaaaactgatcttataaaaaccttcatctatttttatttgcttgtcataggtagaaatctcagttttctaattcagatgtgtaataaacaaaaattatttttctaaaattgaatttattttctatttttagccctattctgtcagaatgtcaaaaccataatcccaattattattactcagtctcccctctccttttcaaggaaccgtgtcaaggatccatgtgtcttacatagtctaaagacattgaagggcagggctgggcatctagtcctaaatgtactctgtcctcattgacttctattgagtcacatattgtcttgcttgtttcttagtgatcagtctgtacatattgctactaaattattctgggctgtcatctaatgcattaaattcagcaaatctctttcttctttagtaccactcttaggcaaagagaaattcttctgttgctcccacaacaaattatgctcatggactttctgagctctattaatctccaatctgctcagaaattttatgtaactgtctttatttttgctctgttttgtgttgcatggatttcattctgctgcctctgtgcattctgggacacaaggagctctgtgatgcttctcaggttctacttgtataacacatacttctgccacctttttctggagactcactaccttgttaaggtgctactgggagacagggtacaattggactatggtcttagttgcctcaaacatgtccaagataaatggatggaataaaaataacaaaaaatacagaataatcttgattggctatttacatgcttttagatgcatttttatttatttatttatttatttattttaatatgaagttatttccattttccaattgcaggcttttcctcttaactgggctttgtattctatctcctattttctgaggcatttttttttcacatttaaccactttttatttactgacttattctgttgatgatgatgacgatgatgacaatgatagttgtatcagtcaggacaaagtcaggaagacagaacccatgccaggtagttcagtagaggaatataacatgggaacctacttgtaaaagtgaaaaatgagatgaaaaaccaaatgggtcatagtaagacaacccagagcttagcaacaggtgaaaggtgttatcatccctatagctggaagtacaaatgggacacaatgatgcttctcaagttcagagactgaaagtcttcaaggagagctcacaccatggagaagggacaggttctgttgagatctagcatggaacagacagaaagagagaggaagaaatataaatatcctgatttctccttttctttcttcctagtgttctgctagtgcattcaggatcctgaaacaaattagaagtcaatggacaagggtccttggaaatgcaggagtcagacatttgtggtgacaagcaaagcaatgggcatcagggaatgaacccaagagtaaacaaattamtcacaggtccaatagccaaaggacaaaaacatatgtagtctttaccaacctttgatttagatactactattattcccactttagaggagagaaaactaaaacaacgtcatgtttaaaaaaaatggtaataaaaataaagaacaggttgtttagggggccgaaggaaaaggagaggtgtggagagaacattaattcttcttttagattgattaacttgttaaaatcaacagataccccttcagtaaataacaatgaagtgaaaacgatcaagcagctcccattaaaaaaaaattcctaattcttaatttttccttgatgttcttctatcattcgtaatcaaacttcttgaaagatttttataaattactcatctttaattcttgtattttcactaacattatacatggaaacattttataattcttccactccattggaacaatactggacaaggaccccagatggttgttcatcatgacacgcagtgagggcttttcatgtttcattccatcttatctgacccttctctgttttttcttggcaaatttctgcctgttaacataaaacaccctagaaactaaaaaaaaaaaaaaaaaaaaaaaatccaggcagaaagttggagaaagtagaaaaaggaggccacatgca

SEQ ID NO: 59522 - DNA, 2686 bp, Homo sapiens
tgtttcaactaattattcaaaaacatttttaagcattttgaaataaaggatttttttccaccttggctttctctttttgagcaagccatatagtatatacacacacatatgaatgaatctattcagatatatatgttcatatatagatatataggtatatctattcatatatatatatatatttatttatttattttttgagtcggagttttgctcttgctgcccaggctagagttcaatggcacgatctcagctcaccgcaatctccacctcccaggttcaagcaattctcctgcctcagcctcccaagtagctggaattacaggcatgcatcactacacccagctaattttatatttgagacggggtttctccatgttggtcaggatggtctcgaactcccgacctcaggtgatccacctgccttggtctcccaaagtgctgggattacaggcgtgagccaccgcacccggcccattcatatttttaatgtagtactatgcttcataaaatttctaaatattttatgagcttattctcccaacatgactttaaaactgatcttataaaaaccttcatctatttttatttgcttgtcataggtagaaatctcagttttctaattcagatgtgtaataaacaaaaattatttttctaaaattgaatttattttctatttttagccctattctgtcagaatgtcaaaaccataatcccaattattattactcagtctcccctctccttttcaaggaaccgtgtcaaggatccatgtgtcttacatagtctaaagacattgaagggcagggctgggcatctagtcctaaatgtactctgtcctcattgacttctattgagtcacatattgtcttgcttgtttcttagtgatcagtctgtacatattgctactaaattattctgggctgtcatctaatgcattaaattcagcaaatctctttcttctttagtaccactcttaggcaaagagaaattcttctgttgctcccacaacaaattatgctcatggactttctgagctctattaatctccaatctgctcagaaattttatgtaactgtctttatttttgctctgttttgtgttgcatggatttcattctgctgcctctgtgcattctgggacacaaggagctctgtgatgcttctcaggttctacttgtataacacatacttctgccacctttttctggagactcactaccttgttaaggtgctactgggagacagggtacaattggactatggtcttagttgcctcaaacatgtccaagataaatggatggaataaaaataacaaaaaatacagaataatcttgattggctatttacatgcttttagatgcatttttatttatttatttatttatttattttaatatgaagttatttccattttccaattgcaggcttttcctcttaactgggctttgtattctatctcctattttctgaggcatttttttttcacatttaaccactttttatttactgacttattctgttgatgatgatgacgatgatgacaatgatagttgtatcagtcaggacaaagtcaggaagacagaacccatgccaggtagttcagtagaggaatataacatgggaacctacttgtaaaagtgaaaaatgagatgaaaaaccaaatgggtcatagtaagacaacccagagcttagcaacaggtgaaaggtgttatcatccctatagctggaagtacaaatgggacacaatgatgcttctcaagttcagagactgaaagtcttcaaggagagctcacaccatggagaagggacaggttctgttgagatctagcatggaacagacagaaagagagaggaagaaatataaatatcctgatttctccttttctttcttcctagtgttctgctagtgcattcaggatcctgaaacaaattagaagtcaatggacaagggtccttggaaatgcaggagtcagacatttgtggtgacaagcaaagcaatgggcatcagggaatgaacccaagagtaaacaaattaatcacaggtccaatagccaaaggacaaaaacatatgtagtctttaccaacctttgatktagatactactattattcccactttagaggagagaaaactaaaacaacgtcatgtttaaaaaaaatggtaataaaaataaagaacaggttgtttagggggccgaaggaaaaggagaggtgtggagagaacattaattcttcttttagattgattaacttgttaaaatcaacagataccccttcagtaaataacaatgaagtgaaaacgatcaagcagctcccattaaaaaaaaattcctaattcttaatttttccttgatgttcttctatcattcgtaatcaaacttcttgaaagatttttataaattactcatctttaattcttgtattttcactaacattatacatggaaacattttataattcttccactccattggaacaatactggacaaggaccccagatggttgttcatcatgacacgcagtgagggcttttcatgtttcattccatcttatctgacccttctctgttttttcttggcaaatttctgcctgttaacataaaacaccctagaaactaaaaaaaaaaaaaaaaaaaaaaaatccaggcagaaagttggagaaagtagaaaaaggaggccacatgca

SEQ ID NO: 59523 - DNA, 2686 bp, Homo sapiens
tgtttcaactaattattcaaaaacatttttaagcattttgaaataaaggatttttttccaccttggctttctctttttgagcaagccatatagtatatacacacacatatgaatgaatctattcagatatatatgttcatatatagatatataggtatatctattcatatatatatatatatttatttatttattttttgagtcggagttttgctcttgctgcccaggctagagttcaatggcacgatctcagctcaccgcaatctccacctcccaggttcaagcaattctcctgcctcagcctcccaagtagctggaattacaggcatgcatcactacacccagctaattttatatttgagacggggtttctccatgttggtcaggatggtctcgaactcccgacctcaggtgatccacctgccttggtctcccaaagtgctgggattacaggcgtgagccaccgcacccggcccattcatatttttaatgtagtactatgcttcataaaatttctaaatattttatgagcttattctcccaacatgactttaaaactgatcttataaaaaccttcatctatttttatttgcttgtcataggtagaaatctcagttttctaattcagatgtgtaataaacaaaaattatttttctaaaattgaatttattttctatttttagccctattctgtcagaatgtcaaaaccataatcccaattattattactcagtctcccctctccttttcaaggaaccgtgtcaaggatccatgtgtcttacatagtctaaagacattgaagggcagggctgggcatctagtcctaaatgtactctgtcctcattgacttctattgagtcacatattgtcttgcttgtttcttagtgatcagtctgtacatattgctactaaattattctgggctgtcatctaatgcattaaattcagcaaatctctttcttctttagtaccactcttaggcaaagagaaattcttctgttgctcccacaacaaattatgctcatggactttctgagctctattaatctccaatctgctcagaaattttatgtaactgtctttatttttgctctgttttgtgttgcatggatttcattctgctgcctctgtgcattctgggacacaaggagctctgtgatgcttctcaggttctacttgtataacacatacttctgccacctttttctggagactcactaccttgttaaggtgctactgggagacagggtacaattggactatggtcttagttgcctcaaacatgtccaagataaatggatggaataaaaataacaaaaaatacagaataatcttgattggctatttacatgcttttagatgcatttttatttatttatttatttatttattttaatatgaagttatttccattttccaattgcaggcttttcctcttaactgggctttgtattctatctcctattttctgaggcatttttttttcacatttaaccactttttatttactgacttattctgttgatgatgatgacgatgatgacaatgatagttgtatcagtcaggacaaagtcaggaagacagaacccatgccaggtagttcagtagaggaatataacatgggaacctacttgtaaaagtgaaaaatgagatgaaaaaccaaatgggtcatagtaagacaacccagagcttagcaacaggtgaaaggtgttatcatccctatagctggaagtacaaatgggacacaatgatgcttctcaagttcagagactgaaagtcttcaaggagagctcacaccatggagaagggacaggttctgttgagatctagcatggaacagacagaaagagagaggaagaaatataaatatcctgatttctccttttctttcttcctagtgttctgctagtgcattcaggatcctgaaacaaattagaagtcaatggacaagggtccttggaaatgcaggagtcagacatttgtggtgacaagcaaagcaatgggcatcagggaatgaacccaagagtaaacaaattaatcacaggtccaatagccaaaggacaaaaacatatgtagtctttaccaacctttgatttagatactactattattcccactttagaggagagaaaactaaaacaacgtcatgtttaaaaaaaatggtaataaaaataaagaacaggttgtttagggggccgaaggaaaaggagaggtgtggagagaacattaattcttcttttagattgawtaacttgttaaaatcaacagataccccttcagtaaataacaatgaagtgaaaacgatcaagcagctcccattaaaaaaaaattcctaattcttaatttttccttgatgttcttctatcattcgtaatcaaacttcttgaaagatttttataaattactcatctttaattcttgtattttcactaacattatacatggaaacattttataattcttccactccattggaacaatactggacaaggaccccagatggttgttcatcatgacacgcagtgagggcttttcatgtttcattccatcttatctgacccttctctgttttttcttggcaaatttctgcctgttaacataaaacaccctagaaactaaaaaaaaaaaaaaaaaaaaaaaatccaggcagaaagttggagaaagtagaaaaaggaggccacatgca

SEQ ID NO: 59524 - DNA, 1274 bp, Homo sapiens
attattgcccaactcctaaccactccacacctcctaacaccataaccatggagatgagaatttaaaccacagcacacacaaaccacaagccacctacatttagactgtagcacttgcctgtgttttgcaatttaaattgactgagattagtgatgtattggaaacaccagtgttgccgttttttctgcatgctgctaccaaaagggacaaaactgtatcccaataacttttctcaatgtttcttcctaagatttctcagtcagatataggaggaagcctagtaatggagatcatattatggtttccttcctagccaagactgttttttctcttatatagcctcatgtcacctcagctaatttaagggaagagtagacctaataatgtaataaataaaaagcctgaatgattaaaaaaccattataacataatggacatgcaggaacctttcagaaagcaggccaaagtcaaggatgacaatggataaatcagacatgaactagtgtctaactaaggagtttttccactgacaattcaagaaggctttataattcctgcccagcaggagtttgccattgccgtgcattagtgactgctatgcattcttcaattccaaatggccaaaattggccyttggttttcaatactctatttctgtttcccatttttctgtgtattaggggtgtgtgtgtgttttgtgaaaattgtggagaaagagaaatgatttattaatttatacatcaccagaccttgaggagtaacatccaaactcaacagagagcattgcatattacccagtgactctagactttgtgtagaacgcagtgactacatggaaggttgtattacatttttggatacaagagtggggaaaatgttatatattgatacttgagtagccagagaggaagagattgtaaatcatctcttagtatccactcatccagttgttaacaaccaaccctctcccctcaattttgagtcacaatagcccaaatgtaaagtacatttctgagcatctcttgtgactaagtggccacaagggcttgttgccctccatttcctttctctctgctggctagaagatggtgacaactagaatagctacccaaaaacaagaaaagtaagctagaaattgaaggtaacagatgctctctcagccaacaggcctaatactcgtgaaactactaccaacctctgggccaaaaagtaagagagaaataaatttctgttaaaggttcaaagcaaaattgaatagaatgtacagagatttc

SEQ ID NO: 59525 - DNA, 749 bp, Homo sapiens
ccttgtcrctgtctttgctgagcgcagcatgctccagtgaagtcagccttggctggaacctgagcgtggggccgcagctgaggcacttcagcatttgttgaggaatggacaagacagacctgccgttgatggtctgttgaaccgctccccgtctcactattccatgagtccttccaggatcactcagatggatggagggttgtgtctaaaaatgataatggctgcttaaactatggcaataacttgtatgtacatatattttcttccaagaagtaaaatctgctttatagatggtatttcaataatcttcctcctttttctttggaattttaaatgatgtggcctataaaactggaaaggcagcaaaacaataatttgctttgataaaaatttcaatattattgtttcccttttcttgaggaattcttttttttttttgataaattgcagtttctttgggcaccaatagtgtaagactgtcatcatttctcttatgtgaaaataatagactttgtctatttttacttcctctattcagtcaacccaaattttctttttttccccttttctcacatttctttacctatttctagagctttctgatcaatgttgattgaccagtctccaacatttcctatgaaatggaagaagaaagtcaatagcctcttgtttcaagtctacactcctttgcccagttctcttcttctttttcttcttcttcttcttctttttttttttttttttttttt

SEQ ID NO: 59526 - DNA, 720 bp, Homo sapiens
ttttcccacacatgcacacgcagtcctgtgtcgccctctaaagaagcaataaatggcatgctgttgtcagtgctctgagctctgactttccactcaatgctctgtcttgaggatggttcccaggcagcacaggggggcctacctcaccctctctcttggctcccagctggcttccagagcaccataatcagctccatctttccctcctgaacattaccctcatggtcctcagcatccttgagtgtgttgggctggttttctcctgttcttcaaggttttgtgtttattcctactctgatgtcttagccacatttcctcttcccctgtttggcacctttaatccagwgcatgagttgtccagctccagccctgtccctttataaggccatcagggctgtgctaggcaggtggtactccccaggaacgcaattagggcttacagtggccactttaaaccagcactcaaaatgtttccttcgcttcctcttgttttccctgggcagagccttaagtccttatgacaaattggatcattgtccacatggatcatgggcagggacatcaacaatcttgttccttcaaagtactgagcacagtgccaggaacgaattttgtttcatgaatcctcagagggatggccatgtctaccagccttcccttgtagattgtgagtgtttttagggaaggggctctggcctgcttttgcccaggccacccgga

SEQ ID NO: 59527 - DNA, 720 bp, Homo sapiens
ttttcccacacatgcacacgcagtcctgtgtcgccctctaaagaagcaataaatggcatgctgttgtcagtgctctgagctctgactttccactcaatgctctgtcttgaggatggttcccaggcagcacaggggggcctacctcaccctctctcttggctcccagctggcttccagagcaccataatcagctccatctttccctcctgaacattaccctcatggtcctcagcatccttgagtgtgttgggctggttttctcctgttcttcaaggttttgtgtttattcctactctgatgtcttagccacatttcctcttcccctgtttggcacctttaatccagtgcatgagttgtccagctccagccctgtccctttataaggccatcagggctgtgctaggcaggtggtactccccaggaacgcaattagggcttacagtggccactttaaaccagcactcaaaatgtttccttcgcttcctcttgttttccctgggcasagccttaagtccttatgacaaattggatcattgtccacatggatcatgggcagggacatcaacaatcttgttccttcaaagtactgagcacagtgccaggaacgaattttgtttcatgaatcctcagagggatggccatgtctaccagccttcccttgtagattgtgagtgtttttagggaaggggctctggcctgcttttgcccaggccacccgga

SEQ ID NO: 59528 - DNA, 720 bp, Homo sapiens
ttttcccacacatgcacacgcagtcctgtgtcgccctctaaagaagcaataaatggcatgctgttgtcagtgctctgagctctgactttccactcaatgctctgtcttgaggatggttcccaggcagcacaggggggcctacctcaccctctctcttggctcccagctggcttccagagcaccataatcagctccatctttccctcctgaacattaccctcatggtcctcagcatccttgagtgtgttgggctggttttctcctgttcttcaaggttttgtgtttattcctactctgatgtcttagccacatttcctcttcccctgtttggcacctttaatccagtgcatgagttgtccagctccagccctgtccctttataaggccatcagggctgtgctaggcaggtggtactccccaggaacgcaattagggcttacagtggccactttaaaccagcactcaaaatgtttccttcgcttcctcttgttttccctgggcagagccttaagtccttatgacaaattggatcattgtccacatggatcatgggcagggacatcaacaatcttgttccttcaaagtactgagcacagtgccaggaacgaattttgtttcatgaatcctcagagggatggccatgtctaccagccttcccttgtagattgtgagtgtttttagggaaggggctctggcctgcttttgcccaggycacccgga

SEQ ID NO: 59529 - DNA, 641 bp, Homo sapiens
ttcacaaaaacctgtgagagaaaaaataattttttggccattttaaagataactaaaaagacaaagacagattatatcataaatttgttaatgattacactaaagttcaaaaagcatcttattacagttcctatattagtttagtttttttccttctttctgatattgaccttataatttcagaaactattgactattctcattgcccagtttcaaactgtrtggcacagaaggcaaaattctttaataaaaactcagaaaggagaaacacgatcctttataaatctaaaatatgcttagataaaagctgtgtaatttcagctgtgaaactgtgttaaaagcatactatgatgtactttaaagccatagactatgcttttgtgatttcatctgtgacaagagacaggtgatctgtgtgatggggtctttcacttgaaaggaagaaaccacaggctcatgcctgtgatcccagcactttgggaggccgaggtgggcagatcacctgaggtgagcttgctaggaaccaagagtctataaccacagacacacagggattcataatcacggagtaagaaaaaagacactggacttaaccaaatcacagaaactaaggaaattcaactctcaaaaatcaaaatcaa

SEQ ID NO: 59530 - DNA, 558 bp, Homo sapiens
ggagtgaaaaattctgtttagataaatgcaactattcaaacacatgctttcaaataacacttcctccttagtgctgagggccatcttgatactttgttaaaatgattcaatcaagagacagaatagagagattgagggagagtgtgatgctttctttaatgccctgatcctgagttagatgtatcagcagtgtgtcctggagctttttctaaacctcctgtttccacatctaccaccttctatcacactggattctttacatagtttccaccacgacactgtaaatgttaaggatgtcaaatcaagattgaatcttggtttttccattgcctttatattatagcaaagtacctggtacatagtttatagttaataactatcatctaagtggattrgttaccctacattatcttcccaaataaatgccaatttcaaataaataccaaattttgccaactctctattcaaacccacatctttcattttcaggaaatgacatattctctttaatgaaaataaggacataaagtatcacctaccattatgtagccagtccca

SEQ ID NO: 59531 - DNA, 1174 bp, Homo sapiens
atatcctcacaagtatttcttttttttttttttttttttttttgagacggagtctcactctgtcgcccaggctggagtgcagtggcgcgatctcggctcactgcaagctccgcctcccgggttcccgccattctcctgcctcagcctcccgagtagctgggactacaggcgcccgccaccgkgcccggctaattttttttgtattttttagtagtgacggggtttcaccgtgttagccaggatggtctcgatctcctgacctcgtgatcagcccgcctcggcctcccaaagtgctgggattacagcctcacaagcatttctaagtattaacaactagaagcaagttcagtttgctaaactgcatgaatggtctgcacattaaataactgaaggttagagaaataaacacatcttaaaattcctctccaataaacccaaagaaaaactacatgccatcaaatgacacagttggagataccgtttccgaacctaatataaattgttaatgttttatacctcaggactaactgtcacggttagtatttaaacagcctcagtcaatgggaagaactgaaatgttacttttctccatgtaaaattttttgattttttatttgtcttgaataatatgaaatgctacagttcccctgtaatgcctgtgaactgagttattaaataaatgactccagccctgggcagcagtgggccatgacatgcagctatttgcactcacaatacaaattcagctggatggatgaacctggcatggtacatcctcattgggatgttcgttagcctcactttacagctgtcagaaatgatatctgttattcagcccagactcgggctctgagaaataattctaaagcaattgatgataaaacatgggaaattatttgagaaaatgcaaacctatttgaaaagctgacaaaccaaatgtaaaaaagaaaatcagtcttggaagattaaaatgtaataataaaaataataattacagattagagccagacaaaggatatgcactcaaccttacctaagagagtcctgtgacagtttattacactagtccccaagccacacacttaatttgtttctaagcctgcatcctatccctgtgagttactcaagtatataaacctcactgtgttcatcgtgcttctcaggtgttatatgc

SEQ ID NO: 59532 - DNA, 1174 bp, Homo sapiens
atatcctcacaagtatttcttttttttttttttttttttttttgagacggagtctcactctgtcgcccaggctggagtgcagtggcgcgatctcggctcactgcaagctccgcctcccgggttcccgccattctcctgcctcagcctcccgagtagctgggactacaggcgcccgccaccgtgcccggctaattttttttgtattttttagtagtgacggggtttcaccgtgttagccaggatggtctcgatctcctgacctcgtgatcagcccgcctcggcctcccaaagtgctgggattacagcctcacaagcatttctaagtattaacaactagaagcaagttcagtttgctaaactgcatgaatggtctgcacattaaataactgaaggttagagaaataaacacatcttaaaattcctctccaataaacccaaagaaaaactacatgccatcaaatgacacagttggagataccgtttccgaacctaatataaattgttaatgttttatacctcargactaactgtcacggttagtatttaaacagcctcagtcaatgggaagaactgaaatgttacttttctccatgtaaaattttttgattttttatttgtcttgaataatatgaaatgctacagttcccctgtaatgcctgtgaactgagttattaaataaatgactccagccctgggcagcagtgggccatgacatgcagctatttgcactcacaatacaaattcagctggatggatgaacctggcatggtacatcctcattgggatgttcgttagcctcactttacagctgtcagaaatgatatctgttattcagcccagactcgggctctgagaaataattctaaagcaattgatgataaaacatgggaaattatttgagaaaatgcaaacctatttgaaaagctgacaaaccaaatgtaaaaaagaaaatcagtcttggaagattaaaatgtaataataaaaataataattacagattagagccagacaaaggatatgcactcaaccttacctaagagagtcctgtgacagtttattacactagtccccaagccacacacttaatttgtttctaagcctgcatcctatccctgtgagttactcaagtatataaacctcactgtgttcatcgtgcttctcaggtgttatatgc

SEQ ID NO: 59533 - DNA, 974 bp, Homo sapiens
gcttgccatatgacacaaggtatgagctcttgccaccaaagagctccctttggaaaatcctgctcccaggaaaaatcctgctctgcagaaagaaaaaaggcaagctgcttacggagcaaagcccctaataccaatccagggtctttacaactcacgctaagccatgacttgctccatttcaaaggcaatcgtcctgaaaatcyaagtaaatggatgaccatcacacacaatctgtatcattcctgagatgccaacacagaattgctgtgtctgagtggagattattgtgtcttggctgtgtgcttttgaaaagaggaatcgggaaaaggcttggtgtgtaagcggttatacgtgtgaataaggcagcttcacttcccaacacacattaacagtcaccattaattatttacaggcagagcccctgggacatgtgagagcaggccagagggagaaaggccattagcagggcccagaaggaatagaatcaactgctgtcatccctcagatgggggcacttaattatgtcattgcttgtctctcagaattaaacaaatacccgcttatccagtaaaagacatgtgcaggtatgtgtatgtgtgaatgcacaagcaggtatgaagtagcctcttctgtccatgttaggaacatacatacaaacagctaaacctttaagcccaagttaagggacattttgaaggtggaacttagggcatatgtaggccataaggtgcccatgagattacaagggtgatttaacttgatttttcaatcatgccttgtgtgtggagtaaatgatgtaataagaatctagaacctgctcagttttctttacattataaaaatgttgtggtgtttatctgtttcgactctgactttcttaagttgcagggtgacaccatatccactctcaccgaccctgtgggctgagggtctggtccaatcaagttgttggaaggacattaggaaaaggcacc

SEQ ID NO: 59534 - DNA, 634 bp, Homo sapiens
cccccagggcagaggactatcagactggaggtgamtcctgggggcccaggattgcctccctcagtggcctctctgtcgcccttgctgccggccgttgaattcactgataaacatcagcccagggagttgagacctcagggcccctggagaagatctgtgcaggcaagaagcgatctgctgaagccacagttcagggtcctctttgctcacatcattttacgtgaaagaagctatttctgtgataatgaaaaggccacggcggggttgcaggtcgtctctgcagccctgggctgtccatccccagacgccatgcaatgtgcgaggccgctggctctggcaggtccaccctgggagggcatcatgctgccaaggtcctccagcacccacagagcttctccccaccttacagacagggaaactgaggttcacaaagccagtagaggttaggattggggtcattcctgggtctgctgactccactctgctctttgccacttgatattggatgggagcagggcacttacatttaacaccgtgtgtcctagggggcaggcgctacaccctgcacttacctgtgttaccttgttcaatcctaacaccatgagtgggtatcgacccattttgcagatgagaa

SEQ ID NO: 59535 - DNA, 634 bp, Homo sapiens
cccccagggcagaggactatcagactggaggtgaatcctgggggcccaggattgcctccctcagtggcctctctgtcgcccttgctgccggccgttgaattcactgataaacatcagcccagggagttgagacctcagggcccctggagaagatctgtgcaggcaagaagcgatctgctgaagccacagttcagggtcctctttgctcacatcattttacgtgaaagaagctatttctgtgataatgaaaaggccacggcggggttgcaggtcgtctctgcagccctgggctgtccatccccagacgccrtgcaatgtgcgaggccgctggctctggcaggtccaccctgggagggcatcatgctgccaaggtcctccagcacccacagagcttctccccaccttacagacagggaaactgaggttcacaaagccagtagaggttaggattggggtcattcctgggtctgctgactccactctgctctttgccacttgatattggatgggagcagggcacttacatttaacaccgtgtgtcctagggggcaggcgctacaccctgcacttacctgtgttaccttgttcaatcctaacaccatgagtgggtatcgacccattttgcagatgagaa

SEQ ID NO: 59536 - DNA, 1029 bp, Homo sapiens
ataacactgcctcatttccagaggcacatagtcctagggatcaaagtgctcccaagtgaggagagagtgactctctccttcgcgacaggacattgatcaggaaaccggggtcaggayggccctgtattcaccaaataaagcatgtagcatagggctgaggctggagccagtgccaagtaaatatcccttcttctccctctactgttaaccagaattaatgatttgtaggtatgttaacagaaaataagtgacccctaatccacttacacaagaatatctgggtaagagaaacacagtaaccatgctagtaacttctgttgagatggggatgtgtcagtctttggaggcaggcattatatttcaggaccatgattttaagatgaggaaaccaaagctcagagaggtttggaaatgtaggagattggtcagagtcgtaggaaaaactacagggaaaggacacaaaccttctgaaagtttggaagcttctgcagagccctgggggagaacagctgaaggcagagggcaaggagtgtaggggaatgtatcttaaacaggcttgtttacttatgttgaccaggaactgacctttgatcatctgctggcttgatgttccctgaaaggggaacaataaatgttaattacctacaggttgtgttggctccaggttttcggcattgtgcctgcactgaatgaaagcaagcagctctagcttcttcgggctgctctctggccaacagagccaggcagtgactcagctgctcttacaccgtacacctgtgtctgagtactcatttcatccatcagccagggtctgtgggacacacctggcagggaaacttcttgaaggtcccacagttagtaaatagcaaggtcaagacttaaaccttgctttgtctaaaatcaaagggtgctctcttaaccacacaaaacccctacaggtactctctacagcctaaggccaacgacactcagaggagcccctcttcctccctgctcagcttcagagaccaggaatcacataacaacgtg

SEQ ID NO: 59537 - DNA, 1029 bp, Homo sapiens
ataacactgcctcatttccagaggcacatagtcctagggatcaaagtgctcccaagtgaggagagagtgactctctccttcgcgacaggacattgatcaggaaaccggggtcaggatggccctgtattcaccaaataaagcatgtagcatagggctgaggctggagccagtgccaagtaaatatcccttcttctccctctactgttaaccagaattaatgatttgtaggtatgttaacagaaaataagtgacccctaatccacttacacaagaatatctgggtaagagaaacacagtaaccatgctagtaacttctgttgagatggggatgtgtcagtctttggaggcaggcattatatttcaggaccatgattttaagatgaggaaaccaaagctcagagaggtttggaaatgtaggagattggtcagagtsgtaggaaaaactacagggaaaggacacaaaccttctgaaagtttggaagcttctgcagagccctgggggagaacagctgaaggcagagggcaaggagtgtaggggaatgtatcttaaacaggcttgtttacttatgttgaccaggaactgacctttgatcatctgctggcttgatgttccctgaaaggggaacaataaatgttaattacctacaggttgtgttggctccaggttttcggcattgtgcctgcactgaatgaaagcaagcagctctagcttcttcgggctgctctctggccaacagagccaggcagtgactcagctgctcttacaccgtacacctgtgtctgagtactcatttcatccatcagccagggtctgtgggacacacctggcagggaaacttcttgaaggtcccacagttagtaaatagcaaggtcaagacttaaaccttgctttgtctaaaatcaaagggtgctctcttaaccacacaaaacccctacaggtactctctacagcctaaggccaacgacactcagaggagcccctcttcctccctgctcagcttcagagaccaggaatcacataacaacgtg

SEQ ID NO: 59538 - DNA, 1029 bp, Homo sapiens
ataacactgcctcatttccagaggcacatagtcctagggatcaaagtgctcccaagtgaggagagagtgactctctccttcgcgacaggacattgatcaggaaaccggggtcaggatggccctgtattcaccaaataaagcatgtagcatagggctgaggctggagccagtgccaagtaaatatcccttcttctccctctactgttaaccagaattaatgatttgtaggtatgttaacagaaaataagtgacccctaatccacttacacaagaatatctgggtaagagaaacacagtaaccatgctagtaacttctgttgagatggggatgtgtcagtctttggaggcaggcattatatttcaggaccatgattttaagatgaggaaaccaaagctcagagaggtttggaaatgtaggagattggtcagagtcgtaggaaaaactacagggaaaggacacaaaccttctgaaagttyggaagcttctgcagagccctgggggagaacagctgaaggcagagggcaaggagtgtaggggaatgtatcttaaacaggcttgtttacttatgttgaccaggaactgacctttgatcatctgctggcttgatgttccctgaaaggggaacaataaatgttaattacctacaggttgtgttggctccaggttttcggcattgtgcctgcactgaatgaaagcaagcagctctagcttcttcgggctgctctctggccaacagagccaggcagtgactcagctgctcttacaccgtacacctgtgtctgagtactcatttcatccatcagccagggtctgtgggacacacctggcagggaaacttcttgaaggtcccacagttagtaaatagcaaggtcaagacttaaaccttgctttgtctaaaatcaaagggtgctctcttaaccacacaaaacccctacaggtactctctacagcctaaggccaacgacactcagaggagcccctcttcctccctgctcagcttcagagaccaggaatcacataacaacgtg

SEQ ID NO: 59539 - DNA, 728 bp, Homo sapiens
cctctctggagctcctatccaatctccatttccagggatccctgggagtcctggcaggttcactcattccagactgcagcttcactcattccacacccgtggtgtggccagcctctgctgcagtctcccaggaagctgcctcccagcccttagctcccacccccacctgacaccttctttttggagaggtgttgggtacaaagggaattagcacacattcagcagacaccgaagtcagacattgcaccaagctcctcgctgttagattctgcagatggcttctggacacaaaatattgatgaatcacatttcagcatcacgtggtccgagaagcaaaagtcacacggatggagcatgtgtctctcagcatgtatccctctctgctgtctctggggtggtcagtgcctgctccccactccctgtccagaggatctgcagggtttggaatggggcctttgggtggccctccmcagagaccaggctacagggttctgttggaactcagggctagcacaagagagaagattctgggcagcaggaggtagagggagaaggagaggagaatgggatgggtgtgggggtcaggactgggcaggggtggggtaggaggtggggggaatgaatcagagggcatcctgcaattctcagactctgaaaagtggaggagccggctccacttcagccttgcacagatgaagaaacagctggtggctggatggttcaaggct

SEQ ID NO: 59540 - DNA, 728 bp, Homo sapiens
cctctctggagctcctatccaatctccatttccagggatccctgggagtcctggcaggttcactcattccagactgcagcttcactcattccacacccgtggtgtggccagcctctgctgcagtctcccaggaagctgcctcccagcccttagctcccacccccacctgacaccttctttttggagaggtgttgggtacaaagggaattagcacacattcagcagacaccgaagtcagacattgcaccaagctcctcgctgttagattctgcagatggcttctggacacaaaatattgatgaatcacatttcagcatcacgtggtccgagaagcaaaagtcacacggatggagcatgtgtctctcagcatgtatccctctctgctgtctctggggtggtcagtgcctgctccccactccctgtccagaggatctgcagggtttggaatggggcctttgggtggccctccacagagaccaggctacagggttctgttggaactcagggctagcacaagagagaagattctgggcagcaggaggtagagggagaaggagaggagaatgggatgggtgtgggggtcaggactgggcaggggtggggtaggaggtgggsggaatgaatcagagggcatcctgcaattctcagactctgaaaagtggaggagccggctccacttcagccttgcacagatgaagaaacagctggtggctggatggttcaaggct

SEQ ID NO: 59541 - DNA, 636 bp, Homo sapiens
aaatgaagagataatcagatgtgtggagcatctctctaattctttaggaagccaatcttaattttcagataaaatttgaaaatatataataattaagagtacaaaagtaaagggatctgtrtagaaagaagaagggttattgacatatgtagaagggtccctcaagtcttcaactctgtgtctgaactcatgtggaatgaaactcactaagactggggaggtgggggggacaccaggaaacaggctgaataattccctaggttcacagagctgaaaatattttgcattccaatcagtcagaagggatgaatctcataatatactcatagagtgttgagtagagtctaaggagggtttactctagtcatgggctaaaagagcaaaagactaaaaactgctttggattaacttcaacaaagcttaaaagaaaactttgaaaggatcaacttgatcccaaatagctcaacttaatgctaagcaaaactcaatactctttaaaggcatacaacaaaatccagtaatctacaacataaaatgtgttagatagaacatacaatcaaaaatttttaggcatataaagaagctagaaaatatgacaggtggaatataataatatcaataaatataaacagacct

SEQ ID NO: 59542 - DNA, 491 bp, Homo sapiens
gtctgggatagagatagaataggtttaaaaggggatgcttgtacctttctattctgtagaacagattataagaatatgaattatctgytttttgaaaagatgaaagaactgaaatagcatctcattccagataattttctttctttttctcttctccctcttctcttcctccttatttttcctctgtgcttgcttgctatgtatttacaatttctttgttcccgttcagatgttgacgcatatgttgtgtccttcaaaacatccttctcaattcatgatgtaagtggttgaattacagttaacctctggtgtatgaagttccttttcttccttttttttcacgcggtgttgctgattgttgagttgcttttgattttcctgactgttcagtgataatttaagtgggaacatgagtgtcagtctcaatcagtttctgccacattctgatacaaatcgtatatctgaccaagcagagaatttaaaaaaagtat

SEQ ID NO: 59543 - DNA, 1324 bp, Homo sapiens
tacacaatcacacactcacacatgacagctgatttgcaktttatgcctgacattagatcctctttctataggttcgcatggcagcctatactttgctttctatgatattcattatcaatattgccaatatttgtttaccatttctcttcccgccaaaaactataattaactccgtatggataaaactgtaactactttatttactttgtattcctagccccaagcccagtgcttggaacatggtattcctgagtggaatacaacagaatggagtgtcctgatatgagcctaacttgtgcttacttgagagttctgataggtcttgcctttgttgaaatactgcctggcatcaaattgcctaaactggaaaagaggctcaaggacagtgggccatgctggagggaagggctacttctgtatatagcaccactgatgatgactagcttggtcatcagtatcatcaccaacactactatcctcaatgctattagccccatctttatggatttatgcttaatcttggaagaggaatctagaatcctagccattttactaaaatccctctgggagattcagagtgcaaatcagcatgagtggattcagcaaagttgatgccagaaactttgacagcaatagcaggaagcattgtcagctatacagtgatgctgtatttttctgcttcggctattggcaggcttgaaacaggctcaatggcaatagtgtcaatgtgagaggggaatggtgcatttctaaagcagccatctcacagaccaggaactgttgggtctatggaatccctcctggttacccaaatttggggcttgagaatatttgtaagacctcttcaatggtttcaaagataagttgagaaggctttggtaatgtaaattgggctgaaattctagaatatatggatgagggcacagcagaaaaaatacagtttggagacattgagatccaagttttagtctcagattggagaaacataaaaatgattataatggttggtctgtggaaattatgggtaattcttttatgttaccttttctgaaatgtttataatgcaatttgttatttccaaaatgaaaaaagaatattttaaaagaatgctaataacaataatagtctaattacaaaaaataattcgtgtatgttaataaatttgctgtgatatgtggaacgtgtgtgtgtgtgtgtgtacaaacctgtaacagagttcaggatatgtaagttagccaaaagaattgctaaactcaattcataaaagagaaacctgaaacttgtgacttgtccagatttttccataaaaatagaaatcaagtat

SEQ ID NO: 59544 - DNA, 1324 bp, Homo sapiens
tacacaatcacacactcacacatgacagctgatttgcagtttatgcctgacattagatcctctttctataggttcgcrtggcagcctatactttgctttctatgatattcattatcaatattgccaatatttgtttaccatttctcttcccgccaaaaactataattaactccgtatggataaaactgtaactactttatttactttgtattcctagccccaagcccagtgcttggaacatggtattcctgagtggaatacaacagaatggagtgtcctgatatgagcctaacttgtgcttacttgagagttctgataggtcttgcctttgttgaaatactgcctggcatcaaattgcctaaactggaaaagaggctcaaggacagtgggccatgctggagggaagggctacttctgtatatagcaccactgatgatgactagcttggtcatcagtatcatcaccaacactactatcctcaatgctattagccccatctttatggatttatgcttaatcttggaagaggaatctagaatcctagccattttactaaaatccctctgggagattcagagtgcaaatcagcatgagtggattcagcaaagttgatgccagaaactttgacagcaatagcaggaagcattgtcagctatacagtgatgctgtatttttctgcttcggctattggcaggcttgaaacaggctcaatggcaatagtgtcaatgtgagaggggaatggtgcatttctaaagcagccatctcacagaccaggaactgttgggtctatggaatccctcctggttacccaaatttggggcttgagaatatttgtaagacctcttcaatggtttcaaagataagttgagaaggctttggtaatgtaaattgggctgaaattctagaatatatggatgagggcacagcagaaaaaatacagtttggagacattgagatccaagttttagtctcagattggagaaacataaaaatgattataatggttggtctgtggaaattatgggtaattcttttatgttaccttttctgaaatgtttataatgcaatttgttatttccaaaatgaaaaaagaatattttaaaagaatgctaataacaataatagtctaattacaaaaaataattcgtgtatgttaataaatttgctgtgatatgtggaacgtgtgtgtgtgtgtgtgtacaaacctgtaacagagttcaggatatgtaagttagccaaaagaattgctaaactcaattcataaaagagaaacctgaaacttgtgacttgtccagatttttccataaaaatagaaatcaagtat

SEQ ID NO: 59545 - DNA, 1324 bp, Homo sapiens
tacacaatcacacactcacacatgacagctgatttgcagtttatgcctgacattagatcctctttctataggttcgcatggcagcctatactttgctttctatgatattcattatcaatattgccaatatttgtttaccatttctcttcccgccaaaaactataattaactccgtatggataaaactgtaactactttatttactttgtattcctagccccaagcccagtgcttggaacatggtattcctgagtggaatacaacagaatggagtgtcctgatatgagcctaacttgtgcttacttgagagttctgataggtcttgcctttgttgaaatactgcctggcatcaaattgcctaaactggaaaagaggctcaaggacagtgggccatgctggagggaagggctacttctgtatatagcaccactgatgatgactagcttggtcatcagtatcatcaccaacactactatcctcaatgctattagccccatctttatggatttatgcttaatcttggaagaggaatctagaatcctagccattttactaaaatccctctgggagattcagagtgcaaatcagcatgagtggattcagcaaagttgatgccagaaactttgacagcaatagcaggaagcattgtcagctatacagtgatgctgtatttttctgcttcggctattggcaggcttgaaacaggctcaatggcaatagtgtcaatgtgagaggggaatggtgcatttctaaagcagccatctcacagaccaggaactgttgggtctatggaatccctcctggttacccaaatttggggcttgagaatatttgtaagacctcttcaatggtttcaaagataagttgagaaggctttggtaatgtaaattgggctgaaattctagaatatatggatgagggcacagcagaaaaaatacagtttggagacattgagatccaagttttagtctcagattggagaaacataaaaatgattataatggttggtctgtggaaattatgggtaattcttttatgttaccttttctgaaatgtttataatgcaatttgttatttccaaaatgaaaaaagaatattttaaaagaatgctaataacaataatwgtctaattacaaaaaataattcgtgtatgttaataaatttgctgtgatatgtggaacgtgtgtgtgtgtgtgtgtacaaacctgtaacagagttcaggatatgtaagttagccaaaagaattgctaaactcaattcataaaagagaaacctgaaacttgtgacttgtccagatttttccataaaaatagaaatcaagtat

SEQ ID NO: 59546 - DNA, 2159 bp, Homo sapiens
ttaacaatacataaatgctgtaagtgtatgcttatatattggtagaatacttctgggatgatacataaaaacagcaatttccattttttaaaaaaagaatgggattgaagtgagagtggcatttatttctcattagattgtctcctggtatgtttaaaattttgagtcatctttatggataagctattcaaaaataataaaaataaatgtaagcaatgaaacatacttgttaagtgatttttaagattctgtgacttagaccagacacggtggctcacgcctataatcccagcactttgggaggccgaggtgggcagatcacctgaggtcaggcgttcgagaccagcctgacaaacacggagaaacctcgtctctactaaaactacaaaactagccgggcgtggtggcacatgcctgtaatcccagctacgtggtaggctgaggcaggagaatcgcttgaacctgggaggcggaggttgcggtgaccaagatcgtaccattgcaccactccagcctgggcaacaagagtgaactccgtctaaaaaacaaagattctgtgacttaaatgggtgtggcaataaggattacatttgctcattctggtaatcactttaatacaaacacatcaactaatttttatgggacatattatttgttgccttctgccaaatccatccacctgtaatttttaactttttcaaacttcaggctcattccattccaatgggatgatacaaattcttagcagtgcctaggagtatatcaggagcccaattttgatcagtgggaaggttctgaaacgcattgctctcccaaacttcagtatccactcagtctaggtccaatccatgtgtctacacatatcatacactagcctatacccttagccaaacaattttttataactataaatctgttatagtatagatatatactatggaatagcagacatgtatagaatatttagtatctagttttatgtatgtaatataaaataagatgataaatatatttatgcatatttttttcctgctgcttctgtggggcttaaagtcttgccttggaagataatcctaattagacaataaaccccagctgcagatcctaccagaaagattagacattactcccaagaatttgctcccaaacattgtttaaaggacaattaaaaacctaaaattattcaacacrttgctcccactgactcacttgaatgtgtgttctccactccaggattctgtgatcaagttaaacaccactgtttttttgataagtcatttcattactttatgtattattaaaatattaagttatatatgtaaatatgacagtggatatttttatcacattgatgataagatacatccctatttcagagatgaaatacaatgtgatgaaagcactagaataaagataactttggaaaagattccactctcctaggaaactaccacaagtgacattatataaccaaacagacaatttgaaccccagtatttgactatattatgtcaatatttctaaagaaatctagtgtgaagaaataggaaagatatagataaatactttattgaggcattgacacagcattagtcatacagaggttcaaagagatgcttgtaaattgaactgaaaattcactattttatatacataaaataaatgtataaagtcaacaaattaaaggaaaaatactaattaagcttaagcaaaacacatgtaaaaatctggcaatgtatctcaggattctctttgtaaaatacttcaatcttgaaaagaaatggaccaaaactattattaaggatttaggaaaaatctctcaaataaacacgagggattttattttgatagttggtttataaaatgaaattcatccatggaaaaagtggaaagtcattactcattacaactagaaaactcacatgctggtttagatgatgtaattgtctctcaagacttagcaaactggatcacagatcatgcctgttttttgaattcagttttactggaacatatccatgcttattcattaatctattgtggttagttttacacaacgatgcaggactgagtagctgcaagagctcaaaaagcctaagatatttattactcagcccctcacagaaaataattcctgaccgtggtctagattcagttat

SEQ ID NO: 59547 - DNA, 2159 bp, Homo sapiens
ttaacaatacataaatgctgtaagtgtatgcttatatattggtagaatacttctgggatgatacataaaaacagcaatttccattttttaaaaaaagaatgggattgaagtgagagtggcatttatttctcattagattgtctcctggtatgtttaaaattttgagtcatctttatggataagctattcaaaaataataaaaataaatgtaagcaatgaaacatacttgttaagtgatttttaagattctgtgacttagaccagacacggtggctcacgcctataatcccagcactttgggaggccgaggtgggcagatcacctgaggtcaggcgttcgagaccagcctgacaaacacggagaaacctcgtctctactaaaactacaaaactagccgggcgtggtggcacatgcctgtaatcccagctacgtggtaggctgaggcaggagaatcgcttgaacctgggaggcggaggttgcggtgaccaagatcgtaccattgcaccactccagcctgggcaacaagagtgaactccgtctaaaaaacaaagattctgtgacttaaatgggtgtggcaataaggattacatttgctcattctggtaatcactttaatacaaacacatcaactaatttttatgggacatattatttgttgccttctgccaaatccatccacctgtaatttttaactttttcaaacttcaggctcattccattccaatgggatgatacaaattcttagcagtgcctaggagtatatcaggagcccaattttgatcagtgggaaggttctgaaacgcattgctctcccaaacttcagtatccactcagtctaggtccaatccatgtgtctacacatatcatacactagcctatacccttagccaaacaattttttataactataaatctgttatagtatagatatatactatggaatagcagacatgtatagaatatttagtatctagttttatgtatgtaatataaaataagatgataaatatatttatgcatatttttttcctgctgcttctgtggggcttaaagtcttgccttggaagataatcctaattagacaataaaccccagctgcagatcctaccagaaagattagacattactcccaagaatttgctcccaaacattgtttaaaggacaattaaaaacctaaaattattcaacacgttgctcccactgactcacttgaatgtgtgttctccactccaggattctgtgatcaagttaaacaccactgtttttttgataagtcatttcattactttatgtattattaaaatattaagttatatatgtaaatatgacagtggatatttttatcacattgatgataagatacatccctatttcagagatgaaatacaatgtgatgaaagcactagaataaagataactttggaaaagattccactctcctaggaaactaccacaagtgacattatataaccaaacagacaatttgaaccccagtatttgactatattatgtcaatatttctaaagaaatctagtgtgaagaaataggaaagatatagataaatactttattgaggcattgacacagcattagtcatacagaggttcaaasagatgcttgtaaattgaactgaaaattcactattttatatacataaaataaatgtataaagtcaacaaattaaaggaaaaatactaattaagcttaagcaaaacacatgtaaaaatctggcaatgtatctcaggattctctttgtaaaatacttcaatcttgaaaagaaatggaccaaaactattattaaggatttaggaaaaatctctcaaataaacacgagggattttattttgatagttggtttataaaatgaaattcatccatggaaaaagtggaaagtcattactcattacaactagaaaactcacatgctggtttagatgatgtaattgtctctcaagacttagcaaactggatcacagatcatgcctgttttttgaattcagttttactggaacatatccatgcttattcattaatctattgtggttagttttacacaacgatgcaggactgagtagctgcaagagctcaaaaagcctaagatatttattactcagcccctcacagaaaataattcctgaccgtggtctagattcagttat

SEQ ID NO: 59548 - DNA, 2159 bp, Homo sapiens
ttaacaatacataaatgctgtaagtgtatgcttatatattggtagaatacttctgggatgatacataaaaacagcaatttccattttttaaaaaaagaatgggattgaagtgagagtggcatttatttctcattagattgtctcctggtatgtttaaaattttgagtcatctttatggataagctattcaaaaataataaaaataaatgtaagcaatgaaacatacttgttaagtgatttttaagattctgtgacttagaccagacacggtggctcacgcctataatcccagcactttgggaggccgaggtgggcagatcacctgaggtcaggcgttcgagaccagcctgacaaacacggagaaacctcgtctctactaaaactacaaaactagccgggcgtggtggcacatgcctgtaatcccagctacgtggtaggctgaggcaggagaatcgcttgaacctgggaggcggaggttgcggtgaccaagatcgtaccattgcaccactccagcctgggcaacaagagtgaactccgtctaaaaaacaaagattctgtgacttaaatgggtgtggcaataaggattacatttgctcattctggtaatcactttaatacaaacacatcaactaatttttatgggacatattatttgttgccttctgccaaatccatccacctgtaatttttaactttttcaaacttcaggctcattccattccaatgggatgatacaaattcttagcagtgcctaggagtatatcaggagcccaattttgatcagtgggaaggttctgaaacgcattgctctcccaaacttcagtatccactcagtctaggtccaatccatgtgtctacacatatcatacactagcctatacccttagccaaacaattttttataactataaatctgttatagtatagatatatactatggaatagcagacatgtatagaatatttagtatctagttttatgtatgtaatataaaataagatgataaatatatttatgcatatttttttcctgctgcttctgtggggcttaaagtcttgccttggaagataatcctaattagacaataaaccccagctgcagatcctaccagaaagattagacattactcccaagaatttgctcccaaacattgtttaaaggacaattaaaaacctaaaattattcaacacgttgctcccactgactcacttgaatgtgtgttctccactccaggattctgtgatcaagttaaacaccactgtttttttgataagtcatttcattactttatgtattattaaaatattaagttatatatgtaaatatgacagtggatatttttatcacattgatgataagatacatccctatttcagagatgaaatacaatgtgatgaaagcactagaataaagataactttggaaaagattccactctcctaggaaactaccacaagtgacattatataaccaaacagacaatttgaaccccagtatttgactatattatgtcaatatttctaaagaaatctagtgtgaagaaataggaaagatatagataaatactttattgaggcattgacacagcattagtcatacagaggttcaaagagatgcttgtaaattgaactgaaaattcactattttatatacataaaataaatgtataaagtcaacaaattaaaggaaaaatactaattaagcttaagcaaaacacatgtaaaaatctggcaatgtatctcaggattctctttgtaaaatacttcaatcttgaaaagaaatggaccaaaactattattaaggatttaggaaaaatctctcaaataaacacgagggattttattttgatagttggtttataaaatgaaattcatccatggaaaaagtggaaagtcattactcattacaactagaaaactyacatgctggtttagatgatgtaattgtctctcaagacttagcaaactggatcacagatcatgcctgttttttgaattcagttttactggaacatatccatgcttattcattaatctattgtggttagttttacacaacgatgcaggactgagtagctgcaagagctcaaaaagcctaagatatttattactcagcccctcacagaaaataattcctgaccgtggtctagattcagttat

SEQ ID NO: 59549 - DNA, 1946 bp, Homo sapiens
ctcataacttgtctgggaagagataaagagacatgtgggttcccaactcatgtggtctcatgcatttcccttctaccccgggactgagtttttgcatgtataaaataggagtgtttgaagtaattactgtgcagggttgttgtgaggatacatgctcagcacagtcagcagacagaataggtaggaacctctccactctttctcacgccctaggaaaggcaggtgggccgccagccgcactttgcacctagaactttctgggakcctgtagcaataacaaacaacatcttctcaatgtctacatcagaaccaggtactatgctaagcccgaaagcccttcattgtacttactctgcataataacctcaggaggtgggtgttgtcatcgtctgcattttacagatgacaaaactgaggctgagaggttctattgcttacctaaggccacccagctagtaagaggtggggcagagattagcatctggatagtttgactctacgtactatattcttggatttgaaccctgatctaggaactgtgagaggagacaggaagaagagtcagggagcccagcggaagaggttcatcccagtttagtgcagagagctcctggtccccagaaagacacccagtttctaccctcgagagcgcctttctagacagaagagggactgattgatgcccaaggccctggagatttagatctagggccagaccttataggatgactctgccttggggaggacaccccagccatgcttatgaatgtttgttttccctttcgacctaagacagcctaccagaatggggcttgtgcaaaggcaggcacacttctgttcagacactaggtagaatttccaaataagccaagcagcagaagaaactcaaaataaagatccttcaaaatgtcctcctctgggaattttctaagggaagggttgatttccagggtgcccacatggaggcaggggtctgaaacagatgcccccagagccctttctgcctgggccatggacagaagcccccactattaagcaagtgtgagacagccacatgccaggcctctaggccctccttggctgcatggcctctgccttccccaccctccccatggcccctggctccctccgagcctcctgggccctggaacagctatttaacaggccgtgatgcagtgctgatggcacacggtcttgtctgccagcaggaaggctctgggagcgggatgtagcaatgcggcttgtggatcctgctaagagatatttaataaatatgcaaatcgctgcctctacctcctcaggcaggtaaggagtggggagaggctggagttaagtattaaatctctgcacaatgtggagtgcttagcacacaggcagggactggagctgaactccctgggaagcttccatctggcatcctagagctcctgcttaggaggatggaagagagtgggagaggaaggaggacttaaaagtaggatatggagaaaaggagtacaaaggaagtgttttacttaggagtctgagcataacattggaaggtgaaaagacactttgtgtctttatgcaaccattaccacaccagccagccactctattataccacatggatctacccatccagatcttcaccacccacccaatatacacttaactcaccgtccaaaccatcaacctacccactcaaccttgcacccacccatccaattatctttggcctgctcactctctcacatccaaacacgcagacatcaaacccttgttccatccatccatctgtctatcttccaattcatccataaatccatctatctgtctatccacttaactactaaatcaccactcaaccaaatgcctatccaaccatctgcctgccttcttactttttcatcaactatttatccatctatccatccatccatccatccatccatccatccatccat

SEQ ID NO: 59550 - DNA, 1946 bp, Homo sapiens
ctcataacttgtctgggaagagataaagagacatgtgggttcccaactcatgtggtctcatgcatttcccttctaccccgggactgagtttttgcatgtataaaataggagtgtttgaagtaattactgtgcagggttgttgtgaggatacatgctcagcacagtcagcagacagaataggtaggaacctctccactctttctcacgccctaggaaaggcaggtgggccgccagccgcactttgcacctagaactttctgggatcctgtagcaataacaaacaacrtcttctcaatgtctacatcagaaccaggtactatgctaagcccgaaagcccttcattgtacttactctgcataataacctcaggaggtgggtgttgtcatcgtctgcattttacagatgacaaaactgaggctgagaggttctattgcttacctaaggccacccagctagtaagaggtggggcagagattagcatctggatagtttgactctacgtactatattcttggatttgaaccctgatctaggaactgtgagaggagacaggaagaagagtcagggagcccagcggaagaggttcatcccagtttagtgcagagagctcctggtccccagaaagacacccagtttctaccctcgagagcgcctttctagacagaagagggactgattgatgcccaaggccctggagatttagatctagggccagaccttataggatgactctgccttggggaggacaccccagccatgcttatgaatgtttgttttccctttcgacctaagacagcctaccagaatggggcttgtgcaaaggcaggcacacttctgttcagacactaggtagaatttccaaataagccaagcagcagaagaaactcaaaataaagatccttcaaaatgtcctcctctgggaattttctaagggaagggttgatttccagggtgcccacatggaggcaggggtctgaaacagatgcccccagagccctttctgcctgggccatggacagaagcccccactattaagcaagtgtgagacagccacatgccaggcctctaggccctccttggctgcatggcctctgccttccccaccctccccatggcccctggctccctccgagcctcctgggccctggaacagctatttaacaggccgtgatgcagtgctgatggcacacggtcttgtctgccagcaggaaggctctgggagcgggatgtagcaatgcggcttgtggatcctgctaagagatatttaataaatatgcaaatcgctgcctctacctcctcaggcaggtaaggagtggggagaggctggagttaagtattaaatctctgcacaatgtggagtgcttagcacacaggcagggactggagctgaactccctgggaagcttccatctggcatcctagagctcctgcttaggaggatggaagagagtgggagaggaaggaggacttaaaagtaggatatggagaaaaggagtacaaaggaagtgttttacttaggagtctgagcataacattggaaggtgaaaagacactttgtgtctttatgcaaccattaccacaccagccagccactctattataccacatggatctacccatccagatcttcaccacccacccaatatacacttaactcaccgtccaaaccatcaacctacccactcaaccttgcacccacccatccaattatctttggcctgctcactctctcacatccaaacacgcagacatcaaacccttgttccatccatccatctgtctatcttccaattcatccataaatccatctatctgtctatccacttaactactaaatcaccactcaaccaaatgcctatccaaccatctgcctgccttcttactttttcatcaactatttatccatctatccatccatccatccatccatccatccatccatccat

SEQ ID NO: 59551 - DNA, 1946 bp, Homo sapiens
ctcataacttgtctgggaagagataaagagacatgtgggttcccaactcatgtggtctcatgcatttcccttctaccccgggactgagtttttgcatgtataaaataggagtgtttgaagtaattactgtgcagggttgttgtgaggatacatgctcagcacagtcagcagacagaataggtaggaacctctccactctttctcacgccctaggaaaggcaggtgggccgccagccgcactttgcacctagaactttctgggatcctgtagcaataacaaacaacatcttctcaatgtctacatcagaaccaggtactatgctaagcccgaaagcccttcattgtacttactctgcataataacctcaggaggtgggtgttgtcatcgtctgcattttacagatgacaaaactgaggctgagaggttctattgcttacctaaggccacccagctagtaagaggtggggcagagattagcatctggatagtttgactctacgtactatattcttggatttgaaccctgatctaggaactgtgagaggagacaggaagaagagtcagggagcccagcggaagaggttcatcccagtttagtgcagagagctcctggtccccagaaagacacccagtttctaccctcgagagcgcctttctagacagaagagggactgattgatgcccaaggccctggagatttagatctagggccagaccttataggatgactctgccttggggaggacaccccagccatgcttatgaatgtttgttttccctttcgacctaagacagcctaccagaatggggcttgtgcaaaggcaggcacacttctgttcagacactaggtagaatttccaaataagccaagcagcagaagaaactcaaaataaagatccttcaaaatgtcctcctctgggaattttctaagggaagggttgatttccagggtgcccacatggaggcaggggtctgaaacagatgcccccagagccctttctgcctgggccatggacagaagcccccactattaagcaagtgtgagacagccacatgccaggcctctaggccctccttggctgcatggcctctgccttccccaccctccccatggcccctggctccctccgagcctcctgggccctggaacagctatttaacaggccgtgatgcagtgctgatggcacacggtcttgtctgccagcaggaaggctctgggagcgggatgtagcaatgcggcttgtggatcctgctaagagatatttaataaatatgcaaatcgctgcctctacctcctcaggcaggtaaggagtggggagaggctggagttaagtattaaatctctgcacaatgtggagtgcttagcacacaggcagggactggagctgaactccctgggaagcttccatctggcatcctagagctcctgcttaggaggatggaagagagtgggagaggaaggaggacttaaaagtaggatatggaraaaaggagtacaaaggaagtgttttacttaggagtctgagcataacattggaaggtgaaaagacactttgtgtctttatgcaaccattaccacaccagccagccactctattataccacatggatctacccatccagatcttcaccacccacccaatatacacttaactcaccgtccaaaccatcaacctacccactcaaccttgcacccacccatccaattatctttggcctgctcactctctcacatccaaacacgcagacatcaaacccttgttccatccatccatctgtctatcttccaattcatccataaatccatctatctgtctatccacttaactactaaatcaccactcaaccaaatgcctatccaaccatctgcctgccttcttactttttcatcaactatttatccatctatccatccatccatccatccatccatccatccatccat

SEQ ID NO: 59552 - DNA, 570 bp, Homo sapiens
ttgaggttttcttaacacacacttatgttcattttcaacaggtgtttgcttatgatcattgtttctggtctatggatgaatctgtcaaagaaaagtatgcaggtaatagaatccagcatcctgtcaactactgatggtrtagaagaggggttcagtattttttcccttacacgattgcttggcaaaccccccaaactgtgtgtttcctctgctgtcacaccacaataacagtcatcaacacagaagatgacttaatgtgaccaaatgttgggggagttttccctgcaccccaagcagcagacactggctgggtgtcctctaactcagttccgatgctctctacctggggacagcgtcagatccacagactgagggctcagtcccacaagaccgctccctccttcccaccagcgcaggtccaggcctctagaacttctgacctactggcttccaattagggttcccacaacctcctctttgggtttgattaatttcctagagcggctcacagaactcagggaaacacttgtgtttaggggtttattacgagggattttctttaaaggagac

SEQ ID NO: 59553 - DNA, 570 bp, Homo sapiens
ttgaggttttcttaacacacacttatgttcattttcaacaggtgtttgcttatgatcattgtttctggtctatggatgaatctgtcaaagaaaagtatgcaggtaatagaatccagcatcctgtcaactactgatggtatagaagaggggttcagtattttttcccttacacgattgcttggcaaaccccccaaactgtgtgtttcctctgctgtcacaccacaataacagtcatcaacacagaagatgacttaatgtgaccaaatgttgggggagttttccctgcaccccaagcrgcagacactggctgggtgtcctctaactcagttccgatgctctctacctggggacagcgtcagatccacagactgagggctcagtcccacaagaccgctccctccttcccaccagcgcaggtccaggcctctagaacttctgacctactggcttccaattagggttcccacaacctcctctttgggtttgattaatttcctagagcggctcacagaactcagggaaacacttgtgtttaggggtttattacgagggattttctttaaaggagac

SEQ ID NO: 59554 - DNA, 886 bp, Homo sapiens
  misc_feature (1)...(886): n = A,T,C or G
cggtggctcacgcctgtaatcccagcactttgggaggccgaggcgggtggatcacgaggtcaggagatcgagaccatcctggctaacacggtgaaaccccgtctctactaaaaatacaaaaaaattagccgggcgtggtggcgggtgtctgtagtcccagctactcgggaggctgaggcaggagaatggcgtgaacctgggaggcggaggttgcagtgagccgagatcgcgycactgcattccagcctgggcgtcagagcgagactccatctcaaaaaaaaaaaaaaaaaaaaggaacaaggtgaagaagcagattcgctcaaggggcagaaacactggaaggttctcgtccctgacagtggtggccagcttttgggggtctgtggctggtttcacaagatgccacactaaagggggttccttttggtgggccctgggctgcactcaggccagcactcatgggtgagaacgatatgttctgggctggtggagcccggaggacacagtgaaggtgatgcgggaggatgcatgcaagttagcatttatccatcggtggaagaagctgctcaagtccaccccccacagggccatgccccagtaagtcatctctgggtgtcagtctatgccacctctgccttccaccccttcctggtgggcccttctccagggggcactgcctgcaggtttcatcaagtgaagacagacttttcatgcaaaaacagaactgatccaaatagggcactgctgatatttcaccaaatctgcttctacccattggtttcctaatccaggctgtcattaaagagtcatgacccacatttttaaaatggaatanncaatagaatnnaggaattaggaggatgncactgcccttaaagaggatatc

SEQ ID NO: 59555 - DNA, 786 bp, Homo sapiens
attattccagaattgaattcctaaaaggcctaaatcttttttaaaaatygtaactatttttatattacctcctttttcctcatgataatgatttcttgatgactttccccttgtttagtcaagtatttattcgggtctttgttgtcactttcatgttgagaatactgtctccttacagaagttaacaaaattgcaaagaattgtaaaaatataaagtaaaccaaagataatgttcataaaacttttgcacatataaactgttgttgcatatgttcacacataaacatataaactataatctcttatgttttaatgaaattgtatcaatgtggaaacatctccacatcttataatatttgagattatcagcgtcaaggattctctctcatgtaatgcttgttgttgatgacatgcaggaactgtcacaaaaatatatcagttttacatgggattagtttctaattatggcaaatttaccacttaaatataataacttttttccctaaagaaaattattgaaatatttttcttcttcccccaaggagctactgctttctggcatgccagaaattgatgtgagtgattggataaaaaatacagaatacacaagtggctatgaaagagaagatccagttattcaggtaaaatttctctagagcttagaatgaagttaagttttgccgtttaattttgtaagcttttcagcactattggatgaaaacttacattaattaacaaagtaaagtgtttacccaaattattcttgtgggaatagtgcatatgaaa

SEQ ID NO: 59556 - DNA, 1931 bp, Homo sapiens
tcacagtcatgctctgaaggaggggatcacaccatccccattgacaacagattatactctccttcagagaggttaggtaatttgcccaaggtcacagaatagcagagcagggatgctgatccaaaactatacacagagtctgtctcctagggcaactccaaagcccaggctcagcccaagggatactctattgcctccttgaaaagctccttctgcagaagaggaaaggggaaggatttaccccaatgtcaggagtttggtctttggagggcatagggggacatctccctcaactcccatcactgttattagattattgaaatacatggactttacagtttgggggatacatgaggcctattttataagagatgtcattaaaaaaaaacttcagtgagtttattttgtgccccataaggcctcccatcagaggactgtgccattctgattagctactagcctaagatttggcagtgacatggcaaaagctctctggaaacatatagggtccgcttgcccctacttgcacaaaatgtctttatttgtctctagacctggctgtcatttggttccacttctatcaggcaagaaaggtagactcacttaaaacaaatgcagtcaactgcacgttccaggctgggccatatcttttatgagggtgatgtggatcaacacacaatctgaacttttctgtttctctggcttatattcacagggttttgtgtgtgtttgtctttttgataactttcaaagctgattttgccggcgatttctaaggttagcaacatcaccccatcagacacttcttttccttctcctagatgagatcttacaccatctattcccaatcatgttttcttgcttattgcgtaaattgcattcatcactctaaaaggacttgaaacaccttgactgctttctcttatgtggaacttgaaatgcatcgatttccgttgctacagccctagctatatatttattatctgtcagttctagtttacttagaagttgcctgtacagaacccagcagtctgaaactagctcaccaaaaaagggaatcaaaagccatagttcatccacatgttgacacttgccatccacccttgcagttcaactcagtatctttctctactgggaaggcccctgacatctgagggctctctctccttcagtggccatcagaaaagccctctaaatgcctccagctgctagaagagaacaaagttgtcacttctagtgatcaaattcagaacatcctgttattgctgccaccatcatgaatgtatgtcacacagcaaagttatgtgagcctcagttcccaggaataccataaaaggaatattcctaagttaggtcctagggaactacctcagaggaatgactggtctagaggacagagagtgagctttatttatttattttattttttatgtttattttttctttgaggcggagtttcactcttgtcgtccaggctggagcacaacggcatgatctcggctcagtgcaacctccatctcccgagttaaagcgattctcctgcctcagcctccagagtggctgrgattacaagcacctgccaccaccccctagtagagacagggttccaccatgttgaccaggctggtcttgaactcctgacctcaggtgatccctcccaaagtgctgagattacaggcgtgatccaccacacctggccagagagtgagctttacagcaagatagatgtagtattagaaaagtaatttaacttctcttaggggtagtttttgtctctgtaaatgttgatgataataattcacttccagggtcatataaaacttacaaataatgtctgaaaaaagtttgtctccatgcctgacagaatgtcttcagtaaagagtaattattattatgaaaagcaagaaactattaatagcattcttgaaaat

SEQ ID NO: 59557 - DNA, 2378 bp, Homo sapiens
gagggagggaaggaaggaaggaaggaaggaaggaaggaaggaaggaaggaaggaaggaagggagggaaggaaggaaagaaggaaggaagggaagggaagggaagggaagggagggagggagggagggagggagagccaggcatggtgatacacacctatagttctagctactcaggaggctgaggcaggaggattacttgagcccaggagtcccaggctgtagtgtgccattattgggcctgtgaatagtcactgcactccagcctgagcaacatagcaagactcccatctctaaaaagaaaaaaaaataataaggtcatgggagaccagaagcgcagctgacacatatgcataacaggtatcccctgcagagtgcgatgggagcacagaaggtgagaaactaaacttgagtctgcaaggcatccacgaggaggtgacctcagagcccagtcttcaagaatgagtaagagagaggtggagaagcagaggaaggctgattcaggctggctctccagtgcacataaaagcatgaaaggcgagaacatgagtcactccagagggccctgggagggcctcagatagctgcattggagaggcaggcaggagctgaatcactcagggccctgctaatgaattcagatcttggctaaggtcagtgtagggctgtggaaagagtttaagctgaaacctgccatggacggtttggcactttctaaatcaaccacatttttcatagcattagccagtgataatcaattttggatcaggtcatgatccggaggccctgcaggatgcagaagcaaagcctaagaaaggctctgttgagggccatagacttctacggcaatgtatatttattataattctttgggaattgatatatcctttgtggaaaagactcatgtctttttctattatctttgaaagtgctagaacaatacatggacacatcagatttgcccaacaaataccaattggtcataaccgatgcacgttacatatgatgacttcttgctatttaaggtagtcaatggcctatttggtggaaagtagagatgagggtgggggcctggactgcactccagcctgagcaacataacaagactcccatctctaaaaagaaaaaaaaataataaggtcatgggagaccagaagcgcagctgtcacatatgcataacaggtataacatcttgcataccatagcaagatgttaaaggacaaatgccacttaggttatgtgtccattacactgacttcagtgtaatggagggttgttcatttaaatcacaaaacctgttctgttcaaaccagctgattttttctgatttctggtaatgcaatgtgaaattagcaatagaattatattccctttaatttggaggtggaaaaaggagtgaaaaggaaataagacacactttggtggggagaaaaccagtgartccatggaggaatgtggtctggaggatctactagggaaatgaaccatccaaaacaacagtatcttgacagtcattgaacctaggctcacttattcattcattcattcattcattcattcaacaaatatttattgagccccttctatatccaagatgctacacaatggtgaacaaaactgacaccatcttgttctgaacctcatgaagattactctgcagcagggaaaatatgctttatataaatgaacacactaataagtacataatgagttgtgataagtgctatgaaggaaaacaatagtgtcctgtgctatgaaaaagaagaaaggcctgccttaggctggggtcaaggaagattttcctgaggaacagtcaaaaagaaggagtaggaaaaagccaggacaggaccaatcgggagaggctgcaggcaggggagggcctccagtggaaaagagctgtgtgaatctgagaaacaacaagttggaggtgtggatcggggaggcgtgaggaggaagcggccacaggtacagggaccaattcgcacaataggaaaaggtgagaaatgaagagggccttcagtggagatccacagcctctctccaagtcaacacactcagtcagtcctggcagctcagcccagaaaactttgtcagccatggctggggtaactgtgtccagaggtgtttgaacaagagccactccatcttgaatagggactgagtaaaataaggctgaaacctactgggctgccttcccaggtggttcagcattcttagtcacaggatgagatagaaggttggcacaaggtacaggtcacaaagactttgctgatgaaacaggactcagtaaagaagccagccaagacccaccaaaatcaagatggtcatgaaagtgacctctggtcgtcctcattactcattaaatgctaattttaatgca

SEQ ID NO: 59558 - DNA, 1249 bp, Homo sapiens
acatgtctaatctctaccacatgtaaatttgtgtcctaatgaatctcattacaacaaatgatacaaaatattacttaaacatttactatatgtaaggttatatctggttcccagaggatttctttaaaataggtttattgaaacataattcacataccatacaattcactgsgttttgctatattatatagttaatttttaaattgtaataaatatatataacataaatttgctattttgaccatttttacgtgtactattcagtggtattaattacattcacaatgttgtgcaatcatcaccactatttgcaaaacttttttatcacaccaaacagaaactttacaactattaagaaataactctctattctccctttccccccacccccagccacctctaatctactttctgtttctatgaatctgcatattgtagatatttcacataagtggaatcatataatatttgttcttttgtgtctggattatttcacttagcatgatgttttcaaggtacattcatattttagcatatatgagaacttcattcctttttatggctgaataatttcccattgcatgtctatgccacattttgtttatctcttcatctgttgatagacatgtgggttgtgtctggttgtgtctgcctttcagctattataaataatgctgctatgaacattagtgtaccacagagagttttttttaaagcacaaaataaggcctagacatgaaggaatttataattaggttgttgagagaagaaactcttggaaaattaaccacagaggcaaatagtagttgaataaattaaagaaacaccaccagacatgggattaaatatataagaaagtatttatatagtattacagtatataaatgttatagcatttctgaagagggcaaattcactcaagactggtgacagcttcatcatcaaatgaggaagaacaaaaatgttgttcacttcataatttacaaagtttctgacatcacagtttcagtggggttgaaaacatgtgatcagattttatgtgtttaaaatctgaaagagacttgagaaaataaaggtggtatgtgatggaatactcactgagaatcttggcagtgaaatcagagaatccaaatgggtcatcagaggggtgccgcaggttcaggtagattgggtgtagtttccatggcaaagaagagatatggatgttttaaaagaaaatatcctagaaacaaaagaaattgagagaaga

SEQ ID NO: 59559 - DNA, 1249 bp, Homo sapiens
acatgtctaatctctaccacatgtaaatttgtgtcctaatgaatctcattacaacaaatgatacaaaatattacttaaacatttactatatgtaaggttatatctggttcccagaggatttctttaaaataggtttattgaaacataattcacataccatacaattcactgcgttttgctatattatatagttaatttttaaattgtaataaatatatataacataaatttgctattttgaccatttttacgtgtactattcagtggtattaattacattcacaatgttgtgcaatcatcaccactatttgcaaaacttttttatcacaccaaacagaaactttacaactattaagaaataactctctattctccctttccccccacccccagccacctctaatctactttctgtttctatgaatctgcatattgtagatatttcacataagtggaatcatataatatttgttcttttgtgtctggattatttcacttagcatgatgttttcaaggtacattcatattttagcatatatgagaacttcattcctttttatggctgaataatttcccattgcatgtctatgccacattttgtttatctcttcatctgttgatagacatgtgggttgtgtctggttgtgtctgcctttcagctattataaataatgctgctatgaacattagtgtaccacagagagttttttttaaagcacaaaataaggcctagacatgaaggaatttataattaggttgttgagagaagaaactcttggaaaattaaccacagaggcaaawagtagttgaataaattaaagaaacaccaccagacatgggattaaatatataagaaagtatttatatagtattacagtatataaatgttatagcatttctgaagagggcaaattcactcaagactggtgacagcttcatcatcaaatgaggaagaacaaaaatgttgttcacttcataatttacaaagtttctgacatcacagtttcagtggggttgaaaacatgtgatcagattttatgtgtttaaaatctgaaagagacttgagaaaataaaggtggtatgtgatggaatactcactgagaatcttggcagtgaaatcagagaatccaaatgggtcatcagaggggtgccgcaggttcaggtagattgggtgtagtttccatggcaaagaagagatatggatgttttaaaagaaaatatcctagaaacaaaagaaattgagagaaga

SEQ ID NO: 59560 - DNA, 1136 bp, Homo sapiens
tactttttctaactttctttttcctgattcatatttccctgcagcaacattggtgcaagtgatacttttctcagtagctgaggaatttcctagccacacattgcagggcccgggggtgtgcaggagggaaagttgtttgaaaattctacttttccatctgttcccagaactggaatgaaatgacagagttggtctcctccaacggcaattactgcaattaccgcaagccctttccgacctgcgatggctccaaaatccccatcctgggagtacacttgaaagacttgatagctgtccatgtcattttcccagactggacagaggagaacaaagtgaacattgtgaaaatgcaccagctctccgttaccctgagtgaactagtctccctgcagaatgcctctcaccacttagaacccaacatggatttgatcaacctgctcacggtgagttccaaggagccaagtttgggctcaataattcttctgcacctttctttccaggagacacaggaagatgtgtgccagcaattcattctgggggaaaattggtttcagagtcaatagatgagaggaaatctcatagaacaagggaaaaggagccctgattaatattttccataaccagcaaatcttggggcaaagaaatctacctttgttcggaggggcccagtctctgccatatgactccacttctggagttcttaggctcctccagactgtgcctcagccctcactctccttcaccacattcatccaacttatcacatccttctgtatgtcctccagtcatctgctcctctttatcctcactgcactgctttggctgaagcctggagtaatgcaaggaccttatctgtgatccccctgttcccattatgaacctcccaaacctccaggatgtagtttacagtctggcattcgaggttcttgaagactcagtctccaaccttctttgccatcaccctatcccacattttaccagcctttgagaaatattgaacttcttatactttccaccccatgaaatgctgtcttctgcttcckggcctttggacttgcttggagaatcccatcccaacccatccatgtggcaagttcaatttcaaaagcctgtctttctggagcattctctctccc

SEQ ID NO: 59561 - DNA, 1846 bp, Homo sapiens
cgcctcccaggttcacgccattctcctgcctcagcctcccgagtagctgggagctacaggcacccgccaccatgcctgcctaatttttttgtatttttttagtagagacggggtttcaccatgttaaccaggatggtctcgatctcctgacctcgtgatccacccrcctcggtctcccaaagtgctgggattacaggcgtgagccaccgagcccggcctgaaagtctaacatttatagaaagagagaagagacaaaatggaagggaaaggaatcaaagcgataactcaaaaaattttattataatggaagaacacacatttacacaatggatgaaaacagacctacaccaagaactggtgctcacaaaatagtccagtaattgcaaataaatcctcagactggcaaaatttaacaagcctaacaatactaagtaccagcaaggatacagagcagttaatataaccagtacctgcaatattgtttaacaaaggggttttgtattatttactaaagttgaatatatacataccctacaacatataaatcctactcctaggtaatatcctagacaatgtgtgtgattatatgtaccagcatatatatacatctggcagcaacatccataaatggccaaacccacattaagtatccagtaaaacagaaaaaattacgggacacatactgtgataattaatattatgcatttgagggatcctatcacatgatttttccctcttgaaaattgttaatggttcactattgcctatgagtccttaagaatcggttattagttttacttactttaaagcaccagagactggcatagtacttggcatatatcatgcctcctaagtaagtggaatagaattagtaaagacttcataaatagtttcccctaagttagctagctatatgtaacaataaaaagaatttttgaaaatacacagaaattagccgggcgcggtggctcatgcctgtaatcccagcactttgggaggccaaggtgggcggatcacgaggtcaggagatcaagaccatcctggctaacatggtgaaaccccatctctactaaaaaaaaaaaaaatcagccaggcgcccgtagtcccagctactcaggaggacgagacaggagaatcgcttgaacccgggaggcagaggttgcagtgagtcaagatcacgccactgcactccagcttgggcgacagagcgagactcggtctcaaaaaaaagaaaaaaaaatatatatatatagagagagagaaattacatataactgccaaaatataatcaggttaccgtagttttgctggacataatttaaaaagtgataattaccatgatagagtgtttgccatttacagagccataatggtcttagtgtgatgacctatataatatgaagctgctttttctattgacatttgggagtaaataagtgatatacaatttttcttttttttctgagacagagtctccctgacctcaggctggagtgcagtggcataatcttggctcactgcaacctccacctccctgattcaagtaatcccgagtagctgggattacagacgtgcaccaccaagcccagctaatatttagtagagttggggttttgccatgttggccaggctggtcttgaactcctggcttcgtgtgacctgcctgcctcagcctccaaaagtgctgggattacattcgtgagcctggcctacaaacaacttttctaatttagtgagccaattatagtaacttgtgctacctactatgtttcattttactactaaaccacaggaccaatactaaatactgtgtcccactactacataaatttatatttgtacttac

SEQ ID NO: 59562 - DNA, 762 bp, Homo sapiens
tatcaataaatcttgctgacggccctcttgttttgatttgtgaactgcagccctattagttttcctccctgaccaagactctttggatggcattttggaattcacaaggaaagaaaacctatagtggtctatgtctgtcgatgatatctattcagctaacacatgagcattctgccaggcagcacagaaccctaacctacagagagctgcagagaaacaccacggagaggtggaggaggaggatgaagcacttcttaaacagaggtcgactaaccagcaaattcttctttcttcctttttttttcttaaagggatctatattctagcttctaaaaacttgagtctgaacagaaataaaaagaaagagtcgatgctaacatacaaaacactcagcatctctctttatcattttttaaaaggcatgcaattttgacaaatgatacatttctaaaagctttcttctctattcaagatattaatgtccattctgaatgaaagatgcctacatactgcctgcaatcagtttctagcaacagacaccctatgaagcccctagcagggaaggtggggggaaggragggatttcacaaggaaggctgcattagattggccaccgtaagaaaggagataaccaatgaaaatcaagcaacagtatttaagtactgtattcctaaactcactctgtctctgtttctccctcctctcatgtaagtaagtttcttgctggctcaaggcaaaaaaaaaaaaaaaaaaaaaaaaaaa

SEQ ID NO: 59563 - DNA, 762 bp, Homo sapiens
tatcaataaatcttgctgacggccctcttgttttgatttgtgaactgcagccctattagttttcctccctgaccaagactctttggatggcattttggaattcacaaggaaagaaaacctatagtggtctatgtctgtcgatgatatctattcagctaacacatgagcattctgccaggcagcacagaaccctaacctacagagagctgcagagaaacaccacggagaggtggaggaggaggatgaagcacttcttaaacagaggtcgactaaccagcaaattcttctttcttcctttttttttcttaaagggatctatattctagcttctaaaaacttgagtctgaacagaaataaaaagaaagagtcgatgctaacatacaaaacactcagcatctctctttatcattttttaaaaggcatgcaattttgacaaatgatacatttctaaaagctttcttctctattcaagatattaatgtccattctgaatgaaagatgcctacatactgcctgcaatcagtttctagcaacagacaccctatgaagcccctagcagggaaggtggggggaagggagggatttcacaaggaaggctgcattagattggccmccgtaagaaaggagataaccaatgaaaatcaagcaacagtatttaagtactgtattcctaaactcactctgtctctgtttctccctcctctcatgtaagtaagtttcttgctggctcaaggcaaaaaaaaaaaaaaaaaaaaaaaaaaa

SEQ ID NO: 59564 - DNA, 562 bp, Homo sapiens
tgtcaccctgattggagtgcagtggcacaatctcagctcactgcaacctctgcctcccaggttcaagggattctcctgcctcagcctccagagaaactgggattacatgcacgggccatcatacctggctaattttttatatctttagtagagacggggtttctccatgttgtccaggctggtcttgaactcctggcctcaagtgatctgatcacctctgcttcccaaaatgccgggattacaggagtgagccactgcacccagtctcaatcatttcaaagttacctaaattcatctaatctgtcttcatgcaccttgcttgtaatatttgatgggggagtattttcagagcatttctgaccatggaaarcttttactgttccatagaaaaatgccttactcaagattagagaggttaacaaaccctggcagtttgaaagaaatgccatgtaaattattgggattactacccaaattaatgatagtgataagtatgtaaatcatatgctatgtaagtctataccccattttataaaatgtgggatgtttaacaggtaaaata

SEQ ID NO: 59565 - DNA, 562 bp, Homo sapiens
tgtcaccctgattggagtgcagtggcacaatctcagctcactgcaacctctgcctcccaggttcaagggattctcctgcctcagcctccagagaaactgggattacatgcacgggccatcatacctggctaattttttatatctttagtagagacggggtttctccatgttgtccaggctggtcttgaactcctggcctcaagtgatctgatcacctctgcttcccaaaatgccgggattacaggagtgagccactgcacccagtctcaatcatttcaaagttacctaaattcatctaatctgtcttcatgcaccttgcttgtaatatttgatgggggagtattttcagagcatttctgaccatggaaagcttttactgttccatmgaaaaatgccttactcaagattagagaggttaacaaaccctggcagtttgaaagaaatgccatgtaaattattgggattactacccaaattaatgatagtgataagtatgtaaatcatatgctatgtaagtctataccccattttataaaatgtgggatgtttaacaggtaaaata

SEQ ID NO: 59566 - DNA, 745 bp, Homo sapiens
ttttggccaaagcgatgagtcacaaaggaaaagagggctggtgtatagaaggcaaggattacacacacatgtgaaccacatgtgctgagggacttgagtcaggctttacaggaaggaagatggaaaacagcgtgaagtatttgcacataagaaagggcaatggctatgatgtcgaatactaggattgaaatagcacccaagccatagattatattgatcttgatactggaacaagacagatgagcaagacccatgtgctcacagttggtgtggggaatgacatgatccccacagaagggcaaccgcaaaatgagaaaaacaaatggaataacagacataaatgacctcactaacacaccaagaccaatcacagaaacagcctttttggtgaggatgatgctatatcgtagcgggttgcagatggccacaaagtggtcataagccattcccacgagggctgctgactccatgccagtaaagttgtggatgaaaaacatmtggatgaggcaggcatcacagataatctccctgaggctaaaccagaagatcccaagcatcttagggatggtagctgttgaaaggcccaagtcaatggtggccaacatggccaggaagtagaacatgggctggtataggctgctgtcagtcttgatcacaagtagaatagtgaagcgccctatgagtgcaattatgtacacagcacaaaagggaaagccgatccagatgtgaagtgtttctagccctg

SEQ ID NO: 59567 - DNA, 3055 bp, Homo sapiens
tgcatgctctgctacaccagccccactgtggggtgcctgatgggtccgacacctccatctcgccaggaagatgcaagtggaataagcacactctaacttacaggtgcttgttactaaggcctagaggataatgtgtggggtgatgacctcaaagggctttctaccaggtctctcctggaggtacctctactctcttctgctttcattggcagcccgctcaaagcccaaaatctccctcagagaaggtaatactaccagatccttttctagcttcctctaaccatctctttagaaagtagagagcataaccactatcctttccctttgttaaatcttttctttttaattttaatgcgtgagtgtgtggatggttctaaggtacaattttgaaaacttaatttctgcctaggttactctttctgttggggattctaaatatacttgagatatctaaagcaagcagtactaaattatgtagaatgctatacattttaatttatgtagaatgctgtatatttaatttaatttaattttgttcacattgttttatttacttatttttccccaaccaccagataggactgtcattcttagactttagctgacctaagaataatttgggatattgttaaaattcttagaaatctatatttgcatgtttaattccttaagtttctgatttaattagtctgaaattagctcaactttataaataaccaaaatgagtcctaaaactattaaatgattctccccaaagtagaattattcatgtttagagctaggataattcccattcctctgaactatttcatttagagattgctttcctcaggattatcaattacccacatgatatgaagccatccgcagtgaaagacagtatatataatgcagtttccatctggagcaatgtgacccctttgatattccagcaagtgcagaatggagatgcagacatcaaggtttctttctggcagtggggtaagaaattgacatgggaagaaggatatgtatatgccctgtgtaaaggacaaagggtttccatccttaaacaaaaacctagcccccctattaaagtttctgagaaaaaaagtctgacaaaaccctactgcaaagcaaatcctgtaatagggaagacatttttagtaaaatgaagcaataaataaagaagaggtgttggctgcagtgtgaatatggtgggggtactgcacattttccttccaaaaagacgatgcatagctccgaaatctattgaaatgctwttcaaagttgaaccaacttacttataaaaactttctgagtttaaattctctttcccttttcccctaccattttgaaaagaggttatcattattattgttgtctaacttgtaagctttactcagtgtctgccatctgtctgtctttctttttaccctagataagagagtaggaagattttgggccccaccttatttctctgcatagataatgccttagctctctcacatcccccagtggtagactgttgcacagtatcctaagtctctgaggcttacttaagactattctggcctttgtttctacctccaccctcattgtgatcatagcttctgtcgtccacagcccatgaagatggttggccctttgatgggccaggtggtatcttaggccatgcctttttaccaaattctggaaatcctggagttgtccattttgacaagaatgaacactggtcagcttcagacactggtaaatgccttgtttggtgggatcgctagaactctctgggaacctggggttcagtgttgatggtttccatttagggatccagagtggtcagggtgaggtggaagatttggctgaggaatcaggtcttctttataagtgaggagatgtgggatcatttctgaacacagatgatcccataataaacacattgtcagattgtgtttttttctccttatctctttgcttctatttgccagtccctctttctttccatgtgtctttttcacttcaagtttatctgtccaaatatcttgccattctgttttctacttactttctttccctccttgcctaccttttcctttaccctgtaacatttgccctttcctcgttttctgttctctcctttttctttgtcctatttcacacactttcagcattccctatgcatagttaattttatcttttttttttctataatttttcaggatataatctgttcctggttgcaactcatgagattgggcattctttgggcctgcagcactctgggaatcagagctccataatgtaccccacttactggtatcacgaccctagaaccttccagctcagtgccgatgatatccaaaggatccagcatttgtatggtctgtgctgcttaaggaagagaagggagatctgggcaggaaaatttcacctgaaatttactgttgtttttttttttctgtttccataggagaaaaatgttcatctgacataccttaatgttagcacagaggacttattcaacctgtcctttcagggagtttattggaggatcaaagaactgaaagcactagagcagccttggggactgctaggatgaagccctaaagaatgcaacctagtcaggttagctgaaccgacactcaaaacgctactgagtcacaataaagattgttttaaagagtaatattttgtcctcataatttgatatgtctcagcatttgctatgttcaaccactgtgatcagaacaagaaagaagtgtacacaacagtggagaactctggcagagatggccacgggactgcaagaaaagaaagcataagattaggaatagacctttgcattttcctacacaggtagagtttaaggaatgttattttctatgctgtattgaatatgccagttatggagaccaattggtttaatggcttatctagttattagctatgaaactttggttaagtcaagtaacttaaacaaagttaagttcagggcagctgaatcaacactcaattcctaacaagtcctttgcatctcaaactctccctttgtatttgcttctggagaacctaacct

SEQ ID NO: 59568 - DNA, 1325 bp, Homo sapiens
atccaaagaaacaattgtgtttttccaaattttactaaaatgttgtcacctgctttacataatacattcacatatttgatatatatgtaggacaaatagtgtttaagatttcttaaaaatacatttcattttataaaaaataatattttcatgagaagccttgaaaatagctttctcaaatacctatattakatgttgccataacactgaaaatgttggagaaataacttagttcattaacatgcaaaatagaagcatcaattgtaggttaattgcctgagaaagaaataaacaatctccagggagatgaccttgttaaaacaaaattattcacttatggtaaactgtaaaatagaagatataaaaaatgtagcattatgtattgattgtaatcaaaaagcttccataatttattattgaggccttgccaaagacttgagccatgtgaagtatttgagacactaataaataacattttctaatctgtggattcaaattaaaaagtgacatacatctaaatgtttgtatattgtttatatacatgaaatttaaatagcaatgaggtggcaattaagaaaaatattcttgttttaacaatatcacataatttaagcatttttttcaacattgcttttaaataacattacttttctacaactcttaattacctttgaatccagtgtatggagtataaactcattaatgttttcttgtgctttcccgcaaacagcaactacacttgaatgcagttttagattagaccttttactatgtggaagaaaactggctaaactatttaaatagtatttattgtaaacaattttctgacacgtgtacttatggtattttatgaacttgaaaatttgtctgcttgtttcagacttacatattttgctcttgcaaagccagtcagtttttattatgtcagatgattgccaagtgtaccaacctttgagcttatgacttcattttttaccccacagtaattttcttaatggctactagaattgattgtaatagcaggcatgccttctatcaatattatgcagaagtaaaagcagttcttggcaggttcctgaatggaattcatctgattaaatatgcattttttgattactgtctaaccttctgcaacctctactgtctgtcttttgccattaaagattaatctgccagtctatcagataaaataataatctgaatggatctgcatgactttacctaatctatcaaatcgtatcagactattatttttacacattgtaggtatatgtgaccattaaattaccatcaagtaggaaagaaaacccactagaatgcaatgt

SEQ ID NO: 59569 - DNA, 1325 bp, Homo sapiens
atccaaagaaacaattgtgtttttccaaattttactaaaatgttgtcacctgctttacataatacattcacatatttgatatatatgtaggacaaatagtgtttaagatttcttaaaaatacatttcattttataaaaaataatattttcatgagaagccttgaaaatagctttctcaaatacctatattatatgttgccataacactgaaaatgttggagaaataacttagttcattaacatgcaaaatagaagcatcaattgtaggttaattgcctgagaaagaaataaacaatctccagggagatgaccttgttaaaacaaaattattcacttatggtaaactgtaaaatagaagatataaaaaatgtagcattatgtattgattgtaatcaaaaagcttccataatttattattgaggccttgccaaagacttgagccatgtgaagtatttgagacactaataaataacattttctaatctgtggattcaaattaaaaagtgacatacatctaaatgtttgtatattgtttatatacatgaaatttaaatagcaatgaggtggcaattaagaaaaatattcttgttttaacaatatcacataatttaagcatttttttcaacattgcttttaaataacattacttttctacaactcttaattacctttgaatccagtgtatggagtataaactcattaatgtyttcttgtgctttcccgcaaacagcaactacacttgaatgcagttttagattagaccttttactatgtggaagaaaactggctaaactatttaaatagtatttattgtaaacaattttctgacacgtgtacttatggtattttatgaacttgaaaatttgtctgcttgtttcagacttacatattttgctcttgcaaagccagtcagtttttattatgtcagatgattgccaagtgtaccaacctttgagcttatgacttcattttttaccccacagtaattttcttaatggctactagaattgattgtaatagcaggcatgccttctatcaatattatgcagaagtaaaagcagttcttggcaggttcctgaatggaattcatctgattaaatatgcattttttgattactgtctaaccttctgcaacctctactgtctgtcttttgccattaaagattaatctgccagtctatcagataaaataataatctgaatggatctgcatgactttacctaatctatcaaatcgtatcagactattatttttacacattgtaggtatatgtgaccattaaattaccatcaagtaggaaagaaaacccactagaatgcaatgt

SEQ ID NO: 59570 - DNA, 1095 bp, Homo sapiens
tgtaagtatgtgtgtatatttacctatacatatatttcatagtgatgttatagcatatatattgatttgcaacttgttttatcacataacaaattgaaaacatttttatgctttttaaatttatttgaaaaagcttcatgtttttgatatatatatatacacacacatatatacccatatgtgtttaagcaacatcctatttatgtttttctggatatttttctaagatttgcctgtgcatttctacttggatatctgtagtgcaaatttgtaaaagtggaattgctgaatgccacgtatatgttttatatttagatagtgacagattattctccaaaagatttttccagtttttcatgtttattgttaaaatcttcattgatgataagaatgaacccttgtggttataaaccactgggtgagataaggaaatatagagaaaccttgacgtaggaagaataacttttccaatcatgtcacatgyttagccagaagtgagtaaaaggacactttgcctatttacccctttgaatttactctttttacattttttaatttattttggttacctccctttttttttgctctatttattcctatcatcttttttcttaatgaactttcagtaatacctattttctcttgagctccttgtaacttcttttcttctcagatgattgtatttatttatttattcatttatttatttaccagctcttttttaccatttcaaaattatttgattctaaggaaaacccatctggacactggctaccccatttacttaaactcagaaaaagttatttcccagggctgcctcccctggtaattcacatattccaacctgttttttttttttaattcccagtagtgagtcctctgatacaccaggttttgaacatagtctccatattgtgttgtagagaatatgtttgaaacctggcatatgagaggactgactactgttgtatatttcaaacatattctttgcccaatcagtgggtctcttttcttataagggtcactcctagttgacgtgatctgtgttctcccatgggactctcatgtatctcctcttgaccagcaacaaatgca

SEQ ID NO: 59571 - DNA, 1311 bp, Homo sapiens
agtatatggagtacacaaaaattattagagaataggggatatattgtttaagtttttgttatcagtatgttatgatattttgacatcttaaaaagcccttctggttggggacaggctgcccctcctggactagccatttcttagagataacagacggctcagcagggagcatgtatttgataagtaaagtaaccaatcaagagtaacatctcctctatcctgccctgttgtttaagccacacagtctgtggcattttgttatagcagcctgagcttttcaccaccctcattcattttccgaacacctactatttgatgggaaccatgctagcactgggaatctacatgttggtcaaaaacagacataaacatggacacacaaaaaagtattactcaatttatgctgcagcaacaaaccaactccaaagcatcgatgacatacctcaagaagcagtttcaacaatctgctgggagccagggtgaaagggcagcagctatctgagttcttctctactcatcacagacattagacagataagaaaaaacaggcagaaacaggcaaggcttcctgaagcctctgctacttttcacctagaataaaaaccaaagttctgcctttggcctccaggatcctatatgatttgttcagctaccctcctgcattttcatctgcgtatctcctctttcacccttggctgcagcatgctggccttttgctattcttcaaacataccaagcatacctatgttgctatgactctcaagtggctgttacttctacctggaggcattcattcattatttgcaaaggaaactcgagtttccttcgatgaatctcttattattcaatatgaagttttgcaaagtttgaaaagggacaaatgagtactgtcaaggcaaaaaatcattgaaacagaaaagttataaagaatcataggaaagtacaaaaaagtatatttcttatttgtaacactttttttctcctatcttatataaaacacagtcacataaagtgcttattataaatgtgattggatagatgtacaatgtggaaggatgtaaatcatacaacagtaatagcacaaagataaaagaagaggaaagggcgctatatagaagcaatttttgtatagtatttaaattaagttgctgttaatccgaactatatggttagaaattaagaagttaattaatctccaargccagaactaagaaaatacattttattatttttattatatttattgtttttctgtttttttaatttgtatatgtgtatggggtacaagttcaattttgttacatgcataga

SEQ ID NO: 59572 - DNA, 926 bp, Homo sapiens
catattgaacttaaaagtgtgctgtatcctattatttcaagatcttagtcaacttcatatataaaacatgccgtgcttctgggttaacttttctaggaaattgctgtggtktcttcttcttttgaatatgtgagtgtcttagtctgttttgtattgctgtaaaagaatacccaagactgaataacttattaattaaagagttttatttagctcttgtttctgcaggctggaaaagaagcatgacaccagcatctgcttttagtgagagcctcagactgctttcaatcatgacggaaggcaaaaaggagccagtgtgaacagagatcacatgctgagagaagatgcaaaagaaagaggagggaggtaccagactctttttaacaaccagctctcacagaaactaatagagtgagaactcactcattcctgtaagggttgcaccaaacctttcatgactaggccccacatccaacattcaggacaaaatttcaacatgagctttgtgagggacagacgttcaaactgtagttgtgagtctcgcctgactaaggagttttacctatacactgaaggaaaatcagagaggctaaatagatataaaatgcttaactttagggtgagaggatggagacaaaactataagctgagtggaatgcacatgccagaaagagtagagtgccaacatctatcctaggaatcataattcccaaacaggtaattttatctctgtcaaaaagagccctgttaatttttcctgggaataaatgctgcattacaagcatttggaaaggggatgtggagagaaaactgggatatttgacctataggtagacttttaattaattaccctgctttgatttccctttgatacggctgagctgtgtctccacccaaatctcttctcaattgtaatctctataatctcc

SEQ ID NO: 59573 - DNA, 926 bp, Homo sapiens
catattgaacttaaaagtgtgctgtatcctattatttcaagatcttagtcaacttcatatataaaacatgccgtgcttctgggttaacttttctaggaaattgctgtggtttcttcttcttttgaatatgtgagtgtcttagtctgttttgtattgctgtaaaagaatacccaagactgaataacttattaattaaagagttttatttagctcttgtttctgcaggctggaaaagaagcatgacaccagcatctgcttttagtgagakcctcagactgctttcaatcatgacggaaggcaaaaaggagccagtgtgaacagagatcacatgctgagagaagatgcaaaagaaagaggagggaggtaccagactctttttaacaaccagctctcacagaaactaatagagtgagaactcactcattcctgtaagggttgcaccaaacctttcatgactaggccccacatccaacattcaggacaaaatttcaacatgagctttgtgagggacagacgttcaaactgtagttgtgagtctcgcctgactaaggagttttacctatacactgaaggaaaatcagagaggctaaatagatataaaatgcttaactttagggtgagaggatggagacaaaactataagctgagtggaatgcacatgccagaaagagtagagtgccaacatctatcctaggaatcataattcccaaacaggtaattttatctctgtcaaaaagagccctgttaatttttcctgggaataaatgctgcattacaagcatttggaaaggggatgtggagagaaaactgggatatttgacctataggtagacttttaattaattaccctgctttgatttccctttgatacggctgagctgtgtctccacccaaatctcttctcaattgtaatctctataatctcc

SEQ ID NO: 59574 - DNA, 553 bp, Homo sapiens
tctggaataaaaccaccctggatttacgtgcacacaaaaatctaatgccaggtgtccgtatgagaagatgaaaaatacaaagacacaggggataaggccatttgtaaactctagcagagrctggagttatgctgccacagaccaagaaatgccaagacccatcagaagctgaaagaggcaaggaaggattgcagctttccaaggaaggtgtccctactaacacaccttgattttggacttctgaccttcacaacagtgagagaatacattcttgttgtttaagccacccagtttgtggtactttgttatggtggcctcaggaaactaatacaggaggttttctgtttagcatattataggatattgacttgagtaggagctcagattccacagagagatagttggatgaggtctatgtattaacaccatattgaatacaaactctgtaagtgggaagcattgtttccaggaagagcaaataccacattccaaccatatttatggttgttgagtcagggagattcctgtcaacactaccttatcagcaactgtc

SEQ ID NO: 59575 - DNA, 553 bp, Homo sapiens
tctggaataaaaccaccctggatttacgtgcacacaaaaatctaatgccaggtgtccgtatgagaagatgaaaaatacaaagacacaggggataaggccatttgtaaactctagcagagactggagttatgctgccacagaccaagaaatgccaagacccatcagaagctgaaagaggcaaggaaggattgcagctttccawggaaggtgtccctactaacacaccttgattttggacttctgaccttcacaacagtgagagaatacattcttgttgtttaagccacccagtttgtggtactttgttatggtggcctcaggaaactaatacaggaggttttctgtttagcatattataggatattgacttgagtaggagctcagattccacagagagatagttggatgaggtctatgtattaacaccatattgaatacaaactctgtaagtgggaagcattgtttccaggaagagcaaataccacattccaaccatatttatggttgttgagtcagggagattcctgtcaacactaccttatcagcaactgtc

SEQ ID NO: 59576 - DNA, 858 bp, Homo sapiens
acctaggtgagtatttccatactgtataagaatatacgtggaaatatggtcattttgacctgtttcctaatggtggttggagacatatatatgtaccgctaccacacacacacacacacacacacacacacacacaagccatcaagtcataagacctattttgccctaaaaataagtaaacatttggcactaaataaaaacgtctttgagacaatcttattatactaaaggttattgtcaggtggaagtcctgaaataatgagtttaaaagttcattgcttatgagctaccccaaaacaatttacttaaattatttttttaatctatgcttttaggtaggctaaatctatgtgttccctatagtcttttttcagtaactttacttatgaatatgttcattaaagaaggtaatttttacaactattgtaaaattttttgaatttgtgacatctaatgatatggtttggctgtgtccccacccaaatctcatcttgagttcccacgtgttgtgggagggacctgctgggaggtaattgaakcatgggggcaagtctttcccatgctgttctcatgatagtgaataagtctgatgagatgtgatggtttttaagagaggtgttcccctgcacaagctctctcattttctgtcccaccatccacacaagatgtgacttgctcctccttgccttctgccatggttgtgaggctttcccaaccacgtggacctgtaagtccaattaaacctctttcttttgtaaattgctcagtcttgggtatgtctttatcagcagggtgaaaatggactaatacatctaatatgtttgaatgaatatttcattttaggattttatgtaatgt

SEQ ID NO: 59577 - DNA, 858 bp, Homo sapiens
acctaggtgagtatttccatactgtataagaatatacgtggaaatatggtcattttgacctgtttcctaatggtggttggagacatatatatgtaccgctaccacacacacacacacacacacacacacacacacaagccatcaagtcataagacctattttgccctaaaaataagtaaacatttggcactaaataaaaacgtctttgagacaatcttattatactaaaggttattgtcaggtggaagtcctgaaataatgagtttaaaagttcattgcttatgagctaccccaaaacaatttacttaaattatttttttaatctatgcttttaggtaggctaaatctatgtgttccctatagtcttttttcagtaactttacttatgaatatgttcattaaagaaggtaatttttacaactattgtaaaattttttgaatttgtgacatctaatgatatggtttggctgtgtccccacccaaatctcatcttgagttcccacgtgttgtgggagggacctgctgggaggtaattgaatcatgggggcaagtctttcccatgctgttctcatgatagtgaataagtctgatgagatgtgatggtttttaagagaggtgttcccctgcacaagctctctcattttctgtcccaccatccacacaagatgtgacttgytcctccttgccttctgccatggttgtgaggctttcccaaccacgtggacctgtaagtccaattaaacctctttcttttgtaaattgctcagtcttgggtatgtctttatcagcagggtgaaaatggactaatacatctaatatgtttgaatgaatatttcattttaggattttatgtaatgt

SEQ ID NO: 59578 - DNA, 1415 bp, Homo sapiens
tttgcaatagcaaagacatggattcaacctaaaggcccatcaatggtaaactggataaagaaatgtagtacatatatactatggaatactatgaagccatagaaaagaatgaaatcatgttctttgcagcaatatggatggacctggaggacattatcttaagcaaactaacataggaacagaaaaccaaatattgtatgttctcacttataagtggaagctaaacattgcatacgtatgaacacaaagacgagaacaacatatcaggtcctacttaggatgcaaggtgggagaatggtgatgatcaaaaagttaccttttgggtactatgcttattacttaagtgatgaaataatctgtacactagatccccgtgacacacaatttacatatatgataaacctgcacacgtacccctgaacctaaaataaaagttaaaaataacttccatatttatgtcttcactcaagtgttaaatattgttagcagtaaaatgtacatacttcagaaataattttatatctgcctttacatacatatgtgaacatattaatatatacatcattttatattattgaattcatactgcattttttcacaatctgtttcatttacagatagtatatcttgaataataatcatagcttccacttatacaccactttttatgggagaggcaatattctaagtcctctatggctcttaacttaatgtaatcctcagaaaaaaaccctgagataagtagtattactattcacatttcaggatgatgaaactgaggtatgtggagtttaataaatttgaccaagtttgcacaactggaagctgctgatttaactctggaaaaactggaagaacttgaaatctctccatataagagcatattttccycccccccccccctcctttttttttttttttttttttttttgacagtgtcttgctctgttgcccaggctggagtgcagtagcatgatcttggctcactgcaacctccgtcttgggggttcaagccattctcctgcctcagcctcccgagtagctgagattacaggtatgcatcaccacgctcagctatgttttgtatttttagtagagctggggtttcaccatgttgaccaggctggtcttgaactcctgacctcagatgatccacccagcttggcttcccaaagtggtgggatgacaggtatgagccaacaggccctgcccttcttattttttacaacagccccatttcagcaacaattggcatgttttctacttaactatatttatctgttcaagaaatggagacataatcatttaaactgggtctcttcgtgctatttcaggtaatgccacatgaacatcttgacaacacttatcttactgtatagaatgaagtaaagatcaaattatcttttcttgattcc

SEQ ID NO: 59579 - DNA, 1415 bp, Homo sapiens
tttgcaatagcaaagacatggattcaacctaaaggcccatcaatggtaaactggataaagaaatgtagtacatatatactatggaatactatgaagccatagaaaagaatgaaatcatgttctttgcagcaatatggatggacctggaggacattatcttaagcaaactaacataggaacagaaaaccaaatattgtatgttctcacttataagtggaagctaaacattgcatacgtatgaacacaaagacgagaacaacatatcaggtcctacttaggatgcaaggtgggagaatggtgatgatcaaaaagttaccttttgggtactatgcttattacttaagtgatgaaataatctgtacactagatccccgtgacacacaatttacatatatgataaacctgcacacgtacccctgaacctaaaataaaagttaaaaataacttccatatttatgtcttcactcaagtgttaaatattgttagcagtaaaatgtacatacttcagaaataattttatatctgcctttacatacatatgtgaacatattaatatatacatcattttatattattgaattcatactgcattttttcacaatctgtttcatttacagatagtatatcttgaataataatcatagcttccacttatacaccactttttatgggagaggcaatattctaagtcctctatggctcttaacttaatgtaatcctcagaaaaaaaccctgagataagtagtattactattcacatttcaggatgatgaaactgaggtatgtggagtttaataaatttgaccaagtttgcacaactggaagctgctgatttaactctggaaaaactggaagaacttgaaatctctccatataagagcatattttcccccyccccccccctcctttttttttttttttttttttttttgacagtgtcttgctctgttgcccaggctggagtgcagtagcatgatcttggctcactgcaacctccgtcttgggggttcaagccattctcctgcctcagcctcccgagtagctgagattacaggtatgcatcaccacgctcagctatgttttgtatttttagtagagctggggtttcaccatgttgaccaggctggtcttgaactcctgacctcagatgatccacccagcttggcttcccaaagtggtgggatgacaggtatgagccaacaggccctgcccttcttattttttacaacagccccatttcagcaacaattggcatgttttctacttaactatatttatctgttcaagaaatggagacataatcatttaaactgggtctcttcgtgctatttcaggtaatgccacatgaacatcttgacaacacttatcttactgtatagaatgaagtaaagatcaaattatcttttcttgattcc

SEQ ID NO: 59580 - DNA, 1415 bp, Homo sapiens
tttgcaatagcaaagacatggattcaacctaaaggcccatcaatggtaaactggataaagaaatgtagtacatatatactatggaatactatgaagccatagaaaagaatgaaatcatgttctttgcagcaatatggatggacctggaggacattatcttaagcaaactaacataggaacagaaaaccaaatattgtatgttctcacttataagtggaagctaaacattgcatacgtatgaacacaaagacgagaacaacatatcaggtcctacttaggatgcaaggtgggagaatggtgatgatcaaaaagttaccttttgggtactatgcttattacttaagtgatgaaataatctgtacactagatccccgtgacacacaatttacatatatgataaacctgcacacgtacccctgaacctaaaataaaagttaaaaataacttccatatttatgtcttcactcaagtgttaaatattgttagcagtaaaatgtacatacttcagaaataattttatatctgcctttacatacatatgtgaacatattaatatatacatcattttatattattgaattcatactgcattttttcacaatctgtttcatttacagatagtatatcttgaataataatcatagcttccacttatacaccactttttatgggagaggcaatattctaagtcctctatggctcttaacttaatgtaatcctcagaaaaaaaccctgagataagtagtattactattcacatttcaggatgatgaaactgaggtatgtggagtttaataaatttgaccaagtttgcacaactggaagctgctgatttaactctggaaaaactggaagaacttgaaatctctccatataagagcatattttccccccccycccccctcctttttttttttttttttttttttttgacagtgtcttgctctgttgcccaggctggagtgcagtagcatgatcttggctcactgcaacctccgtcttgggggttcaagccattctcctgcctcagcctcccgagtagctgagattacaggtatgcatcaccacgctcagctatgttttgtatttttagtagagctggggtttcaccatgttgaccaggctggtcttgaactcctgacctcagatgatccacccagcttggcttcccaaagtggtgggatgacaggtatgagccaacaggccctgcccttcttattttttacaacagccccatttcagcaacaattggcatgttttctacttaactatatttatctgttcaagaaatggagacataatcatttaaactgggtctcttcgtgctatttcaggtaatgccacatgaacatcttgacaacacttatcttactgtatagaatgaagtaaagatcaaattatcttttcttgattcc

SEQ ID NO: 59581 - DNA, 1415 bp, Homo sapiens
tttgcaatagcaaagacatggattcaacctaaaggcccatcaatggtaaactggataaagaaatgtagtacatatatactatggaatactatgaagccatagaaaagaatgaaatcatgttctttgcagcaatatggatggacctggaggacattatcttaagcaaactaacataggaacagaaaaccaaatattgtatgttctcacttataagtggaagctaaacattgcatacgtatgaacacaaagacgagaacaacatatcaggtcctacttaggatgcaaggtgggagaatggtgatgatcaaaaagttaccttttgggtactatgcttattacttaagtgatgaaataatctgtacactagatccccgtgacacacaatttacatatatgataaacctgcacacgtacccctgaacctaaaataaaagttaaaaataacttccatatttatgtcttcactcaagtgttaaatattgttagcagtaaaatgtacatacttcagaaataattttatatctgcctttacatacatatgtgaacatattaatatatacatcattttatattattgaattcatactgcattttttcacaatctgtttcatttacagatagtatatcttgaataataatcatagcttccacttatacaccactttttatgggagaggcaatattctaagtcctctatggctcttaacttaatgtaatcctcagaaaaaaaccctgagataagtagtattactattcacatttcaggatgatgaaactgaggtatgtggagtttaataaatttgaccaagtttgcacaactggaagctgctgatttaactctggaaaaactggaagaacttgaaatctctccatataagagcatattttcccccccccccyccctcctttttttttttttttttttttttttgacagtgtcttgctctgttgcccaggctggagtgcagtagcatgatcttggctcactgcaacctccgtcttgggggttcaagccattctcctgcctcagcctcccgagtagctgagattacaggtatgcatcaccacgctcagctatgttttgtatttttagtagagctggggtttcaccatgttgaccaggctggtcttgaactcctgacctcagatgatccacccagcttggcttcccaaagtggtgggatgacaggtatgagccaacaggccctgcccttcttattttttacaacagccccatttcagcaacaattggcatgttttctacttaactatatttatctgttcaagaaatggagacataatcatttaaactgggtctcttcgtgctatttcaggtaatgccacatgaacatcttgacaacacttatcttactgtatagaatgaagtaaagatcaaattatcttttcttgattcc

SEQ ID NO: 59582 - DNA, 877 bp, Homo sapiens
gtcatggagatttttgttccccaaattaaaaagggcaaatagcagttacccacatcccgatgaatcagagccatgcctaagtcagttttccacccagctctgaagacactgttggtacttaaaaatatttaactaagactgtgtcattttgcaggttgttggatttcttctggaaaagtgagtagatatcaccctttgcaattacagcaatcgaaccgcaattcatgtagctaattgcaatatccaaagacaactcttggcagtcaatagaatccaggctccccaaatgcaacttctacaaagttcatggcaaggtgatcttgagcaagttcaacatttactggttagttgatatttgtttctgtctttgggtgggtgagtggatggtgaaaagggcacagactacatatgactccttttaaagaaaaataaattcttttcaaatataatcctaggaagtttcagacaaaacatataaaaaagaaaggggatcaaacaggacactggggtggaaaacaagataataaaagaacacaggagcagtcgatttccaccttcctcaagctgggtgctagaagtcacrcaacacccctgggaaatgatttgctcccaggaagcctccagaggaccactatcaacttgctcagaggagttcccttggcatcattgccatttgtacaattgctgctttgatccctttggaccagttgctgttattatctttatcctgaaaaaggaatctgagagcctatgccttgcctaatatttagttgtcatgaaagagttcagaggatacatttttaaagggctgtcttctcagggtattgatccttgtgtttagattttctacttacagatactttttcccaaagcaact

SEQ ID NO: 59583 - DNA, 685 bp, Homo sapiens
tgcatgtaacaaaattgcacttgttacccataaattcatacaaattaaaaaatatataagacaaatgtaaccatgctttcttcaaaaaaacaaaaacgaggtaatccccattgtagtcccaaagatgggaggagagaggctcatccaagaaggccagagagggctggatgtaccctgcttccaaatctgctgtctctcccacaccccttacaacagaccctttgctctcccttctacctccctgttctcagaggcttccctttctcttatttctcatctgccccctaaaaaggaaggcagaagattccaattccttgtacccttaggtacttggagcagaatgaagtaaatttagtgaatcatttgcaactctgtacttcttgggtgcacttcaaatatcaacaagaacatttattctgtggaatagactggtttaatttcggccttttacytcaactttcagccatctgaaattgtgtagacttttccaaactgtgttcatgtgccaccctgacctactgcctatccctgcaattggatgggccttaagaacccagctccaggccaggcgcggtggctcacacctgtaatcccagcactttgggaggcagagacaggtgaatcacctgcagtcaggagttccagaccagcctggccaacacagtgaaaccccctctctactaaa

SEQ ID NO: 59584 - DNA, 696 bp, Homo sapiens
aggactgtgggggtggggggtccgtgtgtggaagcctgttgtgaatgaaaaagccctgtcctccatgccttgctattaacgtcggggtcatgtggctttggacacagatgggtggggtccagggtctaattccccatggtcctccctaaagaaacagccactcagcctcctgtgagatcccaggcccctccctcactgccctaacccagtctcctgatttccagctggtagagagtgcccgagaggcctggaggagacttcggacctkctttcacaactgcagaggtgaggcacttccccttccctgcatccttcctaccagggctgggacatgacccaagggccacaggcagcctggagctgacctgggatggggagaccagggggacagaggatgggagtaaaaccctggggcgaggggtagcaggagaattgggcaatcagggtgtgggatggtggaggggctgtggcccgagcacccactctgccctccggccccaccggctcctggctgcagctcgtgcctcctgtctcctgcagcctcctggggccacaccttgacaaaggtgactttggtcagctctccggtccagaccccccaggtgaggtgggcgaaagagcacctgatggagcctcccagtcctctcatgagcctatggaagatgctgctcccattctctccccgttagcttcccc

SEQ ID NO: 59585 - DNA, 696 bp, Homo sapiens
aggactgtgggggtggggggtccgtgtgtggaagcctgttgtgaatgaaaaagccctgtcctccatgccttgctattaacgtcggggtcatgtggctttggacacagatgggtggggtccagggtctaattccccatggtcctccctaaagaaacagccactcagcctcctgtgagatcccaggcccctccctcactgccctaacccagtctcctgatttccagctggtagagagtgcccgagaggcctggaggagacttcggaccttctttcacaactgcagaggtgaggcacttccccttccctgcatccttcctaccagggctgggacrtgacccaagggccacaggcagcctggagctgacctgggatggggagaccagggggacagaggatgggagtaaaaccctggggcgaggggtagcaggagaattgggcaatcagggtgtgggatggtggaggggctgtggcccgagcacccactctgccctccggccccaccggctcctggctgcagctcgtgcctcctgtctcctgcagcctcctggggccacaccttgacaaaggtgactttggtcagctctccggtccagaccccccaggtgaggtgggcgaaagagcacctgatggagcctcccagtcctctcatgagcctatggaagatgctgctcccattctctccccgttagcttcccc

SEQ ID NO: 59586 - DNA, 696 bp, Homo sapiens
aggactgtgggggtggggggtccgtgtgtggaagcctgttgtgaatgaaaaagccctgtcctccatgccttgctattaacgtcggggtcatgtggctttggacacagatgggtggggtccagggtctaattccccatggtcctccctaaagaaacagccactcagcctcctgtgagatcccaggcccctccctcactgccctaacccagtctcctgatttccagctggtagagagtgcccgagaggcctggaggagacttcggaccttctttcacaactgcagaggtgaggcacttccccttccctgcatccttcctaccagggctgggacatgacccmagggccacaggcagcctggagctgacctgggatggggagaccagggggacagaggatgggagtaaaaccctggggcgaggggtagcaggagaattgggcaatcagggtgtgggatggtggaggggctgtggcccgagcacccactctgccctccggccccaccggctcctggctgcagctcgtgcctcctgtctcctgcagcctcctggggccacaccttgacaaaggtgactttggtcagctctccggtccagaccccccaggtgaggtgggcgaaagagcacctgatggagcctcccagtcctctcatgagcctatggaagatgctgctcccattctctccccgttagcttcccc

SEQ ID NO: 59587 - DNA, 696 bp, Homo sapiens
aggactgtgggggtggggggtccgtgtgtggaagcctgttgtgaatgaaaaagccctgtcctccatgccttgctattaacgtcggggtcatgtggctttggacacagatgggtggggtccagggtctaattccccatggtcctccctaaagaaacagccactcagcctcctgtgagatcccaggcccctccctcactgccctaacccagtctcctgatttccagctggtagagagtgcccgagaggcctggaggagacttcggaccttctttcacaactgcagaggtgaggcacttccccttccctgcatccttcctaccagggctgggacatgacccaagggccacaggcagcctggagctgacctgggatggggagaccagggggacagaggatgggagtaaaaccctggggcgaggggtagcaggagaattgggcaatcagggtgtgggatggtggaggggctgtggcccgagcacccactctgccctccggccccaccggctcctggctgcagctcgtgcctcctgtctcctgcagcctcctggggccacaccttgacaaaggtgactttggtcagctctccggtccagaccccccaggtgaggtgggcgaaagagcacctgatggagcctcccagtcctctcatgagcctatggaagatgctgctcccattctctcccygttagcttcccc

SEQ ID NO: 59588 - DNA, 1467 bp, Homo sapiens
aagagggcagtcagtgggaacaaagccttgggttcaaaagttctgatgcaatttctgtcttcagaattctatcaaactgagctggaaatatttttatccaaatcctcctaagatttcaggtagcctccagctatgctgaaccactttgacactgtttcaaaccttccatttcttttatgcctgaagtatgggtttgccttatcttaaaatgcacgtgtatgcatgcatgcacacactgcacccaacaaaaagactacagaaaataaaagttatagaaatctttaagaatatcagaaaagattagctttatatcctgctgtgggggcctcattcacgccttctcatgagtttgttcatccatagaaatgaccttagaaacagggatgtgttataaagctttattctaaaacacattttaattgactttctaaatttaagatggttctgtttttaaccattttcagacattttgtgtataccttaaattattgaaagtctaatgctttttcagcagctggcacttttcagtcagaaagtccatcccatcttatttaaataatcagatgcgtgatgactggcaacaaaactatttgtaattatgattacaactaaaggttccatacttctactaaaatttttagctgcctcaatccacatttccatgtgaaaaagggcatttgcatgattaaatctgagaaccatattttagtcattttacaaatgttcaccagagtaatttaaatatatgtgttaaatgcaaaatatttttagacgatagtgtcaaaaatatagtgagtgactgatgccagaaaaaaagtgtaactttatgaaaattcaaatttgctacatattttaatcaactttaaatttcttttcagatgtattatttgaagctttatggaaagcaaatagaagttaaactctaaatcatcactatctaatataaatttctgcttgttgaaatgtagtatacctgttctgttcattacagtagccatgagtcacccatactcatcatttgaaatgtggctggtgtggcyggtgaactgatttttaaattttatttaatgttaattaacttataaataaccaatgaagctagtgactactgttatcagacaatacaatctatagtctgaaagtacttatagttgaaatatctcagtgtatattaacctttcaacaattaagtgttgctgcttctgtattttttgcattattaatgaatcaataaatataaaacacagaggaatcagcattcatacagacacacacacacacacacacacgtgcatacatatgttgtttcagtgcttaaaacaatcgatatagtaaaaatccattgctgctaaatgaggagagaatcttcaagtaaccagatactttctcacaggtgagttctggttctccagagatggatctctgttaaatgtttgttttatatatttatatgtatctatatatatt

SEQ ID NO: 59589 - DNA, 767 bp, Homo sapiens
  misc_feature (1)...(767): n = A,T,C or G
ttttcaaattactttcatatgtcctgtttcatttatttcccccagttcggaatgggaaaactgaggcctgggacttgaaataacagatgtatgtttgtacagcaaatcatcatgagagccaaaactcaaacccatactctctcaccgaaccccactgcttctttcagcacacaataattattattatgccaagtaagtttaacaaggtgacttggatcgattcattctgatgatttgagttggctcctgggatcatctgggtaaatattaggcccacatctctttccaaacatattccatctctctctctctctttgkttttttcttttttctacattttcacctctgctccctcatcatacctccctccctttctctgttgaactcctccccttctcttctttcctcccttcctctcatcctctcacccacaaaaacatttgtttgtcttacatagggatagtgtcatgtgactgggtggctgaaaggagaagtatcttttaagctcctggaagcagaatattttcttatggattttttattgtttggattgttttgccaggctaatgaaagaagactctgaggtccccttatctcaggccaactagaggatgccttcaagtttttgtttttcttcccaagctggttccttacaaatgcatccannnnnnnnnnnnnnnnnnnnnnnnnnnnnnnnnnnnnnnnnnnnnnnnnnnnnnnnnnnnnnnnnnnnnnnnnnnnnnnnnnnnnnnnnnnnnnnnnnnnag

SEQ ID NO: 59590 - DNA, 767 bp, Homo sapiens
  misc_feature (1)...(767): n = A,T,C or G
ttttcaaattactttcatatgtcctgtttcatttatttcccccagttcggaatgggaaaactgaggcctgggacttgaaataacagatgtatgtttgtacagcaaatcatcatgagagccaaaactcaaacccatactctctcaccgaaccccactgcttctttcagcacacaataattattattatgccaagtaagtttaacaaggtgacttggatcgattcattctgatgatttgagttggctcctgggatcatctgggtaaatattaggcccacatctctttccaaacatattccatctctctctctctctttggttttttcttttttctacattttcacctctgctccctcatcatacctccctccctttctctgttraactcctccccttctcttctttcctcccttcctctcatcctctcacccacaaaaacatttgtttgtcttacatagggatagtgtcatgtgactgggtggctgaaaggagaagtatcttttaagctcctggaagcagaatattttcttatggattttttattgtttggattgttttgccaggctaatgaaagaagactctgaggtccccttatctcaggccaactagaggatgccttcaagtttttgtttttcttcccaagctggttccttacaaatgcatccannnnnnnnnnnnnnnnnnnnnnnnnnnnnnnnnnnnnnnnnnnnnnnnnnnnnnnnnnnnnnnnnnnnnnnnnnnnnnnnnnnnnnnnnnnnnnnnnnnnag

SEQ ID NO: 59591 - DNA, 767 bp, Homo sapiens
  misc_feature (1)...(767): n = A,T,C or G
ttttcaaattactttcatatgtcctgtttcatttatttcccccagttcggaatgggaaaactgaggcctgggacttgaaataacagatgtatgtttgtacagcaaatcatcatgagagccaaaactcaaacccatactctctcaccgaaccccactgcttctttcagcacacaataattattattatgccaagtaagtttaacaaggtgacttggatcgattcattctgatgatttgagttggctcctgggatcatctgggtaaatattaggcccacatctctttccaaacatattccatctctctctctctctttggttttttcttttttctacattttcacctctgctccctcatcatacctccctccctttctctgttgaactcctccccttctcttctttcctcccttcctctcatcctctcacccacaaaaacatttgtttgtcttacatagggatagtgtcatgtgactgggtggctgaaaggagaagtatcttttaagctcctggaagcagaatattttcttatggattttttattgtttggattgttttgccaggctaatgaaagaagactctgaggtccccttatctcaggccaactagaggatgccttcaagtttttgtttttcttcccaagctgrttccttacaaatgcatccannnnnnnnnnnnnnnnnnnnnnnnnnnnnnnnnnnnnnnnnnnnnnnnnnnnnnnnnnnnnnnnnnnnnnnnnnnnnnnnnnnnnnnnnnnnnnnnnnnnag

SEQ ID NO: 59592 - DNA, 1674 bp, Homo sapiens
ccttttgggaaagaaagggtaattagacaagagtaaaggcagactcttaagtgtatatatagagagatagataaacacacacttttttttttttttgagacagagtcttgctctgtcaccaggctagagtacaatggtgcaatcacggctcactgcaacctctgactccctggttcaagtgatactcctgcctcagcctcctgagtagctgggattacaggcgtgcaccaccacacccagctaattttgtatttttagtagagattgcatttcaccatgttggtcaggctggtctcaaactcctgacctcagatgatctgcccgcctcagcctcccaaagtgctgggattacaggtgtgagccaccacacctggaggttaagtttcttaaaccctccaagtctcaattttctcatccataaaatgatttgttataagaatgaggggtaaatgctaataacataggcaaacacctaaaacagtgtttaatgcaatacaatggtaattattattggtacttttatcatcattattggttctttctataattgataattcttcttactttttttttgagatggagtctcactctgtcgcccaggctggagtgcagtggagcaatcttagctcactgcaacctctgcctcccaggttcaagtgattctcttgcctcagcctcccgagtaggtgggactacaggcatgcagcactatgtccggctaatttttttgtagttttagcagagacggagtttcaccgtactagccgggctgatctcgaattcctgacctcggatgattcacctgcctcggcctctcaaagtgctaggatttcaggatttcaggtgtgagccacggcagctggcctcttcttacctttttctgttgctgtttgtttccaaaacctcttcgaaatgcattatcttcttgtgttatcaattctcctcagcttctaatcatcaatcactttatggtaaagatacaaaacatctaaataaaaataatttttaaattcaattgtactttcccattttacaaaaaaaaaagtgttacacagcatgtgtgccttctgtgatttgtactgggatagaacccggattttgtctttacctggaatacaaagatgattattgaaatgcaggctccaaggagctcctagtccagtggaaatgatagatagcagatattgctaagtacttgttcagagatgtctgaaactgcctttctttctcattgctgtgtgggagactgtcatactcccttattargtatggcatttaggcaggaaacttcaattggaagtaaaaccccctgatttctgagagcagtcagagggtagctcctgcctgccttcccagctaattgccttccattaagatagtgagtgggtacaggacagggaaaggagacaagtaactaaagataagcatgaggaattaggagcagaggatgccagggagtgaagaagaggaagcagtgtaattaaaagaggcagtagagggatgttggcgggactaagcaaaatgactgagggtccaggctctggaatcaaaatgcttgggttcatatccagctcctttacctatgaagtctttgaccctagacaatcctcttgatcatgagtatctctgttttccttatctgtaaaacgggggtcataaattactatcttcata

SEQ ID NO: 59593 - DNA, 1298 bp, Homo sapiens
gggatcctcctttcttctaacccagaagaaagcaatgatcaaaccatgttaattgatgtgttttgatcaagaagaaaccaaggttagtatgaggcttatttccgcagtgactaagtggaagagtcaacacatcagtcttttcgagcccaccacagaactctcatttccattcttctatccaacaactgacactctaagtagctcagattcaaatgcaaatgcaagcacaagaatgcagacacactttgaaatcaataacatcgttttgtcaggcaattcatttagtatttctaaaaaccagtgaagtttaaaaaacaagggagttgaaagcttactctcctgttcctcaagttttaatgagcctattcctcactctgggacagagaagccctcattataacttgtcaatagaacattagcacccaagatggagggagccctatgatcctagttaattttctttcttttttttttttttccatctggatatagttgaaaaatcttctaatgggaaaactatccatttatttgaacacttttctaagtcatagattcatctacttaagaataggatgtgactcttaccatgttggtaaagacgtttttgactgagactttctctgctgggatattatgcattcataaatgatatgcagccttcgtctctctcaaatgagctccgtgggactgcatagagccattgcaggctgcacactgagcactctgtgctgcctgagcacttttgtgccccctgtctcccatactgtaccttagccttcaaaatgagaaaatcagattcaagtttccattttaagaggaggcttttggagctagagataaacacagggggagattgagtgggggtagtaacctgacttcccctttgtataactgcatctgtttcacttgatgcagcagcccttgaaaccatgagcaaatgtgagacaaagaaaagtgcaagtcgcccttgttttctttgctgtgcctgataggtggcctcatatgccgccatgttatccacgttaggttttgtttttaattacctggtctcattgatcattatgtattgtcaagatgtaaagttttagaaaaaaatatgttcccactttttgtttccatmttcagtacagtccccaattcaggtcaatctagtgcgtgttataaaccgtttaatcagataatactctttcactccccagatccttcactgcactcctaagagctgagcctcgtattcaaatctgaatgaatcaggttctgattcagtctcttcaggagaattgtctgagagatctcta

SEQ ID NO: 59594 - DNA, 359 bp, Homo sapiens
ccacgcccactacagttagacagaacgtatcagtgttagaggtgggaggatgtaactatgtaaggaaaatatggagaggtttttggggttttgggatttttctgtatcctgtagtctttacttactttcagcagtcaggttaagtcagcttctgataattccataatcagagcttattataatagtggtaaracagagagtttattttcttatcttccaaaaattaaataaaatagagagagactcaggggccccaagaaaaataacctttattgagtgaatactgtcaatgatagcttagaacagtgccagcaaactatagtcctcaagccaaatcttgcataccacctctttttgta

SEQ ID NO: 59595 - DNA, 359 bp, Homo sapiens
ccacgcccactacagttagacagaacgtatcagtgttagaggtgggaggatgtaactatgtaaggaaaatatggagaggtttttggggttttgggatttttctgtatcctgtagtctttacttactttcagcagtcaggttaagtcagcttctgataattccataatcagagcttattataatagtggtaaaacagagagtttattttcttatcttccaaaaattaaataaaatagagagagactcaggggccccaagaaaaatarcctttattgagtgaatactgtcaatgatagcttagaacagtgccagcaaactatagtcctcaagccaaatcttgcataccacctctttttgta

SEQ ID NO: 59596 - DNA, 1289 bp, Homo sapiens
ctttcttttggggtttgagcttaaaaataactgtgtttttatgattagcatgactagcactagtaatccagaaatgaaataagactttaaaacacatgtgcatacattcaygcctacacacatgtattcttgcacacacacacacacacacacacacacaaacagtactgcatagattcagaatgaaagttcaaaaagacccaagtggaaacatttctaatagaactaaatgaaaggaacactggagactgaagcaaagaagggatttagtaaaggtcagagaaagctacagttcgttagcaatggttctgacaacagtttttgcagttactgtgtccttcagaatagagaattgggttacactgacgacttcattcagggcctcctttttgtttttgtttttgtttttgtttttgtttttgtttttgagatggagtttcgctcttgttgcccaggctggagtgcagtggcgctatctcggctcactacaacctccgcctccctggttcaagcgattctcctgccttggcctcccaagtagctgggattacaggcatgcgccaccatgcccagctaattttttgtatttttagtagagatggggtttctccatgttggtcaggctggtctcaagctcctgacctcaggtaatcctcctgcctcagcctcccaaagtgctgggattacaggcatgagacaccacgcccggccaccatttgtttttttaagcagcattcactttctcccattcattcatattctttcatttgtttacatatttgtttatttattccatcagtcattttaagaggagtttactgggagacttgtgtattctttcttctttgtagggtctgtggtaacccaaagtcacatggatgaagcctctgcttcatgtgagtgtcctagggagacaggtttgtaatacattgtttttgtagtgagtacgtggagatagttgtagagacaaagtgctgtgggaccacgaaagagtgacagcagttttactaaggacagcagttggtgaggttcttataattggtccctgaccattcagcttgtcttgccatccaagatccccttggctaaattccaggtgagtctgttttctctttttctatctccacttgttttccttcttaccatcctttctctaggctttacatctcctttctcattcattgaagacttgagttaaccatttttttccttctaatttgtggggaaaggtgccattttccttggccttctgtgttgtgtgttgacctaaacatcagggaagtcctttc

SEQ ID NO: 59597 - DNA, 549 bp, Homo sapiens
tttacgcctgggcaggttgaaatgcgtgtgccatgacagatccggaagcttgtctactcgaaggtccacatccaggtatgtttcacagtcatcacaactagattttcagaaatttaaaactcctaatgaagaaacacaaacctgcacgtctcacgccaccacttaaggcagcggctctcaagcaggggcgattctactgggaggagggatgctgatggcaccagagggtgggaagcagggatctgacgcttagcaccgcaggtgccaaggacggcctcctccccacaagggctccgggaggccacaccagagggtgggaggcaggggtgacgctcagcactgcaggcaccgaggacagcctcctcccaggaggaaaaaacaaagacgggaaaaaacaaaggctccccacaagggctccagggggccacaccagagggtgggaggcaggggtgacactcagcaccgcaggcaccgaggacrgcctcccacaaaggctcctctgggccagagcatccgtagtgccaaggggaaaagcccggacacaaagga

SEQ ID NO: 59598 - DNA, 776 bp, Homo sapiens
aaagtggggtagcccccaggacctagaagggactcagtcagtttcagtggtcatgcgtgttgtacgggtcccccaggaaggcgattgctacagataactccctccgttcgatgtcactgaatgttaaagtgggaccttggcttctgatgtgtctggtttgctgcaggccgcgctgcaccccgtggttcctgagccctgggctgaagtagccctgctgcattgcctgtgccacttttgctgtgaaaggagaactcctgccctgggaagcttcctcttgctgcttagcctgatgagcaccacaggctgcagcgagacccatctgaagcgtgggttgggaggagactgcggcggccctgtcctctccaagctgctctccatgccgaagcgtgggctgggaggagactgcggcgccccgtcctctccaagctgctctccaggatgggagcgactttgtggggtttgtcggcccttctctgaggtgtcctgtgtctcatggatctgcttatgagcccccttagatgcctctctctcgtctggacgagcaccctccaaaacactgcctaccacccggatctcctggcgcagagtgaggtcacacctgcagcccttaccgcacagagtccctgagatattcggcaagaatgggaatgggctgtgygtgagtttccgctgcggaagccggctctgctccgtagtctgtctttggggtgtgggatgttccgacctgctgtgtccatctggagctgcctcggggtgggagggggagcagcgcggat

SEQ ID NO: 59599 - DNA, 1816 bp, Homo sapiens
tttaattttccccttgtcatatcctaccacctggcacatcattattttgtgtctgttgcatacctccccaacctaccccagtacgatgtaagctgtagaagtcagggactgtatctcctcattctctactgtatccttcattttaagaatcatccctgttatggccaggtgtggtggctctggcctgtaatcccagcactttgggaggccaaagcgggtggatcacgaggtcaggagattgagaccatcctggccaacatggtaaaaccccgtctctactaaaaatacaaatattagctgggtgtggtggtgtgtgcctgtaatcccagctactcaggaggctgaggcaggagaatcacttgaaccagggagctggaggttgcagtgagccaagatcacaccactgcactccagcctggcgacagagcgagactctgtctcaaaaaaaaaaaaaaaaaaaaatccctattacatagagggtgcttaataaatatttgttgtcaataagtgaacatctgtcaactttaagaagctacagcttcataagactagtgttgttctccattagtccccaatgcatggcagagtctggctcatgaaagacacttaaaatattaatagaagagtgaatgaacaaacaattagggtagcttattgactgtgagatgaggatcctaaaacatgtagcgaaagggtctggaaatgtgaggcagggtgatctgccacctatgaaggtcatttgagaagaacaagtcaataccccattttcagaggcccaaggttagattctgggctggaggatagacacagggttgagggaacatcctggaagtcagaagtgtggcaaagttgggcctgtaggagtgagcacttgatgctttatcccagggcattagagcctatgagctctctctggcctctgttgaggattaacattggaaacagtaggaggaagtctccattgaagtgtcaagggcttccatgcagctggagaagctgagcagtgcagaggctgggaatggcagtgtctatgcatgaggcatttcaaaggtagatttttgttttcccagggaagtttttacttgggtggtcagggggactgttagtccatggagagtttcctggcttgaactgaatgtggatccaattcttctaaagaggcactgtgccttccaacatgttttatttcagtcagtgcaggcacaactgtagtgccacattttgctgacccacctgaaatgcaaataggaagagcctgctttgcttcagaggttgcctcccctcctactctgcaagaagccaatcaataataattttactgaagacactaggttccaagggactgaatctgaagagatgtcttgatataatgaggaaaagtaaatggagggtggaggagatgccattcaaatttaaaagaacataaacaatgagttatctgtgctacatatctgagaggcagcgtgatgggaaggaaagaaagcgagctgagcactccagaccaagccttactccagaacctacagaatgtgggkctttgaaatggcacttaagatttctgagcctttttgatccaaaaaatattgtttcctatatgcttcttaaaactcaatcaagaggttaataatatttgcatagtcttttttgaaatactcacatgaatttgttaatgtaatcttctcattcattctacagagtagaaattagtgtcattctcattttatagaggaggaaagtgaagatttaaaagttgcaggagcctaccccagccctggtggtattgtggcaacccagccactcagctgtcctcctctca

SEQ ID NO: 59600 - DNA, 1301 bp, Homo sapiens
tgcattttccaatgaagcacaatatttttctacttgtgctggagartaagccaggaaaagagaaaatcctgaatctaaagaatgggggtcagagtgaccagagtgtagatgaaaagacaagtaatctcacagggttgaatcttaggggtaggaggtcaaaggtgcagttaagaggtggcagagaggcgaagaggacagcagaactgtgaagctgtgagtaatcatgggagggaaatgtaacacatggtcttggacccactaagaattggacattgttgtggcattgccagctcatctcttgggcattgagaaaaccttactccagcaatgttattccgtaattgccctgatgactagagggttatgactttccctttttgaaagtttgtgttttgagtaatctgtttagaaactccacccatagggcactggtggtggcaagacattggcttttgggggacataatttagatcaccaagtccccatttgacatttcaatcatattcttgcctttaaggttctgggtgtatctgtatcttcacatggtgaaggaattataaagcgattttgtgtcccctctgtgggcacaggatgttgcagaaataaagctgatagaaatagtcacatgagttgaccagatggcatcatcagcctcttgaatccactacatccctaatgtcattagcttggaggggcagctgccaaattaggtggggctggacattccttttaacaggtgccttcttttctaggatccaagtgagagcctaagatagtttccataatgtccaaaagcacatccttagaaaaacatgattgaattgtacaacagggactttctgactcagttccctaacccattcttagtttgtattctccatcgaaaatgtgacaatatttggcaaatataaatttgagatttccagaaaggagcagtcagaaaattaaaaaaataaataaacataaaatgaaaggaacaggttatttttgtgtaatgaaaacttgaccatttcatccctcttcttcaaacacttagtgtatactcatttcagttaggatacaatccaagctcttggacaaggaacttgttactttacttttagtcattggaacacttcataattctctgccactgcccattctctccactacacaccctggccttggcaaataccttccctctgcttgaaatagtctttcaggccctttcctgacctgattgagcctacttatttagataatcatgtcattcccagtggaagaattccctttctctaccagtctgggttaggtgtcaccat

SEQ ID NO: 59601 - DNA, 1301 bp, Homo sapiens
tgcattttccaatgaagcacaatatttttctacttgtgctggagagtaagccaggaaaagagaaaatcctgaatctaaagaatgggggtcagagtgaccagagtgtagatgaaaagacaagtaatctcacagggttgaatcttaggggtaggaggtcaaaggtgcagttaagaggtggcagagaggcgaagaggacagcagaactgtgaagctgtgagtaatcatgggagggaaatgtaacacatggtcttggacccactaagaattggacattgttgtggcattgccagctcatctcttgggcattgagaaaaccttactccagcaatgttattccgtaattgccctgatgactagagggttatgactttccctttttgaaagtttgtgttttgagtaatctgtttagaaactccacccatagggcactggtggtggcaagacattggcttttgggggacataatttagatcaccaagtccccatttgacatttcaatcatattcttgcctttaaggttctgggtgtatctgtatcttcacatggtgaaggaattataaagcgattttgtgtcccctctgtgggcacaggatgttgcagaaataaagctgatagaaatagtcacatgagttgaccagatggcatcatcagcctcttgaatccactacatccctaatgtcattagcttggaggggcagctgccaaattasgtggggctggacattccttttaacaggtgccttcttttctaggatccaagtgagagcctaagatagtttccataatgtccaaaagcacatccttagaaaaacatgattgaattgtacaacagggactttctgactcagttccctaacccattcttagtttgtattctccatcgaaaatgtgacaatatttggcaaatataaatttgagatttccagaaaggagcagtcagaaaattaaaaaaataaataaacataaaatgaaaggaacaggttatttttgtgtaatgaaaacttgaccatttcatccctcttcttcaaacacttagtgtatactcatttcagttaggatacaatccaagctcttggacaaggaacttgttactttacttttagtcattggaacacttcataattctctgccactgcccattctctccactacacaccctggccttggcaaataccttccctctgcttgaaatagtctttcaggccctttcctgacctgattgagcctacttatttagataatcatgtcattcccagtggaagaattccctttctctaccagtctgggttaggtgtcaccat

SEQ ID NO: 59602 - DNA, 602 bp, Homo sapiens
agcactgctagagactctgcagaaactctgcaactttaactggaaacctctctactgttgttgttcccttggaaaatgactatttgccacttcagctgccaaatatctcctcccaatatgttctgtgagcattcagtctgctcaaagtcttgtgtaatggtggatatatgatgmcatttgtttcaagctaggctcacatatccatctatctcaggggctacatgatttacttgccattttttaaacttttacttgtaattaacaaataataattgtatatatttatgggatacaatgtgatgttttcatatatgtatacattgtggaatgattatatcaagctaattaaattaggcatcatctcatatacttttctatactgaaaacatttaaggcctattctttcagcaattttgagatataaaagacattattgttaattatggtcaccacactgtgcaatagcattgaaaacttatttgtcatgtctaactaaaactttgtactctttgaccaacattctcccattccctgtaccccacccctctccaccccaccctctggtaaacatcactctactctctacctttataagttcaact

SEQ ID NO: 59603 - DNA, 2888 bp, Homo sapiens
  misc_feature (1)...(2888): n = A,T,C or G
acatgtacataaaattgatttatatatgtgtatataaataaacaaatatgtttgtatatatacaactgtaaaaaaaagtctcagtttttttagtataaatatatacaggaagaacagacctctattttgtatatggatatatgcactcatttattttttctatgataatagaataaagactattcaacaaatagtctaatgagccaataccatatgtcttcggaaatgcagggtgagaagatagaatctacaacatcatggaccacaaattctcatatgtttaaggtagaataatttgtattatatcaaattataaaacagatagatactcttactatttggtatatactcttccttctatacatactggtatacagattgaatattcaaattcaaatctagctatattctattttttcacttaacatttaatcatgactttttggtacttaacagtaactttactgtccttacaatttagtagtgtataatgtgccatcttatggaattattatatttatcaaactatttctcttgtttgacagttaaggatttgtcacttttttatatatgtagcagtgcaagaaacagctttgtctacagcaaaaaaagagcagttaaagagaaaggcagagcctggtatctctgttttgctgagatttgaataggattgatagttttctaaatgacttgttgtaaatgtaaagtatgtagtcctgagaaagctctttgagctcaaggatgtgtctgcatgcgtgtgtgtgtgtgtgtgtgtgtgtgtgtctgggtgtctgtgtgtagtagtagtatattacatctgatcatccaaaagatcaccctaacaattacctatgcaaatatgttgaaagtgactaatttttaatataattaaaacaaacaggttagttaaaaagataatcaaacttctgaactcaatcaaatacaagtcttactaaaagtagaccaaaacagagagagagagagagagagagagagagagatgtcttctacctcagtgatagcacacataagcagttacatgtacacacactcatccacacaacgagcaaagctttcatgaaaggggacattatcccnnnnnnnnnnnnnnnnnnnnnnnnnnnnnnnnnnnnnnnnnnnnnnnnnnnnnnnnnnnnnnnnnnnnnnnnnnnnnnnnnnnnnnnnnnnnnnnnnnnnttacctgtacacacccaccttttaccacttgatcccatttctttcattagctccaaaaccctatagtccatcattccttaaacaagttattaattttcagacctttgtttatgtttttgcttcttctcctgcatctgcccagcatttacttgtcacttaaggctcagcttaaatataatctcagtgaagtcatcactggctacctacgtacagttcatcctactctctcctatgttcccacagtattctgtgcatatctatcttacagcacttgcatcattgtataaaattactcaattatggtgcagaaaagctagttcataactagactattagcttcttgaagacagagatttcccaatttctcatattcatctttgcaggtgccaatctgtgtgtttggcatgattaccttctatcctcaatgaatgtcctaattgttaagattctataactctgactgattcactgagcttcttgatgtcacagaataaatttatcttcttaggtgtccttttacaaatattaacttatttgtagaaaggagttattatacttaagatattactagaaacatacttataaatattatgcagattcattccttatgatcaaatgcatgcgcacattggggagaaaggctgtggggaacaagaaaagaaaccaacacccactgagtgactaatgtgtcaggaagtaggtaagggtcttctacacaattaattttatttaatcttccccacaaccattagttgtgggtattgcatttttatttaatagtggcgataatgagagagatcttaacctccttgcctgcagtcacatagtgagttaccrtttgtaagtcaggttaggctaggttctgcttcactaaaaagcaacctgtaaatcaaatcatgaacatttatttctcactcactctacatgtcccatatgggttggcaggtaatctctatccatcagtcactctgggatgtcaactgacagatcagcctcataccaaatctcatcagacaccaccgttcacatgttattgctaaagccccatcagacaccaccgttcacatgttattgctaaagccccacctggccacacttaacttcaagaggccagagatgcaaaattctaacattttccccaaaaggaagatagaaagaattatctgagaaatagataataatcaccctcagggaaaaagttaaaattgagaacacagctgcctaagttcaaaattttaccactggacatttttccttcttttttcttcatttagaatgagattaaatgacattttagaaatatcatttgtaatgtatggtccttgaggaaggtgtgcagaacctctaggctggtaattctcagggtcgatgtccattaaggtcacctgcaaattccagatttctgaatacaaaaatcagaatcctctagggatggcagggaacctgcatttggaacaatctccccaggtaaccatgggttgctacatgttgaaagaacagtggtttaggactgaaggttcacctcctccgaacctcattctaagtcgccttgctgtttattacatgtttcctttctggggagttttcagttcaaaatgtaatgcacacttcctatgaacacatgatcatctcaattctcttctaaagcagagtcactgcatctcccaaatttctttgggcactggagagaa

SEQ ID NO: 59604 - DNA, 2888 bp, Homo sapiens
  misc_feature (1)...(2888): n = A,T,C or G
acatgtacataaaattgatttatatatgtgtatataaataaacaaatatgtttgtatatatacaactgtaaaaaaaagtctcagtttttttagtataaatatatacaggaagaacagacctctattttgtatatggatatatgcactcatttattttttctatgataatagaataaagactattcaacaaatagtctaatgagccaataccatatgtcttcggaaatgcagggtgagaagatagaatctacaacatcatggaccacaaattctcatatgtttaaggtagaataatttgtattatatcaaattataaaacagatagatactcttactatttggtatatactcttccttctatacatactggtatacagattgaatattcaaattcaaatctagctatattctattttttcacttaacatttaatcatgactttttggtacttaacagtaactttactgtccttacaatttagtagtgtataatgtgccatcttatggaattattatatttatcaaactatttctcttgtttgacagttaaggatttgtcacttttttatatatgtagcagtgcaagaaacagctttgtctacagcaaaaaaagagcagttaaagagaaaggcagagcctggtatctctgttttgctgagatttgaataggattgatagttttctaaatgacttgttgtaaatgtaaagtatgtagtcctgagaaagctctttgagctcaaggatgtgtctgcatgcgtgtgtgtgtgtgtgtgtgtgtgtgtgtctgggtgtctgtgtgtagtagtagtatattacatctgatcatccaaaagatcaccctaacaattacctatgcaaatatgttgaaagtgactaatttttaatataattaaaacaaacaggttagttaaaaagataatcaaacttctgaactcaatcaaatacaagtcttactaaaagtagaccaaaacagagagagagagagagagagagagagagagatgtcttctacctcagtgatagcacacataagcagttacatgtacacacactcatccacacaacgagcaaagctttcatgaaaggggacattatcccnnnnnnnnnnnnnnnnnnnnnnnnnnnnnnnnnnnnnnnnnnnnnnnnnnnnnnnnnnnnnnnnnnnnnnnnnnnnnnnnnnnnnnnnnnnnnnnnnnnnttacctgtacacacccaccttttaccacttgatcccatttctttcattagctccaaaaccctatagtccatcattccttaaacaagttattaattttcagacctttgtttatgtttttgcttcttctcctgcatctgcccagcatttacttgtcacttaaggctcagcttaaatataatctcagtgaagtcatcactggctacctacgtacagttcatcctactctctcctatgttcccacagtattctgtgcatatctatcttacagcacttgcatcattgtataaaattactcaattatggtgcagaaaagctagttcataactagactattagcttcttgaagacagagatttcccaatttctcatattcatctttgcaggtgccaatctgtgtgtttggcatgattaccttctatcctcaatgaatgtcctaattgttaagattctataactctgactgattcactgagcttcttgatgtcacagaataaatttatcttcttaggtgtccttttacaaatattaacttatttgtagaaaggagttattatacttaagatattactagaaacatacttataaatattatgcagattcattccttatgatcaaatgcatgcgcacattggggagaaaggctgtggggaacaagaaaagaaaccaacacccactgagtgactaatgtgtcaggaagtaggtaagggtcttctacacaattaattttatttaatcttccccacaaccattagttgtgggtattgcatttttatttaatagtggcgataatgagagagatcttaacctccttgcctgcagtcacatagtgagttaccgtttgtaagtcaggttaggctaggttctgcttcactaaaaagcaacctgtaaatcaaatcatgaacatttatttctcactcactctacatgtcccatatgggttggcaggtaatctctatccatcagtcactctgggatgtcaactgacagatcagcctcataccaaatctcatcagacaccaccgttcacatgttattgctaaagccccatcagacaccaccgttcacatgttattgctaaagccccacctggccacacttaacttcaagaggccagagatgcaaaattctaacattttccccaaaaggaagatagaaagaattatctgagaaatagataataatcaccctcagggaaaaakttaaaattgagaacacagctgcctaagttcaaaattttaccactggacatttttccttcttttttcttcatttagaatgagattaaatgacattttagaaatatcatttgtaatgtatggtccttgaggaaggtgtgcagaacctctaggctggtaattctcagggtcgatgtccattaaggtcacctgcaaattccagatttctgaatacaaaaatcagaatcctctagggatggcagggaacctgcatttggaacaatctccccaggtaaccatgggttgctacatgttgaaagaacagtggtttaggactgaaggttcacctcctccgaacctcattctaagtcgccttgctgtttattacatgtttcctttctggggagttttcagttcaaaatgtaatgcacacttcctatgaacacatgatcatctcaattctcttctaaagcagagtcactgcatctcccaaatttctttgggcactggagagaa

SEQ ID NO: 59605 - DNA, 1918 bp, Homo sapiens
tgcatttttaataatagtgataaaaatccaatgtctttaaacattccagttaccaaattctctagtataggattcagaaactatagcacaggagtcaaatccaacctggtacctgcttttgtaaataaagttttactagaattacagctgttctcattcatttatgtattgtttatggctgctttttcactaatatggcatagtcatgtcattgtgatagaggatgtatggaccacaaaacccaaaatatttgctatctgactttctacgaatcttaaaagtggatgctatttaagctcagaagacatttcaacatcctagtagaaagtatctgtcaaatgataaaataactggtgattttgaaatggctgggcttttcttccctataattttataacttctacacagataactccatatttctccatttaaggcagggcaccagcaatatttgctaatactaattttagctgggctgtggaatcaaaagaaaagtataagatgggagctccaaggacagctttcactgcaggatgacgatgattcttagctgttaaattacccacacatggacagtcttgtgcaggcatcttcttactctttgggtgatattaaatctgatgctgaacaattagagggcatattatgcggaaacaggtagtgggactgggtaagtgctgagttctttccaccttgaagtctgggcagagtggctgaaaaactggacattgggatgagttatgactcaagcggagaatatgtcatgaccatctgggatacctaagttacttaacttgggccacatccccactactccattctgcatcaactatttacaaactaccagggacagggaactcatcctttctaaggtacttcattccacaactgtttatttttttaaatttataagtaccgaagggcttaccttatgtatctgcgcaccctttgacccttggcattatcttgggaggttccaatagatttctcttctcacttctagtgattaaagtccagttaggttcctttgcgtcatctcctttctccctgtagcttggcctgtggggcctgcactggcacttagaggcacatgggaagaaagatgtgaatgttccttatccattggtgtttctgcctcttctccactggtgttcatggccttattaagatgggatccagattctggctctctggggtgcctatgtcagctctccttcaggccttgcggggcttccacaagtgccagttaagtgtgacttaactgtggatctctttaattgctcaggttcctcagttggctatgcatcttatatcctttgatgctgtggtcctccggctccagaccaccrtaggtagctctttgtactcaagagaggttcctttcttcattataatttgacctgtgggaattcatacattcttgtctcaccaaattgtaagggtacagatgctttctctgcctccttgccactttcctttccttcccatctgcacaggtaggcaccggcgtggagcaagctgcctatgcagatatccaatatccatgtgtggttcggagccactccctcctcttggcttcagaaaagtacagaacaacttcactggacattctattggtccaactcaagactatgacaaatttgctcttccttctacttccactcaaagtgtctttttacattgactgatatgggaagtgactaggtgcccgggctgattgtcagaaacagcagaactgctgaagtgcttttgaatgaacacccaaggaagatttctgtgattatttgtagctctatatagatgtttagggcactaatgatttcttatcttcagctttggggtctactcacaattttggagcaacaagcaaagcccaactcaagagtctgttacattgtcattgaccagcctgatcaca

SEQ ID NO: 59606 - DNA, 1918 bp, Homo sapiens
tgcatttttaataatagtgataaaaatccaatgtctttaaacattccagttaccaaattctctagtataggattcagaaactatagcacaggagtcaaatccaacctggtacctgcttttgtaaataaagttttactagaattacagctgttctcattcatttatgtattgtttatggctgctttttcactaatatggcatagtcatgtcattgtgatagaggatgtatggaccacaaaacccaaaatatttgctatctgactttctacgaatcttaaaagtggatgctatttaagctcagaagacatttcaacatcctagtagaaagtatctgtcaaatgataaaataactggtgattttgaaatggctgggcttttcttccctataattttataacttctacacagataactccatatttctccatttaaggcagggcaccagcaatatttgctaatactaattttagctgggctgtggaatcaaaagaaaagtataagatgggagctccaaggacagctttcactgcaggatgacgatgattcttagctgttaaattacccacacatggacagtcttgtgcaggcatcttcttactctttgggtgatattaaatctgatgctgaacaattagagggcatattatgcggaaacaggtagtgggactgggtaagtgctgagttctttccaccttgaagtctgggcagagtggctgaaaaactggacattgggatgagttatgactcaagcggagaatatgtcatgaccatctgggatacctaagttacttaacttgggccacatccccactactccattctgcatcaactatttacaaactaccagggacagggaactcatcctttctaaggtacttcattccacaactgtttatttttttaaatttataagtaccgaagggcttaccttatgtatctgcgcaccctttgacccttggcattatcttgggaggttccaatagatttctcttctcacttctagtgattaaagtccagttaggttcctttgcgtcatctcctttctccctgtagcttggcctgtggggcctgcactggcacttagaggcacatgggaagaaagatgtgaatgttccttatccattggtgtttctgcctcttctccactggtgttcatggccttattaagatgggatccagattctggctctctggggtgcctatgtcagctctccttcaggccttgcggggcttccacaagtgccagttaagtgtgacttaactgtggatctctttaattgctcaggttcctcagttggctatgcatcttatatcctttgatgctgtggtcctccggctccagaccaccataggtagctctttgtactcaagagaggttcctttcttcattataatttgacctgtgggaattcatacattcttgtctcaccaaattgtaagggtacagatgctttctctgcctccttgccactttcctttccttcccatctgcacaggtaggcacyggcgtggagcaagctgcctatgcagatatccaatatccatgtgtggttcggagccactccctcctcttggcttcagaaaagtacagaacaacttcactggacattctattggtccaactcaagactatgacaaatttgctcttccttctacttccactcaaagtgtctttttacattgactgatatgggaagtgactaggtgcccgggctgattgtcagaaacagcagaactgctgaagtgcttttgaatgaacacccaaggaagatttctgtgattatttgtagctctatatagatgtttagggcactaatgatttcttatcttcagctttggggtctactcacaattttggagcaacaagcaaagcccaactcaagagtctgttacattgtcattgaccagcctgatcaca

SEQ ID NO: 59607 - DNA, 1918 bp, Homo sapiens
tgcatttttaataatagtgataaaaatccaatgtctttaaacattccagttaccaaattctctagtataggattcagaaactatagcacaggagtcaaatccaacctggtacctgcttttgtaaataaagttttactagaattacagctgttctcattcatttatgtattgtttatggctgctttttcactaatatggcatagtcatgtcattgtgatagaggatgtatggaccacaaaacccaaaatatttgctatctgactttctacgaatcttaaaagtggatgctatttaagctcagaagacatttcaacatcctagtagaaagtatctgtcaaatgataaaataactggtgattttgaaatggctgggcttttcttccctataattttataacttctacacagataactccatatttctccatttaaggcagggcaccagcaatatttgctaatactaattttagctgggctgtggaatcaaaagaaaagtataagatgggagctccaaggacagctttcactgcaggatgacgatgattcttagctgttaaattacccacacatggacagtcttgtgcaggcatcttcttactctttgggtgatattaaatctgatgctgaacaattagagggcatattatgcggaaacaggtagtgggactgggtaagtgctgagttctttccaccttgaagtctgggcagagtggctgaaaaactggacattgggatgagttatgactcaagcggagaatatgtcatgaccatctgggatacctaagttacttaacttgggccacatccccactactccattctgcatcaactatttacaaactaccagggacagggaactcatcctttctaaggtacttcattccacaactgtttatttttttaaatttataagtaccgaagggcttaccttatgtatctgcgcaccctttgacccttggcattatcttgggaggttccaatagatttctcttctcacttctagtgattaaagtccagttaggttcctttgcgtcatctcctttctccctgtagcttggcctgtggggcctgcactggcacttagaggcacatgggaagaaagatgtgaatgttccttatccattggtgtttctgcctcttctccactggtgttcatggccttattaagatgggatccagattctggctctctggggtgcctatgtcagctctccttcaggccttgcggggcttccacaagtgccagttaagtgtgacttaactgtggatctctttaattgctcaggttcctcagttggctatgcatcttatatcctttgatgctgtggtcctccggctccagaccaccataggtagctctttgtactcaagagaggttcctttcttcattataatttgacctgtgggaattcatacattcttgtctcaccaaattgtaagggtacagatgctttctctgcctccttgccactttcctttccttcccatctgcacaggtaggcaccggcgtggagcaagctgcctatgcagatatccaatatccwtgtgtggttcggagccactccctcctcttggcttcagaaaagtacagaacaacttcactggacattctattggtccaactcaagactatgacaaatttgctcttccttctacttccactcaaagtgtctttttacattgactgatatgggaagtgactaggtgcccgggctgattgtcagaaacagcagaactgctgaagtgcttttgaatgaacacccaaggaagatttctgtgattatttgtagctctatatagatgtttagggcactaatgatttcttatcttcagctttggggtctactcacaattttggagcaacaagcaaagcccaactcaagagtctgttacattgtcattgaccagcctgatcaca

SEQ ID NO: 59608 - DNA, 855 bp, Homo sapiens
aaatcatttctgaactttgtaactttggtcgtgttgctttctgtgaatcagtttcttcatttaaaaaagttgttatgaggatagaacatgctagtatttataaaatgctcataaattcttggcacaaagtaagctatagactcaaaaatggtgattccagacctcaagaaataagaacttgaatttcagagaaatcttcccttattatccctgaggtccactccatagcttgatcaaagaagtgggatactatgtagtagactagtgtggcagcaccttaaacccacaaataagtttggctgttgtaaagagaagggaaaccaaaattatttcaggwcctactatgtgcagagtttttatctgctatatacataggcatatgctattccatcagtggttcagagggcataaacagttaataaagctatctcagggatgattaaattgagagttgctcagggtcatacaatttttgagtcaggaattaaacccagggctatttcattccaaggcccatgttactttctggtaaaacaaataaccatgaaatataatatattttctttgaatccctaatagtgggtgctattatacccccaattacttaaattgatcctgtacattgccaagagattaaattataaattattgagttcaaaaagttaatttcttcctccaaagagatggcatcttacagtttaattactctgacagctttttttttttattttttctcctagtgaattatcaacagaaactacctagagaaacctgtaacttcagatcttctgattaattgattttctttgggtgctgcttgacagtaacagaatggtccatggggacagtttttca

SEQ ID NO: 59609 - DNA, 1246 bp, Homo sapiens
gcataagcgcatggtgctgaggatggagtgactgagcccttgactgcagctcccttcagagactgcagtttactggctgcacacagtctggtgtggggaggacaatttttccctgtgaagcctgccaggtaaatcctttgcaattgtctgtggtagggtttgaaagatgattataggtttttggctaggagctggactcctcaccactgtctcatttcaggcctccatcacctcattttgggattattagaggtgcttttatccattctctccacttctctgaagtttttttccagcatgatccatcatgctcttgattgccagattgcttgcttctaaatcactagatcactaaatcactgtatcgttcctctactttggaatctagtatgtattatttttataccaaactcgagccactcaggtgagcatgtaaggcctttgtttgatgggcttcagtttatttatccatattttactacttcttacaaagttttctcagattttcctaagccaatgatgctcaatcaagcttgtacaacccaaggcccatggccacatgaggcccagggtggctttgaatgtggctcaacacaaatttgtaaactttcttaaaacattatgagatttttttgccgttttgttttttagatcatcagctatcgttagtgtattttatgttggcccaagacaatttttcttcttccagtgtrgaatacagaaaccaaaagattggacccccgtgctctatatcttttgtacatgacagttccttctcagctccagcctttcatactgttcttagaacatctttgactgtcaactccacctatcaagctattctttttcttttcaaactcagctaaagatatcgtctctgtgcagccactgccctgcccctcacactgattctttttgctgttgttcttgctggttcatgaattcttcagccgctatttcattgcttttgtctgtcacactactaaaatataaatacttgttcaacaaacaacttcgaattattctctagttatttattttttcttaaaaaaagggttcaattgtatccccatctaatttttaggtattaatccttcttcatcaggtattatattctgcacttcctaggtggcaggcagaatacttggtattttcatttatgtcatataatttaattttcacaaaggctcgtgagtcatgcaatatttatcatgaggtatacaagataaaaatgaatctcagaaag

SEQ ID NO: 59610 - DNA, 1246 bp, Homo sapiens
gcataagcgcatggtgctgaggatggagtgactgagcccttgactgcagctcccttcagagactgcagtttactggctgcacacagtctggtgtggggaggacaatttttccctgtgaagcctgccaggtaaatcctttgcaattgtctgtggtagggtttgaaagatgattataggtttttggctaggagctggactcctcaccactgtctcatttcaggcctccatcacctcattttgggattattagaggtgcttttatccattctctccacttctctgaagtttttttccagcatgatccatcatgctcttgattgccagattgcttgcttctaaatcactagatcactaaatcactgtatcgttcctctactttggaatctagtatgtattatttttataccaaactcgagccactcaggtgagcatgtaaggcctttgtttgatgggcttcagtttatttatccatattttactacttcttacaaagttttctcagattttcctaagccaatgatgctcaatcaagcttgtacaacccaaggcccatggccacatgaggcccagggtggctttgaatgtggctcaacacaaatttgtaaactttcttaaaacattatgagatttttttgccgttttgttttttagatcatcagctatcgttagtgtattttatgttggcccaagacaatttttcttcttccagtgtagaatacagaaaccaaaagattggacccccgtgctctatatcttttgtacatgacagttccttctcagctccagcctttcatactgttcttagaacatctttgactgtcaactccacctatcaagctattctttttcttttcaaactcagctaaagatatcgtctctgtgcagccactgccctgcccctcacactgattctttttgctgttgttcttgctggttcatgaattcttcagcygctatttcattgcttttgtctgtcacactactaaaatataaatacttgttcaacaaacaacttcgaattattctctagttatttattttttcttaaaaaaagggttcaattgtatccccatctaatttttaggtattaatccttcttcatcaggtattatattctgcacttcctaggtggcaggcagaatacttggtattttcatttatgtcatataatttaattttcacaaaggctcgtgagtcatgcaatatttatcatgaggtatacaagataaaaatgaatctcagaaag

SEQ ID NO: 59611 - DNA, 693 bp, Homo sapiens
ctgggaaacctgggatcacttggtacagaataagtgttgatttgttgataatttgggagttagagtcttagattcaagttcatctcaatagaagtgaaagcttaggaagttactgcaatctctctctgagactcagttttcacatctgtaaaatgaaaataattatggtggctaccacagaggattgttgtaaggactaaataaattattttatgtaatgtatttatcaacatgcctgatacatatttggttctccttaatgttagttactttgtttatttattcaaaaaatgtctactcttctactttcatgttataatcctttctagatattacaaattgaacagttctgcactcaaggagtctgcaatctaatataaaagataatttcacggacaartcatttaaatgagcaggacctatagtggcaagtcctggaggctgtatttgttttttgtgatgttgctcttttgattaggtgattgtaccaggtgttgctattcgattcaaagtgaaccagtcagtttatggctttagataattttgaattgacattcaaaaatgaaaattggcctctgattattacctgaattgaggacaagcacagtcagaaattatgggattcatggtcagctaattccaaaatgaatcagagaaatttgataaggtaggagtgaaaaagactgtgagtac

SEQ ID NO: 59612 - DNA, 1435 bp, Homo sapiens
tagctgcaaaatttccacaaaagacaaactttcactcatcaattatttgattattctgagatatagttcctatgggaaaagcaggttgatttattccttttgcttatttttttcaaaatattgagttgcttccttagtgttttcataggtatccaaggaatattttggggagttggagaggtacttaaccttatagattcagggatttaattatatatgatttgtttctatccagagcagatattattattattgctcaaaatgctcatctttgtccagtggaaacctcttcatgtttaytcctgagtcattctgataggaaatttgcatactatgagagcttccttactttctgttatgacaaatgttctagacttacattatgaatttcctcacccagacctgaaattagttttcttcagtgagtcctggtcctaaaagtggaaaatgacattaggataccataatcacagtactgaggtaatatctcataagttttaatggaaactccttatcattgttttctaaataatctgcaattacaactttaatttcttctttgatctaaaaagtatattttaaattttttcagttttcttcaattatctattttcatttttgttattgttttcttgaacaaagaaaacaatttttacacatttttgcttttgtggtttaatgagtttcttatgacctaacatattttaaaatattttatcagctgttgaagagaatgtattgtatctgttgtaggatccttcagttgttttatatcagttaaacaaatatacacctatattattgaaaggctgattctttgcagtttatctatacacttatgtgatagtaagaccctaaaataaaagtatcttaaacaagtccaacatttctttctctctgtctttctttctttctttctttctgcagtaaccccagaataagcaattcagggttaatatggaggtcctttccttcagaaatgctctgacatttccaaaatgttgccttatccacatcgaggagggctccccaccatgctcacatctcagccagctataaggggaaagagagcaaagtggtagacacacttcttccttttagaggaatgggcatggactagaagccacgtacaaattctgcttatatcattggaccagaacttgatcacatggccacattgagacacaagggaggctgagaaagggaatccttactttaggtaactctgttaaaatattcttaccacaaaagaagatgacaggaaatatttggagcaggggggtgaggagaagggggaggtgtcaattagcagcctctaatataaccgaaaagatgctttgtccttgaaattaaaatttttctaacatttgtagaaggggtttggtctctttcattaattttggcttttgaaacataatgattttctttgatatag

SEQ ID NO: 59613 - DNA, 1435 bp, Homo sapiens
tagctgcaaaatttccacaaaagacaaactttcactcatcaattatttgattattctgagatatagttcctatgggaaaagcaggttgatttattccttttgcttatttttttcaaaatattgagttgcttccttagtgttttcataggtatccaaggaatattttggggagttggagaggtacttaaccttatagattcagggatttaattatatatgatttgtttctatccagagcagatattattattattgctcaaaatgctcatctttgtccagtggaaacctcttcatgtttactcctgagtcattctgataggaaatttgcatactatgagagcttccttactttctgttatgacaaatgttctagacttacattatgaatttcctcacccagacctgaaattagttttcttcagtgagtcctggtcctaaaagtggaaaatgacattaggataccataatcacagtactgaggtaatatctcataagttttaatggaaactccttatcattgttttctaaataatctgcaattacaactttaatttcttctttgatctaaaaagtatattttaaattttttcagttttcttcaattatctattttcatttttgttattgttttcttgaacaaagaaaacaatttttacacatttttgcttttgtggtttaatgagtttcttatgacctaacatattttaaaatattttatcagctgttgaagagaatgtattgtatctgttgtaggatccttcagttgttttatatcagttaaacaaatwtacacctatattattgaaaggctgattctttgcagtttatctatacacttatgtgatagtaagaccctaaaataaaagtatcttaaacaagtccaacatttctttctctctgtctttctttctttctttctttctgcagtaaccccagaataagcaattcagggttaatatggaggtcctttccttcagaaatgctctgacatttccaaaatgttgccttatccacatcgaggagggctccccaccatgctcacatctcagccagctataaggggaaagagagcaaagtggtagacacacttcttccttttagaggaatgggcatggactagaagccacgtacaaattctgcttatatcattggaccagaacttgatcacatggccacattgagacacaagggaggctgagaaagggaatccttactttaggtaactctgttaaaatattcttaccacaaaagaagatgacaggaaatatttggagcaggggggtgaggagaagggggaggtgtcaattagcagcctctaatataaccgaaaagatgctttgtccttgaaattaaaatttttctaacatttgtagaaggggtttggtctctttcattaattttggcttttgaaacataatgattttctttgatatag

SEQ ID NO: 59614 - DNA, 693 bp, Homo sapiens
gagtggcataccatgatattaacggaacacaaattatttatctattctctcagtgatgaatacctgggctgtttttgcaataacagtttcatagtccagcgataactacaactgcaactgaagggtcagagggtagatatctattcagtatttttctttctttctttctttctttcttttttttttttttttttgagacagagtctcactctgttgcccaggctggagtgcagtggcgcaatctcggctcaatgcaacctctgcctcctggtttcaagggattctcctgcctcagcctcctgagtagctaggactacaggcacttgccaccaccgcccagctaattttttgtatttttagtagagaaggtttcactacgtgggcctggctggtctcgagctcctgacctcaatcaatcygcccgccttggcctcccaaagtgctaggattacaggcctatctattcagttttataggaaatcagcagacctttctttaaaggggatgaaccatttatattcccaccagtaatgtgtgagagatacagctgcaacacattcttaccaacatctgatgttgttagttttgttttattttaattttagccatgctggtgggtttgaaatggcatctcattgtggtctttcctgcttcctgtgagttgcttgaacattttttagaattccattgtaa

SEQ ID NO: 59615 - DNA, 1001 bp, Homo sapiens
catgtctttctcttctgggagctgcttcccattatagcaaacatggatcacacggctcagcccacacccccacacaagcctccagggtaccgcctccaatggccaagagggacctcgtcagggcctgagaacagagggaaagctccctctcatggcaccatctgcactgcagaggaggaaacaggaagggggagctcctagaaagcagcaagagtatcctggtataaggggtgagcttcaaggctaggaaagaagccacaggttcaagtcccaactcggcccataactcaatgtgttacctggggtaagtcagtcttggtcacaggacaactaataaaattattaaacaagtaacttgatgtaatttcagattctccttctggaaggggatggaagaggttctagtaaaaatcaactaaatcgctttaaagaaaggaaatgattcagcaaatccagacagaagatacctgggcctcagatcatttgcatagctaacctaccttcttagaagttcttttcgtcaaaagacagagacacataaatccctgtgaattggcccttttctgccctcaggcaggtacaatctcaaattcttcctaatccatgacatctcagatcctgaaaccactgcagaatgaaacagccctatggacaccctgactttagtccagtgagactgattttggacttctgacctccagaactataaaaaagtaaatctgtattattttaagccactaagtgtatggtgatttgatatagtagcaacagaaaactaacatatatgtgttaaggtgtgtcttccagaatgtcaccagaaagcagcctgaaaaagcaaccatcaccccatcatccagtaagaattctgtcatcttcagtagatccagaactggcacgcgagaccaattctagctgaataatatcatggctactaaagatgtgggagggaatggggraaacatgctggcttccctctctcactgccctgacactagatgcat

SEQ ID NO: 59616 - DNA, 758 bp, Homo sapiens
gagcaatcccaatctttctttcaggggacagccctttgtctgtttgctgaagctgagcatgtacaccctgagcctctgcttttccaaggtaaacatcctcaattcttcccaccatttcttacataaccagatttgaacgggcactgtcactcacctggattttcctaagcatgctgcctcatctagattgtccttacagcatagagtccacaaatacaaatgcggcagcccgaatgcacactaactgacactcagtaacagaaatctgttgcctctgtcatcctagctaaaatactgtgttaacatgcccacatcacccagcccctmctaaatgcagctcgtgatttggtcccaagtgtggggttcattctaaaggatcatgttgatagatacagcacctacacccagtctgtcatgttgcctcaaagtattttcatgatctttccagtttcccataatctatctgccagtctggtgaaattgctcaaagttagtgatcacattcactccaccggccacgatggttctaagctgccttcaaattgaccatcaacacatctaaccataaacacagacagttatgaattctccataatccagatcaacttctaatctcttccttttgggaaaccatgccatttgcctttggtggccatcccagtcacccaatctcacccagcgtgttttaagcaactctccatcatcctgtgaccagaaataggcacagggcttaaagttaacaaaaaagtaccagcctc

SEQ ID NO: 59617 - DNA, 608 bp, Homo sapiens
tgcaaagatctttatctctgcttcctgaggaaggctgtcaagagaagcaaatgagttagcgtacacacatgtagaggctctcatgcttacccgttctcccctcatcaagtatttatggaggacctataagatgccaggcatgagtctcattgttggggtatggaaatgacagaagtccctgccctcatgaagtgtgtgtgtgcgtgtgtgcatgcgtgtgtgtgtgcgtgcatgcgtgcgtgtgtgtgttgagggagacagagaccaaaatacagttaacccttgaacaacacgggtttaaagtgcatgagtccacaaatacacagattttctcttgcctctgccacccctgagacagcaagaccaatctctcctcctcctcagcctactcaacatgaagatgaagatgaaaacctctatgatgatctgcttctacttaatacatagtaaatatattttccttttgatgttcttaataacaatttctcctctctagtttacttcactgtaagagtacagtatataatatataacatacatacaaactacatstgaatcaactgttactgttaaagcttctggtcaacagtaggttatcaagagtcaaa

SEQ ID NO: 59618 - DNA, 897 bp, Homo sapiens
tgcatacacacacacgagtgcatctaataactggtgaaatctgaataagctctatgggttgtagcaatgtcayttgattgttttcgatattataatatagttgcataagatgttaatgatggaggaggctgggtaaagggtgcattgttcttccctacgcatttctttgcaacctcctgtgaatctatcattatttcaaaaaaaatttttttaagtatttaggaattgtctacattgtgctgtgcattttcttcctttgtatttgtctcctcatttacctccctacttctgccctgttttaggcccttcccacctgtctctgacttgtctattctgtctcaaatgtatcttccatgctcctatcagagggatcttttaaaccaatgcttcttaaactctaccatacaaatgggccacctgggatcttgttaaagtgcaggttctgattcagtttgtctcggggacttgggattctgcatttctaacaagttcccagctgatgccagtgtagctggtcctggctcatactttgagtagcaaggatcttaagtaattttctttcatggtatacccatacttaaatccatctagttgattctgattgttcacagaataaagttcagtcagagcatgtacctctttgctcaaaagtctctaatgacaccccagtgaccctcagaataaaatccaaatgctttacaattacctacaaggtcctgcaagaccttccccaccctgaaactctctgaccccagctcctatcactctctccttttccactccacctctagcttccagatgtcctaaatgctaacactggcatgaatgcacagtagtttattttccctccttgctgtatattgccccttctaggtctttctcccctttgtttcttat

SEQ ID NO: 59619 - DNA, 897 bp, Homo sapiens
tgcatacacacacacgagtgcatctaataactggtgaaatctgaataagctctatgggttgtagcaatgtcatttgattgttttcgatattataatatagttgcataagatgttaatgatggaggaggctgggtaaagggtgcattgttcttccctacgcatttctttgcaacctcctgtgaatctatcattatttcaaaaaaaatttttttaagtatttaggaattgtctacaytgtgctgtgcattttcttcctttgtatttgtctcctcatttacctccctacttctgccctgttttaggcccttcccacctgtctctgacttgtctattctgtctcaaatgtatcttccatgctcctatcagagggatcttttaaaccaatgcttcttaaactctaccatacaaatgggccacctgggatcttgttaaagtgcaggttctgattcagtttgtctcggggacttgggattctgcatttctaacaagttcccagctgatgccagtgtagctggtcctggctcatactttgagtagcaaggatcttaagtaattttctttcatggtatacccatacttaaatccatctagttgattctgattgttcacagaataaagttcagtcagagcatgtacctctttgctcaaaagtctctaatgacaccccagtgaccctcagaataaaatccaaatgctttacaattacctacaaggtcctgcaagaccttccccaccctgaaactctctgaccccagctcctatcactctctccttttccactccacctctagcttccagatgtcctaaatgctaacactggcatgaatgcacagtagtttattttccctccttgctgtatattgccccttctaggtctttctcccctttgtttcttat

SEQ ID NO: 59620 - DNA, 1344 bp, Homo sapiens
tgtagtcctagctacgcaggaggctgaggcgggaggattgcttgagcttgggaggtcgaggctgcaatgagccatgaaggcaccactgcactccagccttggcgacagagtgagactctatcttttaaaataacaaaaaacaggccaggcatggtggctcatgtctgtaatcccagcactttgggaggctgaggtgggtggatcacctgaggtcaggagttcgagaccagcctggccaacatggcaaaaccctgtctytactaaaaattcaaaaattagccggacatggtggtgggtacctgtaatcccagctactcaggaggctgaggcaggagaatcacttgaacctgggaggcaaaggttgcagtgagccaagattgcgccattgcactccagcctgggcaacaagagtgaaacttcgtctccaaaggaaaagaaaaaaaaaaaaaacagggagtcatttaaatttcagttggccaattataaaatttttcttctaattattcgcttttggacaatctttatggataaaagaaagttattaggaatactaaagctaatggaactagtaatagataacatgcctggtgtatacattaacaatcatttaatgttaatattgttaagatttttattagttatctttaagtctttagtaacaaggaactgagttgccggtaactaatctcatgactggatgggacccaaaacaaataaaaggtaaaaataagcaagccaacacaagagacgaaatgctcttgtataattcccagtaagtctcaacctcaggctcttctaaagcaggaaagaagttgagttacttccctctcacataaccctgtgttcttttctcaattttggaaaataagtggcttcaatcattcactttaagttaaatgtgctcatcccttcagtaaatgtttatcttggactccaaggaacagattgctgaagtaggtgccaggtgagcagagaggggaccagcttcatccttgcctttgggcagctcattctccaggagggaagactgaaacgtacactagcacctcatccaccagattgcgagctttaaccgagatataagtgtcttttttttttttctgagagaaggtctggctttgttacccaggctgcagtgcagtggcacgattatagctcagtgcagcctcaacctcccaaactcaaacaatcctcccacctcagcctcctaagtagctgggactacggcatgtgccaccacgcccagcttgaatctgtcttaggccatctttgcctagcacatgactagcacagtggacataactcagtgttcaataaacattccataactgactaattaaataa

SEQ ID NO: 59621 - DNA, 1173 bp, Homo sapiens
cttttagtttgattggatgttttgttttattgggagaaaggaggtacagactttttttaatgaggaattaggtttaagagtctgcttaagccgggtacggtggttcatgcctgtaatcccagaactttgggaggctgaggcgggcagaacacgaggtcaggagatcgggaccatcccagctaacacggtgacaccccatctctactaaaaatacaaaaaattagccgggcgtggtggggggcgcctgtagtcccagctactcgggaggctgaggcaggagaatggcgtgagcccgggaggcggagctttcagtgagccgatattgcaccactgcactccagcctgggtgacagagcgagactctgtctcaaaaaaaaaaaaaaaaaaaaaacgagtctgcttaaatttgttcatgtaaattcctataaaaattataatctactttataatatatccatgcttgttttaatataacaagtctattttaaattctttgcaagttaaattatttaataatccctcacataaaaacatttttagttatgattgaccctttagatgtatagaagatgtaaactatttctacagtgggatggacactcatgatatgatattactaattatctggggtagaagttgcgtgtctaaaaaatatttttttcaactttactgaggcataattgacaaattaaaattcgacatgttgaagatatacagtgtaacgatttgacataagaatacaatgtgaaatgattaccacaatcaaatcaattaatgtatcaattccatcacatagtgactgtttgtgtgtgtgtgtgtgtgtgtgtgtatgtctgtgtatagggggtgtaaggacacaaacaacattaaaagtgcagcattcacagctgaaatctagaggagtaatggatgccttcamccaagatgttggccatcagcccagcggctacattaggtaagcactgtgtttggtttggccattgtggttggctggcacacagctttcatattttaaggggcaatcggtttgaaaggtcaatgtaactaagccactgttgaggctggacatagtacaagagcttagcacctatggtctgatgttaactttacacttttatgttgcctggtccctgggagtatttaagtttgaaatttctggtttagaatctccca

SEQ ID NO: 59622 - DNA, 640 bp, Homo sapiens
acttctagatgatgaaaaacatattgacaacaataactgttgaatcctaatacgcaccagctaaagtgataacaggaaaaccaagaatccaaaggaatgtcccagaggcaaaaggaagcggttgttaccaaaaggaaaacacaatgtaagcgtcccaagtaaacaacaaggtaggagtagggtgagggcaataaccaaccacatgaaggtcattgggttttgacaaaagcagttcaacggagtttgrgacaaaagctagactttaacaagatgagggtgaatggaaatgaagaactggagacatgtttgtagagagaactagctctagaagttacactttaaataaaggctagagaaataggacagatgcagaaaagataggtgtgatcaagggaaggatatattttgtttttgttgacgttttgtcatttattattgcttttctagatggaggaggtgaaagccttttggatttggatggaaatgatccaggagatagagggaaggttcagaagagaggaaagataaccagtgtaggaaagtggttgcagaggttgtaacaggtggaagaaaaaagatgagcacaatgcagggaaggttagaagactttgtggtggaaaaatacaggagaaaatggaag

SEQ ID NO: 59623 - DNA, 640 bp, Homo sapiens
acttctagatgatgaaaaacatattgacaacaataactgttgaatcctaatacgcaccagctaaagtgataacaggaaaaccaagaatccaaaggaatgtcccagaggcaaaaggaagcggttgttaccaaaaggaaaacacaatgtaagcgtcccaagtaaacaacaaggtaggagtagggtgagggcaataaccaaccacatgaaggtcattgggttttgacaaaagcagttcaacggagtttgagacaaaagctagactttaacaagatgagggtgaatrgaaatgaagaactggagacatgtttgtagagagaactagctctagaagttacactttaaataaaggctagagaaataggacagatgcagaaaagataggtgtgatcaagggaaggatatattttgtttttgttgacgttttgtcatttattattgcttttctagatggaggaggtgaaagccttttggatttggatggaaatgatccaggagatagagggaaggttcagaagagaggaaagataaccagtgtaggaaagtggttgcagaggttgtaacaggtggaagaaaaaagatgagcacaatgcagggaaggttagaagactttgtggtggaaaaatacaggagaaaatggaag

SEQ ID NO: 59624 - DNA, 504 bp, Homo sapiens
cagtgtgactatgaaatggagcccaccgacacttgtgctactatccaacartgattttaaaatacaaagctgggcatggtggctcaagcctgtaatcccagcactttggcaggctgaggcaggcggatcaccttagttcaggagttggagaatagcctggccaacacggtgaaaccccatctctactaaaaatacaaaattagccaggtgtggtggcacatgcctgtcatcccagctacttgggaggctgaggcaggagaattgatgaatcagggaagcggaggttgcagtgagcggagattgtgccattgcactccaacctgggcaaaaaagagcaaaactccatctcaaaataataataatattaataataatacaaataatgaataaggacacagaaaatttctgtgaggggattggaaatacaaatgtagttaagcacaagtgagttaaggaattctgtgtacatctctttgtagccctttggatgtgagctcccttggg

SEQ ID NO: 59625 - DNA, 504 bp, Homo sapiens
cagtgtgactatgaaatggagcccaccgacacttgtgctactatccaacagtgattttaaaatacaaagctgggcayggtggctcaagcctgtaatcccagcactttggcaggctgaggcaggcggatcaccttagttcaggagttggagaatagcctggccaacacggtgaaaccccatctctactaaaaatacaaaattagccaggtgtggtggcacatgcctgtcatcccagctacttgggaggctgaggcaggagaattgatgaatcagggaagcggaggttgcagtgagcggagattgtgccattgcactccaacctgggcaaaaaagagcaaaactccatctcaaaataataataatattaataataatacaaataatgaataaggacacagaaaatttctgtgaggggattggaaatacaaatgtagttaagcacaagtgagttaaggaattctgtgtacatctctttgtagccctttggatgtgagctcccttggg

SEQ ID NO: 59626 - DNA, 504 bp, Homo sapiens
cagtgtgactatgaaatggagcccaccgacacttgtgctactatccaacagtgattttaaaatacaaagctgggcatggtggctcaagcctgtaatcccagcactttggcaggctgaggcaggcggatcaccttagktcaggagttggagaatagcctggccaacacggtgaaaccccatctctactaaaaatacaaaattagccaggtgtggtggcacatgcctgtcatcccagctacttgggaggctgaggcaggagaattgatgaatcagggaagcggaggttgcagtgagcggagattgtgccattgcactccaacctgggcaaaaaagagcaaaactccatctcaaaataataataatattaataataatacaaataatgaataaggacacagaaaatttctgtgaggggattggaaatacaaatgtagttaagcacaagtgagttaaggaattctgtgtacatctctttgtagccctttggatgtgagctcccttggg

SEQ ID NO: 59627 - DNA, 1149 bp, Homo sapiens
cagtggctcatgcctggaatcccagcactttgggaggccaaggtgggtggatcaccagaggtcaggagtttgagactagtctgaccaacacggtgaaaccccatctctactaaaaatacaaaaatgagctgggcatggtggcaggcatctgtaatcccagccacttgggaggctgatgcaggagaatcacttgaacccagaggtggaggttgcagtgagttgagatcacaccattgcactccagcctggtagacaaaagcgagactccatctcaaaaaaggaaataaataaataaacattgattttcttcatgatgtctacaattattccaaaatattaaattagccaggaacagtggcttgtgcctattatccaagcactttgtgaggctgaggcaggaggatcccttaaggccaggagatmgaggctgcagtgagctataattgcaccagtgcactccagtttaggcaacagaagaagaccttgtctccaccaataaataaaataaaaactaaattataatatcccttgaaagcaaacagaagaaatcctctatttcaggcagtaaatatgaggcagacagtagatgtaagggatgctccccaaactgggcactctgttaatgacaaaacagagaccagaatccacattcccaacactcaatccagcgccagacccacaaaaccatttggtttttgtgaaaacactgaattttcccaaaataaaacccaaactatcactaacagatattttagatggtcagtcttcatccttgtcttcattcaatgctcattcctccttttactgcaaaaacaaaaggtggctaaaagagtattccagggagatcctgccacagagttgaacttcatcttctccttggatgttaataagttttctttgagacgaagaagtacaagaaaaatgggctacacttgctcataaatttcaggcagatgcaaaccctgttcccaggctcaacaggccagctctgcttttttgctagagatgaacacagctcctgtacctctacatttagacccaagagtttccctaataggacacatgaaaagagccaaaagacatgtttctctttttcatcaaaattaaaatcctcacatgcaaaggcaccctttgtttccaaagcccttt

SEQ ID NO: 59628 - DNA, 1149 bp, Homo sapiens
cagtggctcatgcctggaatcccagcactttgggaggccaaggtgggtggatcaccagaggtcaggagtttgagactagtctgaccaacacggtgaaaccccatctctactaaaaatacaaaaatgagctgggcatggtggcaggcatctgtaatcccagccacttgggaggctgatgcaggagaatcacttgaacccagaggtggaggttgcagtgagttgagatcacaccattgcactccagcctggtagacaaaagcgagactccatctcaaaaaaggaaataaataaataaacattgattttcttcatgatgtctacaattattccaaaatattaaattagccaggaacagtggcttgtgcctattatccaagcactttgtgaggctgaggcaggaggatcccttaaggccaggagatcgaggctgcagtgagctataaytgcaccagtgcactccagtttaggcaacagaagaagaccttgtctccaccaataaataaaataaaaactaaattataatatcccttgaaagcaaacagaagaaatcctctatttcaggcagtaaatatgaggcagacagtagatgtaagggatgctccccaaactgggcactctgttaatgacaaaacagagaccagaatccacattcccaacactcaatccagcgccagacccacaaaaccatttggtttttgtgaaaacactgaattttcccaaaataaaacccaaactatcactaacagatattttagatggtcagtcttcatccttgtcttcattcaatgctcattcctccttttactgcaaaaacaaaaggtggctaaaagagtattccagggagatcctgccacagagttgaacttcatcttctccttggatgttaataagttttctttgagacgaagaagtacaagaaaaatgggctacacttgctcataaatttcaggcagatgcaaaccctgttcccaggctcaacaggccagctctgcttttttgctagagatgaacacagctcctgtacctctacatttagacccaagagtttccctaataggacacatgaaaagagccaaaagacatgtttctctttttcatcaaaattaaaatcctcacatgcaaaggcaccctttgtttccaaagcccttt

SEQ ID NO: 59629 - DNA, 1149 bp, Homo sapiens
cagtggctcatgcctggaatcccagcactttgggaggccaaggtgggtggatcaccagaggtcaggagtttgagactagtctgaccaacacggtgaaaccccatctctactaaaaatacaaaaatgagctgggcatggtggcaggcatctgtaatcccagccacttgggaggctgatgcaggagaatcacttgaacccagaggtggaggttgcagtgagttgagatcacaccattgcactccagcctggtagacaaaagcgagactccatctcaaaaaaggaaataaataaataaacattgattttcttcatgatgtctacaattattccaaaatattaaattagccaggaacagtggcttgtgcctattatccaagcactttgtgaggctgaggcaggaggatcccttaaggccaggagatcgaggctgcagtgagctataattgcaccagtgcactccagtttaggcaacagaagaagaccttgtctccaccaataaataaaataaaaaytaaattataatatcccttgaaagcaaacagaagaaatcctctatttcaggcagtaaatatgaggcagacagtagatgtaagggatgctccccaaactgggcactctgttaatgacaaaacagagaccagaatccacattcccaacactcaatccagcgccagacccacaaaaccatttggtttttgtgaaaacactgaattttcccaaaataaaacccaaactatcactaacagatattttagatggtcagtcttcatccttgtcttcattcaatgctcattcctccttttactgcaaaaacaaaaggtggctaaaagagtattccagggagatcctgccacagagttgaacttcatcttctccttggatgttaataagttttctttgagacgaagaagtacaagaaaaatgggctacacttgctcataaatttcaggcagatgcaaaccctgttcccaggctcaacaggccagctctgcttttttgctagagatgaacacagctcctgtacctctacatttagacccaagagtttccctaataggacacatgaaaagagccaaaagacatgtttctctttttcatcaaaattaaaatcctcacatgcaaaggcaccctttgtttccaaagcccttt

SEQ ID NO: 59630 - DNA, 1149 bp, Homo sapiens
cagtggctcatgcctggaatcccagcactttgggaggccaaggtgggtggatcaccagaggtcaggagtttgagactagtctgaccaacacggtgaaaccccatctctactaaaaatacaaaaatgagctgggcatggtggcaggcatctgtaatcccagccacttgggaggctgatgcaggagaatcacttgaacccagaggtggaggttgcagtgagttgagatcacaccattgcactccagcctggtagacaaaagcgagactccatctcaaaaaaggaaataaataaataaacattgattttcttcatgatgtctacaattattccaaaatattaaattagccaggaacagtggcttgtgcctattatccaagcactttgtgaggctgaggcaggaggatcccttaaggccaggagatcgaggctgcagtgagctataattgcaccagtgcactccagtttaggcaacagaagaagaccttgtctccaccaataaataaaataaaaactaaattataatatcccttgaaagcaaacagaagaaatcctctatttcaggcagtaaatatgaggcagacagtagatgtaagggatgctccccaaactgggcactctgttaatgacaaaacagagaccagaatccacattcccaacactcaatccagcgccagacccacaaaaccatttggtttttgtgaaaacactgaattttcccaaaataaaacccaaactatcactaacagatattttagatggtcagtcttcatccttgtcttcattcaatgctcattcctccttttactgcaaaaacaaaaggtggctaaaagagtattccagggagatcctgccacagagttgaacttcaycttctccttggatgttaataagttttctttgagacgaagaagtacaagaaaaatgggctacacttgctcataaatttcaggcagatgcaaaccctgttcccaggctcaacaggccagctctgcttttttgctagagatgaacacagctcctgtacctctacatttagacccaagagtttccctaataggacacatgaaaagagccaaaagacatgtttctctttttcatcaaaattaaaatcctcacatgcaaaggcaccctttgtttccaaagcccttt

SEQ ID NO: 59631 - DNA, 1440 bp, Homo sapiens
gcttttctctttgtggtgttcaaagaaagagtattatttttttctctaaattgacctataacctacttattttgaagatgtccaggctgcaggagatctctacccatctacccagaaggcatcagcccttgcttcagtaccttctcattccactctgtcactaaatgtttatgacctcaagaaaatttgaagaagcataagcaagtgcaattccattggtaccagggctgtaagggtggggccagatgggtgaacctcactggggataaatagaaattgtgtacaagatggacatttcaaggttggtttcaagaaacacagggaaagctaactttcataggtgacagtatgcacaagttaagcttcctaacagccacaagttcacaggttcttctatctaaatgtggcaatgtgtgacgatgtctgaatggccataatacacatacatagagtaatttatagcattcatttttgtattagaaattgtgcatttcagccacaagttttttrtacatgatggatagtcccacattgcttgaagattggaagagagagcactttatgaaatgtccttttggacacattttcattgacgtttctatgtcccaagaggcaatgagacaagtcatgataaactggccgtgtcttctggggttacacctgaacttctcggtgtcaggaccgaggaaatcaaggacacagatatgccaaaggtgaggttagagcaaaagtttaatgggtgagaaaaagagaacagctctctgctgcagagagggatccagaaaaaaagagttgccattctgcagtgaaatacaagtgtttttatagatgagctagtgggagggggtatgttatccacatagggcatgaaaaactggttaggaccaggtgtgtcatctgcttagagcatgaatctctggcagctcacaccccaaccttttattatgcaggcagattctcagcctgagctactccaagttgcttatctcttttctactgtgcatatgctacaaagaggggtggggccccccatgttggatatgtctggcccaaggtggtcatttctacccatgcagctgcaggcatccctgcccacacaagcttccagcttccttttgtatgattgcagcccaattttccaggctgctctttgttaaagagaagtgaattcctgggttgctttctgttagaagggacgttctgttgagaactctttgctctatctgcctagctagtttctttctacatctgctctcaatgacaattattcagttttaatggggtcctgggggtgggaacagataaatttgagaccacaaagtaccttagaataagaattcaccctttagtcagctttagtgtgagttgcacatctattataatattggcttcatgcactactgaatataacaagaagggaaaatgtgtatcttttaaaaa

SEQ ID NO: 59632 - DNA, 1440 bp, Homo sapiens
gcttttctctttgtggtgttcaaagaaagagtattatttttttctctaaattgacctataacctacttattttgaagatgtccaggctgcaggagatctctacccatctacccagaaggcatcagcccttgcttcagtaccttctcattccactctgtcactaaatgtttatgacctcaagaaaatttgaagaagcataagcaagtgcaattccattggtaccagggctgtaagggtggggccagatgggtgaacctcactggggataaatagaaattgtgtacaagatggacatttcaaggttggtttcaagaaacacagggaaagctaactttcataggtgacagtatgcacaagttaagcttcctaacagccacaagttcacaggttcttctatctaaatgtggcaatgtgtgacgatgtctgaatggccataatacacatacatagagtaatttatagcattcatttttgtattagaaattgtgcatttcagccacaagttttttgtacatgatggatagtcccacattgcttgaagattggaagagagagcactttatgaaatgtccttttggacacattttcattgacgtttctatgtcccaagaggcaatgagacaagtcatgataaactggccgtgtcttctggggttacacctgaacttctyggtgtcaggaccgaggaaatcaaggacacagatatgccaaaggtgaggttagagcaaaagtttaatgggtgagaaaaagagaacagctctctgctgcagagagggatccagaaaaaaagagttgccattctgcagtgaaatacaagtgtttttatagatgagctagtgggagggggtatgttatccacatagggcatgaaaaactggttaggaccaggtgtgtcatctgcttagagcatgaatctctggcagctcacaccccaaccttttattatgcaggcagattctcagcctgagctactccaagttgcttatctcttttctactgtgcatatgctacaaagaggggtggggccccccatgttggatatgtctggcccaaggtggtcatttctacccatgcagctgcaggcatccctgcccacacaagcttccagcttccttttgtatgattgcagcccaattttccaggctgctctttgttaaagagaagtgaattcctgggttgctttctgttagaagggacgttctgttgagaactctttgctctatctgcctagctagtttctttctacatctgctctcaatgacaattattcagttttaatggggtcctgggggtgggaacagataaatttgagaccacaaagtaccttagaataagaattcaccctttagtcagctttagtgtgagttgcacatctattataatattggcttcatgcactactgaatataacaagaagggaaaatgtgtatcttttaaaaa

SEQ ID NO: 59633 - DNA, 1440 bp, Homo sapiens
gcttttctctttgtggtgttcaaagaaagagtattatttttttctctaaattgacctataacctacttattttgaagatgtccaggctgcaggagatctctacccatctacccagaaggcatcagcccttgcttcagtaccttctcattccactctgtcactaaatgtttatgacctcaagaaaatttgaagaagcataagcaagtgcaattccattggtaccagggctgtaagggtggggccagatgggtgaacctcactggggataaatagaaattgtgtacaagatggacatttcaaggttggtttcaagaaacacagggaaagctaactttcataggtgacagtatgcacaagttaagcttcctaacagccacaagttcacaggttcttctatctaaatgtggcaatgtgtgacgatgtctgaatggccataatacacatacatagagtaatttatagcattcatttttgtattagaaattgtgcatttcagccacaagttttttgtacatgatggatagtcccacattgcttgaagattggaagagagagcactttatgaaatgtccttttggacacattttcattgacgtttctatgtcccaagaggcaatgagacaagtcatgataaactggccgtgtcttctggggttacacctgaacttctcggtgtcaggaccgaggaaaycaaggacacagatatgccaaaggtgaggttagagcaaaagtttaatgggtgagaaaaagagaacagctctctgctgcagagagggatccagaaaaaaagagttgccattctgcagtgaaatacaagtgtttttatagatgagctagtgggagggggtatgttatccacatagggcatgaaaaactggttaggaccaggtgtgtcatctgcttagagcatgaatctctggcagctcacaccccaaccttttattatgcaggcagattctcagcctgagctactccaagttgcttatctcttttctactgtgcatatgctacaaagaggggtggggccccccatgttggatatgtctggcccaaggtggtcatttctacccatgcagctgcaggcatccctgcccacacaagcttccagcttccttttgtatgattgcagcccaattttccaggctgctctttgttaaagagaagtgaattcctgggttgctttctgttagaagggacgttctgttgagaactctttgctctatctgcctagctagtttctttctacatctgctctcaatgacaattattcagttttaatggggtcctgggggtgggaacagataaatttgagaccacaaagtaccttagaataagaattcaccctttagtcagctttagtgtgagttgcacatctattataatattggcttcatgcactactgaatataacaagaagggaaaatgtgtatcttttaaaaa

SEQ ID NO: 59634 - DNA, 1408 bp, Homo sapiens
aaaatagaattgtttgaaaattaatatttcaggaactattttttaattaagtcgaattttattttatttcatttcaggagggttttaacttaaaaatatatatatacatatatatgtatatgtgtgtgtgtgtgtatatacatatatatatatatatatatatatatattttttttttttttttcctgagacagagtcttgctctgtcacccaggctggagtgcattggcatgatcttggcctcactgcagcctccaccctcctggctcaagcaattctcctgccttagcctcccaagtagctgggactacaggtgcccaccaccacatctggctaatttttatatttttagtagagatggggtttcaccatgttgtccaggctggttttgaactcctgatctcaaatgatctgccctccttggcctcccaaagtgctgggattacaggcgtgagcccccgtgcctggcctaaaaaatatttttaaagacaggatctagctatgttgcctcagctggtcttgaactcccagtcttggcctcaagtgatccttctgcctcagccttctgagtagctggaagcacagctgtgagccagcacacatggcttttttttatttctaataaaaaaattaatagagtttcttgtttcactggacaaaatatgcatacataggaaggaaagactttttgacttcagattgcgctgaagaagaaaaatggaaaaattaggcattttagtctctcagtgtgttatttttgtaggttatacagatgtctttttaaagtttctttagaaagctttattgagataaagataaatgagataaattcacctaccatgaaatcaaccccttgagtgcagaattttatggtttataatatgttcacagaatcacacaaacaagacaggtgtctagatactttcagaccattttcatcagtccacaagaaatcccatacccattagcagtcatccttattcccttttccyctcgtccctggcaataactagcttactttctgtctctgagtttagctcttctggagatttcacagaatgaaatcttactacatatggtcttttgtgattgacttatttcacttggcacagtgttttcaaggtttatccatgctgtagcgtatatcagcacttcactcttttctaatgctgagtaatcttttgaatggatataccatattttatcagttcctctgttgataggcacttgagttttttttccaatttttggctattatgaacaatgctgctatgaacatttgtgtacaaattttagtgtggatgtatattttcatttcccttgggtatatccctaaggaatagactatctgggtcatctgataattgtttaagaatacaggcacatgcaaccacacctggcaaatatt

SEQ ID NO: 59635 - DNA, 736 bp, Homo sapiens
attttctgtagatataggtctcactgtgttgcctagtctggtttcaaactcctggcctcaagggatcctccccacttggcttcccaaagtgctaggattacaggtgtaagtgaccatgccgggacaagaacatgagacttctcttaccattttttyatatctaagtggaatagcatagtattatgtgtcagtgttgaattattttaaaatattatgcactgaaacatggtaataatctgggtcagtttctatcttgacctaggtttaaacatattagctaacatgaggggcccaaaattaataatgattccataccatctccttgtttatttattcattgagacagagttttgatctctcacaaaggttggagtgcagtagcaccatcttggctcactacaacctccacctcctgtgttcaagtgattctcctgccttagcctcctgagtagctaggattacgcccaccaccacaaccagctaacttttgtatttttagtacagataaagtttcaccaggttggccaggttggtcttgaactcctgatctcaagtgatccgcggccttggcctcccaaagtgttgtcattataggcgtgagccactgcctccagccaccatctcctttcattaaaaatatgtgagctgaaaataatttgagggcagttattttcatatagtcattttatcaaacggattatattaatgactagtattaatatttattttatctaaa

SEQ ID NO: 59636 - DNA, 736 bp, Homo sapiens
attttctgtagatataggtctcactgtgttgcctagtctggtttcaaactcctggcctcaagggatcctccccacttggcttcccaaagtgctaggattacaggtgtaagtgaccatgccgggacaagaacatgagacttctcttaccatttttttatatctaagtggaatagcatagtattatgtgtcagtgttgaattattttaaaatattatgcactgaaacatggtaataatctgggtcagtttctatcttgacctaggtttaaacatattagctaacatgaggggcccaaaattaataatgattccataccatctccttrtttatttattcattgagacagagttttgatctctcacaaaggttggagtgcagtagcaccatcttggctcactacaacctccacctcctgtgttcaagtgattctcctgccttagcctcctgagtagctaggattacgcccaccaccacaaccagctaacttttgtatttttagtacagataaagtttcaccaggttggccaggttggtcttgaactcctgatctcaagtgatccgcggccttggcctcccaaagtgttgtcattataggcgtgagccactgcctccagccaccatctcctttcattaaaaatatgtgagctgaaaataatttgagggcagttattttcatatagtcattttatcaaacggattatattaatgactagtattaatatttattttatctaaa

SEQ ID NO: 59637 - DNA, 736 bp, Homo sapiens
attttctgtagatataggtctcactgtgttgcctagtctggtttcaaactcctggcctcaagggatcctccccacttggcttcccaaagtgctaggattacaggtgtaagtgaccatgccgggacaagaacatgagacttctcttaccatttttttatatctaagtggaatagcatagtattatgtgtcagtgttgaattattttaaaatattatgcactgaaacatggtaataatctgggtcagtttctatcttgacctaggtttaaacatattagctaacatgaggggcccaaaattaataatgattccataccatctccttgtttatttattcattgagacagagttttgatctctcacaaaggttggagtgcagtagcacsatcttggctcactacaacctccacctcctgtgttcaagtgattctcctgccttagcctcctgagtagctaggattacgcccaccaccacaaccagctaacttttgtatttttagtacagataaagtttcaccaggttggccaggttggtcttgaactcctgatctcaagtgatccgcggccttggcctcccaaagtgttgtcattataggcgtgagccactgcctccagccaccatctcctttcattaaaaatatgtgagctgaaaataatttgagggcagttattttcatatagtcattttatcaaacggattatattaatgactagtattaatatttattttatctaaa

SEQ ID NO: 59638 - DNA, 736 bp, Homo sapiens
attttctgtagatataggtctcactgtgttgcctagtctggtttcaaactcctggcctcaagggatcctccccacttggcttcccaaagtgctaggattacaggtgtaagtgaccatgccgggacaagaacatgagacttctcttaccatttttttatatctaagtggaatagcatagtattatgtgtcagtgttgaattattttaaaatattatgcactgaaacatggtaataatctgggtcagtttctatcttgacctaggtttaaacatattagctaacatgaggggcccaaaattaataatgattccataccatctccttgtttatttattcattgagacagagttttgatctctcacaaaggttggagtgcagtagcaccatcttggctcactacaacctccacctcctgtgttcaagtgattctcctgccttagcctccygagtagctaggattacgcccaccaccacaaccagctaacttttgtatttttagtacagataaagtttcaccaggttggccaggttggtcttgaactcctgatctcaagtgatccgcggccttggcctcccaaagtgttgtcattataggcgtgagccactgcctccagccaccatctcctttcattaaaaatatgtgagctgaaaataatttgagggcagttattttcatatagtcattttatcaaacggattatattaatgactagtattaatatttattttatctaaa

SEQ ID NO: 59639 - DNA, 736 bp, Homo sapiens
attttctgtagatataggtctcactgtgttgcctagtctggtttcaaactcctggcctcaagggatcctccccacttggcttcccaaagtgctaggattacaggtgtaagtgaccatgccgggacaagaacatgagacttctcttaccatttttttatatctaagtggaatagcatagtattatgtgtcagtgttgaattattttaaaatattatgcactgaaacatggtaataatctgggtcagtttctatcttgacctaggtttaaacatattagctaacatgaggggcccaaaattaataatgattccataccatctccttgtttatttattcattgagacagagttttgatctctcacaaaggttggagtgcagtagcaccatcttggctcactacaacctccacctcctgtgttcaagtgattctcctgccttagcctcctgagtagctaggattacgccyaccaccacaaccagctaacttttgtatttttagtacagataaagtttcaccaggttggccaggttggtcttgaactcctgatctcaagtgatccgcggccttggcctcccaaagtgttgtcattataggcgtgagccactgcctccagccaccatctcctttcattaaaaatatgtgagctgaaaataatttgagggcagttattttcatatagtcattttatcaaacggattatattaatgactagtattaatatttattttatctaaa

SEQ ID NO: 59640 - DNA, 2145 bp, Homo sapiens
ggatacaacttctggatgaggtcataggcgtgccggtagttctgggtgaggaagcagagggacaccgtggtgactgggttgtggcaccaggagcggtacaggcagcagaacaggttctggctctcctgtgggggaacaggcatgagccgtgaggacacgcctgctccttgcccctacccggtccacgtggggacctgagggaagggccacaggtctaagtcccaggggccttcagtcgggggcagccagagccagcttagcaccccggctgggaacgagccgtcacaaaggaaatgctgacagctccttcgcagaccctgtcattacctcccagtcccagagctgtgtggtggctgcgagggcctggctgggagtggctgtcctttgtgctggcatgtctgcccttggcaaaatcacagtaattgtcccccctccccaccccaaagaactctgtggtcccggagccccatggggctgggatgatgatgggggagtgggcagggaagggaggaagcacacttaaatgccatctcctccccacctctgcagtccacttcgaacacttggaaaccacccaggaacccagcccacacttgggggagcccttgcccccgaggaaaattcttaaggcctctgcgaatgtctggaaggaaccacaggagggaggcagggctgtggcctggatcgtgcagagccacttggccccagatgcccccagacatgggcctggatatccccgaggctcctggggagggtgtaagcagggtctgagccggcaggggacctgggaaatgaaacccctggagtccctgcctccaggatgacccctgtccccgcacggcctctgcagccaccaccccagccgggacacgagaggcctgggacccgcgtctctccttgttcataggggagtgagagtgagtgagtgtcctttctgctctctctgaccagtcgttggtgcatccccatccagagcctgggacggatgggcaacaaacttgacaccttggcttatgacaggtgccttaggagccagatgtgcccagctgtgggagagaggggccaggccaaggagggcgagaagagctgttaacccctgattcgccagcaaggttataacccagaggcctggccctaagagggtggcaccaccatgcagggtgggcccacggccagcagagcctctgttttcaagggggcagtgcctggagtgggactggggtgtcaaccaatggaaaaggcagggctgctggggggtcagggtggacacgtggaccctcctgcgggcagagacctcagtgtgggtgacgtgacgcacccatggttagtgctgcgcagccactcacccgggatccctatttcccagtggaccaggggaagtctcgatttcaaccccgtcttctccctgagagcctcctggggccagccgaggggcgggctcacacagggtgtgccccctggcatgcaggagacgcctgaggatggagtcccggacgcagcctaccagggtcttcaggtccttcagctggttccttagctggaagagctctgtggaggtcagcaggatggtgttgagggcgtggaccatggtcgaggcgaacttgaggtcctcctcccgcagcaggatgtctgccattgagtggaagatgttctccgcattcagcaggaggcacagctgcctggagagcaggcagactggggtcagggcgcaggccgacctggaaggctctgtgtctcagcctgggaggcctcctcttggttttgcagcgtcctggggaaactgctctttcctgaggccagtgtggagccatgactctgaggcctgtggttgtgggagggcggggaagggkggggggaatgccgcacctgcctctaggcctcccagcactgcctacctgggcctagccacgccagggcgccccacgctatattaatctcccggcacaagagaaacagctgggcctccagctacccaaaatagttcctgagatcccgtcaccttcctgaactcccacatgtctgagcaatggcccccaccccaggccaagacacgcctgtcccctgctgggctttcttctcttgctagaactcatcttcatccagccaattctccacacatcggtcacctgtttactgccccactcc

SEQ ID NO: 59641 - DNA, 1232 bp, Homo sapiens
ttgtttttttttttttttgtagagatggggtcttgccatgttgcccaggttggtcttgaactcctgggctcaagtgatccacccacctctgcctactaaagtgctgggattctggcgtgagccactacgcccagcctgtgggcatatatttgattgctatcttttctctcctagaaacccattagctggctgtgggaagcccgaacctgggcctgtgggcctgtgtatacgtggagaaaggcttgaactcttcttcaaacaccacaaaaatgaaacggaggctgtgaccctccaggagcggtaactgcagatacaaatctctgcagctgctggaaacagggcactcggcagctgctccagcgcccctctcctgtggcctgcttgcttaccaggcccagggcccatcctgggggcctgcgaccttgggctgcgggggtcggggagggggctggggcagagaggtggcaattttgctctctattttaggcatcactggcaggaatgagagaagagactggaaggatcagtcatctctccatcatctctctcccctgaggatccccacaggggtaagatcatagatgggtcttcccgcgagggtcagggactgggaaatattcacagacggggcacgcagctgaagatctgagaaaccaattactatgctactggggggcccaggagaagcagaaggaactggaccgggacagccgctcacgcttcaagggcaggaatggaggtgactccaggaacctgtcaactgtgggggcagggggcttccaacagaggtaggtggggktcttcttcaggaaaagggctggaaggaggggctcagctcatgggagaggaaggaaaaagctgactcttctcaggaaaaatgagtggacaaggaaagctggccgagttcacaggcacctggcattagctgactgaagccagcgtaccctgaagagccaaacaagtccatggcagggatgtctgcggtgtcgagatggttttaaacttagtccagattatctgcttaaactgcctgtcctagcagcactgaaccttccagaatgacacagcagcaagaaccctggtcaagccagcttcctgagccggcttcctaactagcctgcggtgtttcacgagactaatggcagaggagagtgtgtagggccacagctgtcatggtgaacaagtgagggtctcaccacctgcccccactggcgagccctgggccccacttc

SEQ ID NO: 59642 - DNA, 758 bp, Homo sapiens
ccccctcccccacatctgtttcaccaaggatcaccactgtgcgatgctatgcttgcaatcgtgactaaccctggcgggcagggactagctctgcccactgcggtgttcccactggtgggcactgtgccaggcactgacggacacccaggacagggttgctcagtgatacatggcgcttcctggctcccctgcctgcccagcacagcagcagcgccctgccgccccctgggtgaaactctgatctacccttrcagggagggggccgagctcttgctcccggcggttccattctcagagaggcgagcgctcttgcccggcctgacagctgtggcctaatttccagggctataaccgggctccttatttttacccacttggtatttttcattactgatgcatgggagatggccagggattgggaatgggggaggtgtgggctaatggaagacgcgtatgcggtggagtcggggctgtcgggccaaggtgagggcctgcaggcgggatagagaaggggtggggacagaccagacagatacatgtatttttaaattttacaagggaaaaagaaaatcccaaatcccacccccttgtttttcctcagtaagcattttcaacaaggtcacaaatgcgctggctctatagatttttggctccaaaccacatttcaggcagcctttaaaagccaattcttggcatagcttcagcggagcctgaggagaggggaaaactagggcacttttatgctttcagaaaacctc

SEQ ID NO: 59643 - DNA, 659 bp, Homo sapiens
gacgtaaaggtttagcactgcgctggggccctggaagcctggctatgttgactggcattagctgttattcccagccagtcttctcattgcctgggctcaggcaccatggccctccctttctggtaacttcacccctcacatcaatcactcctctttccagtaacttcctggctacttctctgcctcaccactggagtaaatgaatgaaggtcagggacacattcaggggccagctcttatcttggagcctacaggggtgagcacaggcaggtgcactggaacgcgtggcagctatgtgaaaaggagagaatggcaacattcgctgatctcctccatcaacgtaggggrctcctagtggtacatttcataaacggctgcacctgcgtgcttggaaaacatgctcagggtgctgagggatgaggataagttcacaaatgacatcgatgagggaagaaccctagctaggggtctggggggaagagcctcttggggtagagtgcacactttctcttcatgagtgattggctctcccagggcccaggttcactgtcaagttcaggggaaagaaacccctgtatgagacccaccatccactctagccccagagatgccaaggtcacccaaagaaaaagtgacatggggcaagtccaggggactca

SEQ ID NO: 59644 - DNA, 659 bp, Homo sapiens
gacgtaaaggtttagcactgcgctggggccctggaagcctggctatgttgactggcattagctgttattcccagccagtcttctcattgcctgggctcaggcaccatggccctccctttctggtaacttcacccctcacatcaatcactcctctttccagtaacttcctggctacttctctgcctcaccactggagtaaatgaatgaaggtcagggacacattcaggggccagctcttatcttggagcctacaggggtgagcacaggcaggtgcactggaacgcgtggcagctatgtgaaaaggagagaatggcaacattcgctgatctcctccatcaacgtaggggactcctagtggtacatttcataawcggctgcacctgcgtgcttggaaaacatgctcagggtgctgagggatgaggataagttcacaaatgacatcgatgagggaagaaccctagctaggggtctggggggaagagcctcttggggtagagtgcacactttctcttcatgagtgattggctctcccagggcccaggttcactgtcaagttcaggggaaagaaacccctgtatgagacccaccatccactctagccccagagatgccaaggtcacccaaagaaaaagtgacatggggcaagtccaggggactca

SEQ ID NO: 59645 - DNA, 659 bp, Homo sapiens
acctgctgccctgcccagccagctgctgacaaggcccagcttgtsgggagaacatcccaggccaactgtgagcttccgacggtgaaagggcttagggactagcacctgttttgcagctgcctggagctttcctggaaccagactggtggggaggctgtcaattcctacaaagtcaggagactccttgatctgcttggtggctctttttcctgtttatttcattttatttcttttttattgttttagagatgggggtctcgctatgttgcccaggctggtcttgaacccctggcctcaagtgatctttctgcctcagcctcccaaagtcctgggattacaggactgggattacatcctgcctggcctctgtggtggctttttttgtttttttgaggcggagtctcactgtgtcgcccaggtgcattgcagtggggcaatcttggctcactgcaacctccgtctcccaggttcaagcaattctcctgcctcagcctcccaagtagctgggattatagatgcctgccaccacacctgtatttttagtagagacggggttctgccatgttggttaggctggtcttgaactcctggcctcaagtgatatgcctccctcagcctcccaaagtgctgggattacaggttgaaccaccattcctggc

SEQ ID NO: 59646 - DNA, 659 bp, Homo sapiens
acctgctgccctgcccagccagctgctgacaaggcccagcttgtcgggagaacatcccaggccaactgtgagcttccgacggtgaaagggcttagggactagcacctgttttgcagctgcctggagctttcctggaaccagactggtggggaggctgtcaattcctacaaagtcaggagactccttgatctgcttggtggctctttttcctgtttatttcattttatttcttttttattgttttagagatgggggtctcgctatgttgcccaggctggtcttgaacccctggcctcaagtgatctttctgcctcagcctcccaaagtcctgggattacaggactgggattacatcctgcctggcctctgtggtggctttttttgtttttttgaggcggagtctcactgtgtcgcccaggtgcattgcagtggggcaatsttggctcactgcaacctccgtctcccaggttcaagcaattctcctgcctcagcctcccaagtagctgggattatagatgcctgccaccacacctgtatttttagtagagacggggttctgccatgttggttaggctggtcttgaactcctggcctcaagtgatatgcctccctcagcctcccaaagtgctgggattacaggttgaaccaccattcctggc

SEQ ID NO: 59647 - DNA, 659 bp, Homo sapiens
acctgctgccctgcccagccagctgctgacaaggcccagcttgtcgggagaacatcccaggccaactgtgagcttccgacggtgaaagggcttagggactagcacctgttttgcagctgcctggagctttcctggaaccagactggtggggaggctgtcaattcctacaaagtcaggagactccttgatctgcttggtggctctttttcctgtttatttcattttatttcttttttattgttttagagatgggggtctcgctatgttgcccaggctggtcttgaacccctggcctcaagtgatctttctgcctcagcctcccaaagtcctgggattacaggactgggattacatcctgcctggcctctgtggtggctttttttgtttttttgaggcggagtctcactgtgtcgcccaggtgcattgcagtggggcaatcttggctcactgcaacctccgtctcccaggttcaagcaattctcctgcctcagcctcccaagtagctgggattatagatgcctgccaccacacctgtatttttagtagagacggggttctgccrtgttggttaggctggtcttgaactcctggcctcaagtgatatgcctccctcagcctcccaaagtgctgggattacaggttgaaccaccattcctggc

SEQ ID NO: 59648 - DNA, 1298 bp, Homo sapiens
caggagagagaagaggggggacaggtgggtacctgggctggaggcgcggcctgaggtgggcaggtgcagggggcgtgacttcatttaggggcagggcctggggctaggctgaagccggcagtgaggaccccgctctcgggtggaattggaggggacccgcggttgggcgcggcagggctcacagggacacccccgttctcctccccagggagaaagtgctcgtcgtgcacggcttcccgcccgccgtggcaacccttcgggtaaggaaggagaccaggcggcggcaggcgggcaagggcttggggtccgcccccctgcctggagccgccctaactcctccgtatcctgccgctgttggagtgggcctggaaccccctccataggcgcgcctcctactcccgctgcaccccgacctccgccgggacctctatgcgccgcgccgcacgggcgatggccttcgggcctccccggccccagggcaccgcgcaggtccctttgctggcaccaagcccgagcctgagccggacccggggcccaagaggcctgtgcgccctgcgagcccttgagctccaggggaggtccgccccaggcagggcggctcatcccccagaccacttcggatccagctgtttgttgaggagccaggaaacgccctgacacttttgcggccctgtccccgtctctaagatggggatgatagtatttctggccattcctgagcacagcaggacctgccttttccctttgactggaaggttcttctctacacctatcttgataacctgccacctccacagggaggtcttctctatctcccgatttaaaattgcagctctgagaagccgggcatggtggcatatgcctgtagtcccagctacggggggaggctgaggtgggaggatcgcttggtcccaggagttggaggctgcagtgagctctgatcgctccactgcactatagcctgggcaaaagagcaagaaactgtctctaaaaatataaaataaaattgcacctcttgtgtacttccccgtctgcttctttacctgaatacttactatctcaccggctaggtgctttatgactctcgttagtctctcccaccccaacctttgcactacattgcccgagggcagctcttgtcactgctgtagaacaaagtmctgcacagagacgatagccaagaaatagttaataaaataatggaaaacgggtgccttctactgagcacccgctaatagtgagtgagtagaggacttgccctggggacattcagtgacctgctgggtgttgctgagctg

SEQ ID NO: 59649 - DNA, 1416 bp, Homo sapiens
atcggaggtggcaggtgtaggatcatctggtgagcaagtagagtcaccaagtctggctgaccactacccccactacccccactatccccacagaygatgccctgtcccttgcctcatgctccggcagggtacaggctcacacctggggcctcatggagcatctctctaagacctctgtgtcctggtcattgaatgggcacttgagtcacccagggccattggaacaaagaggaagaatcaggccccatgatgttttgggagagtgtttagcacaggaaaatgcacagaatacatgcacgacacaggggcactgtcagtgtgggagcaatagtttacaacctccagccctaatctgagcactctcacctgtgcaatctgaaaggaacaggagacttgcaggaaagacagtgcctggatttaacttaaaggaactaaaatgttggaatttttactcttgatatccttccaaatcaactctctcaatgttcccatcctcaaaactatcatatggggtaactgaggcagtcagagatttactgactcaatgtcactcaattgattctgagttcactgctgattacattcgaccaaactgctttttctgaagtctactccgtttaatcatgctggtgatgattttgtgcagctctgggacaaactccacctggctgaagataaagcaaatctgcggtgacttagtcctcctgtcatttcccatcagttccccactctcttcctctgcccctccacagtctcccatgcaggctgacaccatatgacggtcttaatggagtccaccaagtatttcaggttctctcctgggccacttgaaagtggatgtacccatgggatttgctttgacccaggagatgtgagtggaagtgaagcgtgtcacctcgaggcaaaagagttgggagccattgagactggccactctctccttcatctcttggagcaactgacagctcctatatggaggctgctcctttattctcgtggcaggatgagggcatgtggggcacagggcacaggagagccatggaggatgtgcagcatgggcaggaaaagagccttcagtggtgtacattttgtacatttccatcgtttggggctgtttcttacctacagtgatacctagcccatcctagcaggcatgcaccatctaccccacactctgtgatgcagactagcctgccgtcagaacatgaactggtggtcagacacacataggtttcagttccagctctgcctcttattgactgtaacctcaggcttaactttcagtctctgagcctcagtttcaactctgtaaaatgaggtggctataccatctcaggttgcagagagaattaaatgaaatataagtgcatgtagagcattgaacccagggcctggcacacacagtgagtacacaat

SEQ ID NO: 59650 - DNA, 717 bp, Homo sapiens
gccaagttgctgtgcgaccaggtggtcggtgcgcccatcgcggtctcggccttctacgccggtgaggggccggggggggaacctggggggtgggaccagtattgggggactggaggcagggacttggggatcaagcggctggagggagggcgctgcaggagcctggggacccgggcaggagccggggctctgagaccggagctgcttcagaggcctgaagggccagggcaaaggctggaggctggggtgtttgattgcgagaagttgcaggaggcactggctggggagccgagaaattggggagccagaggtacagcaggtcaggaatttagaggactagggtcggggctcagactctggggttgggtgtaggccaaggctggaggtaggcagggctgcggaggtctttgccccctgaaaaaggcccacgggaaaataaaggagatcccagttcaaggccatagcagctgcaatgaccgtgaaccaatcgtgggacagggaaggaaccgacctrctgttcagaaaatccacgcctggggccccggggccaacacaggaacaaaatgcaaggggacccgtgaccctggggggcagagcaggtggaatctgaggttgggcctggatcttcagcaaattcatgcccaggggcctagtcctgctttggtaacaagattttcccctggggtctcacggaaaacatcaagggaccttggatcc

SEQ ID NO: 59651 - DNA, 693 bp, Homo sapiens
aattgtagccatgactgtcttcctccttggagtacacctaggacttttccatgtacatattcatcacagcttcttacttgtgccctgtggcttcccaaagctcagccctagaccttctgtcttcacaatttgtaccattcccactaccaaattgactatcaatttacttgattttttttctttaaattgacattttttaaaagctgttattaaagaaaattgtatctacctagtgcaataagaaagagcttttgggaagagcaagccaatatatgttgcatttctataccacaaaacattccctttgcctctagcaaccattacaacgaaagggtggtgtatggtggagaagatccccaaagtaagacaaacaggaaaatccggcctttctgtacagtggattttggaaaggagaagggaacagaggtagggaaagcatgtgtgatgcaaagtgccctgactccccctcttagacataggtcctaaagggatacagcgatgaggtaaagtgatggggtgcagtgatgggctgaaatgtgtgctaaggatgaaawgtgtgctaagtagtgaagggttctccaggaggatagtgacagaagggttccacatctcaaccaacctggggcagccacagcagagcagaagtggttgggctaagagagatctcagggggtggtcctatttcccttggat

SEQ ID NO: 59652 - DNA, 1334 bp, Homo sapiens
ggtggaatattgtatgtgatcttaattttcttactttcctttctctgtatttcctaaattttctgtaataagtatatattacatttgcactcagaaaataaaaacagtaaacattattttttaaaaaagggaagaaaagaaggcggccactggtgggctgctggaaagcctccgaacacctggctgctgagatgagcagggtctgctctgatgtctgtagggtccttcctaccctggggagtgatggtgaggccaattagaacctttgggcttttcttcccagcttggccagggtgaatggacacaccttccattgttctcctcaggaataggcacacctgagagttgagcacttgccgagtggacacctcagtacacttgccacccacacacctcctggcccactcctctccccgactatgtcaaaattcaagacagcagaattcatgggatccttccttctgatctccctcacctgcttaactgcttctttgtttccaaggcacttttcctgttctatcatatcacataatccacggagtaatttgcatattgttcttatctgtctccccctgctagaatgcacgctccaggaacctagggatctttgctttttcactaatggatcccaagaacccagaacacgcctggcacacagcaggtgctcaataaacatgtgttaaataatggactccagaatgctgtgagagttctggaatgttcttaaggatctacaaagatcttaaggagtccagagcaaaggatcagcccrtcaggggactgccttgactccttcctgcatcactttgaggtaaacatccccaaggacacatgccgcagcttacataggagggtacgaggtggcattcttcacaaagctccatggttctgcaggctgcggtggagtaaacctcaggggtccaagaggcggcttggcaaaagggattcccaggaaaatggccacaggctgtgcaaatccttctaagctgacgaacttccccagcactttgccatgcacggtgtccaccacaggtggcgaggacggatgccctgctggacatggagaataaatcaggatgcatcagaggcaaaaggctggacccagattccaggtggagtttgccgctttctaagtgagtgaccttaaataagtcacctaaaccctctaggcctcagtttctcttgatgtacaatagggatgacgatcaatgtcctccctaacccattgagctggtttaatgggcaaactagaattggaggcataaaaacatccagctaaaaataaatgcaagaaggagagctactaggaaagaacaagacatttagcttccccc

SEQ ID NO: 59653 - DNA, 703 bp, Homo sapiens
caggccaaggtcctgctagctagagcccgaagcacacagcaggcagccttacggggagcttggagcctgtatcggcgtgggcaggcgcatagatgttcaggtagaggcagtcttctgacactccgaatttcgggtaatgcaccttgagcatrtgttgatctaagagcagccactctgagttctggaggcaccttggagaaggagaggagaaaaccctcagaaaaagttatcagcaaacttgcctgggaagggccagttcttctgacagcggggaggcctggccgtctcctctgcctgagcagaagaggcagctaccggtacaaagtccaatcatgcccaaacccccatggtttccaaaacaaacaagcaagcaaattataattctcattgatctggttcctgggtaggaaagcacatggtgtagaataattgcaccattacccccaccaccctcccatgcctacaccaccctcctatgccaccaccataatatagacacacataacgacccaagctggcccaacaattccccaaactgtagagggcaggacatagtcgaataacaagggctttgcccctgcggctccctattctgtccccagatgcgcaaaggaacatttccaggcctctctacctggaaccacccaggatagactggcagggagactcctgcacccaggctttgctcaagccgggcccttgc

SEQ ID NO: 59654 - DNA, 550 bp, Homo sapiens
agttaacaaaatatctttaataaaatctttttgtttgtttgttttgttttggagacagagtctgtcacccaggttggagtgcagtggcgcgatctcggctcactgcaacctctgcctcccgggttcaagcgattctcctgcctcagcctcccgagtagctgggatgacaggtgcatgccaccaytctcggctaatttttgtatttttaatagagacggaggtttcaccatgttggccaggctggtctcgaactcctgactcaggtgatccgcccgcctcagcctctcaaagtgttggattacaggcgtgagccacggcgcctggcctaaaacctttttttaccacaaaatggagacctgtaaggcgaagtgaggttggatggctggacggtgggggtggggtgcagtcctggatcagggccggagctgtcacttcttcctcttcttgttgtccgggggcgcctcgttcttcttgcccagaatctttagaaggctcttggacatgtagtagggccggtccagggagccgttgttccgctccaggtcttcca

SEQ ID NO: 59655 - DNA, 769 bp, Homo sapiens
atcagtgttaatcttctcaagccaatgtggctaaggtagttcacttgcacctcaggctactcatttcccattccctccttaaggcaaaggagataaatagcagataacgtggctgtggggcaggaagtgcatgaaacatcacggtggaggaagaaaagtaggggccaggcaaccccagtgggatggggaggttaaaggtaattgagagagggttgagggccctattctcacttcctggcacccagtaggaagggccaatgagaaagctcaaagtcattcactccttacacgattgactcattcacccactcttcttaggtccatgaaccaggccctttatagatacttgacacatgaaattaaaaaamattgtgtttcctcttggcaacttcataaatgagaggcaaacattctctaaatggaatgtagtcctgcaatacgccaagtacaatttattcatttattgatcacctactatgtggcagacacagtgctgggcttggggaatgtgcactcaaaaagtgttatcagagcccatgaaaaggtgaggcatccaatgcctccccttagagtcttccctgagcgcctattctaggctgtgttaaaggctggaacccctttttcagagtgttattcttctcctaccaccaaagagcctgacaggacagtgtagctgtggggtggtggcggcactcgggggtcctggccagacaagcactaggagacgccagcattctgaactcactgacctgaaggtgagttttcaggg

SEQ ID NO: 59656 - DNA, 769 bp, Homo sapiens
atcagtgttaatcttctcaagccaatgtggctaaggtagttcacttgcacctcaggctactcatttcccattccctccttaaggcaaaggagataaatagcagataacgtggctgtggggcaggaagtgcatgaaacatcacggtggaggaagaaaagtaggggccaggcaaccccagtgggatggggaggttaaaggtaattgagagagggttgagggccctattctcacttcctggcacccagtaggaagggccaatgagaaagctcaaagtcattcactccttacacgattgactcattcacccactcttcttaggtccatgaaccaggccctttatagatacttgacacatgaaattaaaaaaaattgtgtttcctcttggcaacttcataaatgagaggcaaacattctctaaatggaatgtagtcctgcaatacgccaagtacaatttattcatttattgatcacctactatgtggcagacacagtgctgggcttggggaatgtgcactcaaaaagtgttatcagagcccatgaaaaggtgaggcatccaatgcctccccttagagtcttccctgagcgcctattctaggctgtgttaaaggctggaacccctttttcagagtgttattcttctcctaccaccaaagagcctgacaggacagtgtagctgtggggtggtggcggcactcgggggtcctggccagacaagcactaggagacrccagcattctgaactcactgacctgaaggtgagttttcaggg

SEQ ID NO: 59657 - DNA, 713 bp, Homo sapiens
aattacacatggctggggaggcctcacagtcctggcggaatgtgaaggaggagcaaagatacatcttacatggcagcaggcaagaggcatgtgtgtggaaaatcccctttataaaaccatgagatctcctgaaacctattcaccatcatgagaacagcacaggaaaaatccacccccatgattcaattacctcctacaaggtccttcccattacacatggagattattacaattcaaggtgagatttgggttgggaacacagagccaaaccatatcatgagttgttattctacctctctggaatgaaatgtgaccaaagttcagggtttagcgtgtctaatatctacgccatcatccttaatcacttaccacttagctgagagatgacaaatggtttcattttacacattatctttgatgcactggtaatgactgcctagagtactgctaataagatttctgggctcagtgagataaaaagttttgccatggggtggcattaaacagtgtagtttccagccctgattttgcccartctcctttgttctagtgctgtattgttccacaataagctacccccaagttagcggcttaaaacaccagttcttagttttccttgtgaatctgcagtttgggaagaactcacacaggacatagctcatatctgtatacatggcatcatctggagcagctcatctgaggcaggaggatcc

SEQ ID NO: 59658 - DNA, 2022 bp, Homo sapiens
tgtaaattatatgggggacagtttaatgatctacaaagcagcacatccagccagcacagacaacatcttcgaaatagggcaagagaattaatttagatgggagaggagagggtgctgaggtgggtgagtggagaaagggctctatgggagccctttatgggaaggactccttggagacaataaccttaaagcgagagtaagatagagtgaagaggatggtgctgctttgtgtatttcagggaggattaagcaagagacaggaggctagcacaacctggggaacagagaagaaaatggtccttttaaaaaggagggagataaaaaaggaaactggattccaaagaacaaaggcaagttcttccctctgtgccccatttatttaagaagactaggcaggaatagtagaattctaaatgctttctgaaaaatattctaagacatcagctttcaaatttttattgtataaaaacatttttgtttttaaaataaatttatgcaaagttccactagaatgtgaactccatgatgacacgggtttttgtcccattgttaactgttatatccccagagtctgtcacatagcaggcactcaataaatatttgttgaatgaatgaatgagtaggtatgcctttgggctgggaaagatctttacctctctagcagagaccagagctccttagggaaagcactttattttagggaaataccttgctaaatcaccttcagggagaaggcaaccaagaaacagctaaaggctttttgtaagtaataaacttgaatttgatggtggggatgggttgcaaagagaagggaggaagaaggatggagagkctgagtaacaaggcttgtcatgaatagttatgactaattctcttaaattacgtcctgtgaggtacacaggaaactccttaccattattcccaattctacagtaaaaaatatagcctagacatctcctttatgtgtgagatatggaagggcagtgctatggtttttttattcccaccaaaatgcatgctgaaatttgattccccagtgtggcagtgttgggaaagtgaagcctggtggaagctgtttgggtcatggggttggatcccttatgaataggttggtgcccttctggtggttgtgaatgagctcgctctctgacaagactggattattttttgcaggaatggattatttcctgctagagtaggtcattataaagccaagatgcccctccagtcttccctcttcacacgtctgcttcccctttgaaattctccaccatgttatgatgcagcatgaaaaatcttgccagaaggcagggccatgcccctggacttcctagcctgcagaactgtgagctaaataagcctcttttctcacaaattactcaggctcaggtattctgttatagcaacacaaaacagactaagaccaggtatcaacaagaaagcggtcaagtcctttgtttgggtcaatgccaagaagaagataaaaaacaaaaggaacaaagaagccatatgactcagattgacagatgtagtaaaaacaaagtatgagatagagatgactaccagaaggtaagcctctaaggaattgaaaaaaaatcttggtgagggtcgggggagcaggttgtacttctccttggttgtagaataggggtttggtttgctcttatctggatattaaaggacatctgctatcaggggtacatgaaaagcagatgaaacggagctgctgggaatgaagagagacacccagaacactcctcctttcactcgtgccccttcttactgtaccccacctgcctttgaagcttttacttgctgagaacagagaaatgaaaggaagttcaggagagtcatgggtgggaggaggagaagagctgaggaatgaggcactggggatttggattcaaacccatggtatagtagggatattcctgagatagccatatccccagtttccaacatcatggatgcgtctccttttcttacctatacaacagggataaaaacacctgccctccagag

SEQ ID NO: 59659 - DNA, 2022 bp, Homo sapiens
tgtaaattatatgggggacagtttaatgatctacaaagcagcacatccagccagcacagacaacatcttcgaaatagggcaagagaattaatttagatgggagaggagagggtgctgaggtgggtgagtggagaaagggctctatgggagccctttatgggaaggactccttggagacaataaccttaaagcgagagtaagatagagtgaagaggatggtgctgctttgtgtatttcagggaggattaagcaagagacaggaggctagcacaacctggggaacagagaagaaaatggtccttttaaaaaggagggagataaaaaaggaaactggattccaaagaacaaaggcaagttcttccctctgtgccccatttatttaagaagactaggcaggaatagtagaattctaaatgctttctgaaaaatattctaagacatcagctttcaaatttttattgtataaaaacatttttgtttttaaaataaatttatgcaaagttccactagaatgtgaactccatgatgacacgggtttttgtcccattgttaactgttatatccccagagtctgtcacatagcaggcactcaataaatatttgttgaatgaatgaatgagtaggtatgcctttgggctgggaaagatctttacctctctagcagagaccagagctccttagggaaagcactttattttagggaaataccttgctaaatcaccttcagggagaaggcaaccaagaaacagctaaaggctttttgtaagtaataaacttgaatttgatggtggggatgggttgcaaagagaagggaggaagaaggatggagaggctgagtaacaaggcttgtcatgaatagttatgactaattctcttaaattacgtcctgtgaggtacacaggaaactccttaccattattcccaattctacagtaaaaaatatagcctagacatctcctttatgtgtgagatatggaagggcagtgctatggtttktttattcccaccaaaatgcatgctgaaatttgattccccagtgtggcagtgttgggaaagtgaagcctggtggaagctgtttgggtcatggggttggatcccttatgaataggttggtgcccttctggtggttgtgaatgagctcgctctctgacaagactggattattttttgcaggaatggattatttcctgctagagtaggtcattataaagccaagatgcccctccagtcttccctcttcacacgtctgcttcccctttgaaattctccaccatgttatgatgcagcatgaaaaatcttgccagaaggcagggccatgcccctggacttcctagcctgcagaactgtgagctaaataagcctcttttctcacaaattactcaggctcaggtattctgttatagcaacacaaaacagactaagaccaggtatcaacaagaaagcggtcaagtcctttgtttgggtcaatgccaagaagaagataaaaaacaaaaggaacaaagaagccatatgactcagattgacagatgtagtaaaaacaaagtatgagatagagatgactaccagaaggtaagcctctaaggaattgaaaaaaaatcttggtgagggtcgggggagcaggttgtacttctccttggttgtagaataggggtttggtttgctcttatctggatattaaaggacatctgctatcaggggtacatgaaaagcagatgaaacggagctgctgggaatgaagagagacacccagaacactcctcctttcactcgtgccccttcttactgtaccccacctgcctttgaagcttttacttgctgagaacagagaaatgaaaggaagttcaggagagtcatgggtgggaggaggagaagagctgaggaatgaggcactggggatttggattcaaacccatggtatagtagggatattcctgagatagccatatccccagtttccaacatcatggatgcgtctccttttcttacctatacaacagggataaaaacacctgccctccagag

SEQ ID NO: 59660 - DNA, 2022 bp, Homo sapiens
tgtaaattatatgggggacagtttaatgatctacaaagcagcacatccagccagcacagacaacatcttcgaaatagggcaagagaattaatttagatgggagaggagagggtgctgaggtgggtgagtggagaaagggctctatgggagccctttatgggaaggactccttggagacaataaccttaaagcgagagtaagatagagtgaagaggatggtgctgctttgtgtatttcagggaggattaagcaagagacaggaggctagcacaacctggggaacagagaagaaaatggtccttttaaaaaggagggagataaaaaaggaaactggattccaaagaacaaaggcaagttcttccctctgtgccccatttatttaagaagactaggcaggaatagtagaattctaaatgctttctgaaaaatattctaagacatcagctttcaaatttttattgtataaaaacatttttgtttttaaaataaatttatgcaaagttccactagaatgtgaactccatgatgacacgggtttttgtcccattgttaactgttatatccccagagtctgtcacatagcaggcactcaataaatatttgttgaatgaatgaatgagtaggtatgcctttgggctgggaaagatctttacctctctagcagagaccagagctccttagggaaagcactttattttagggaaataccttgctaaatcaccttcagggagaaggcaaccaagaaacagctaaaggctttttgtaagtaataaacttgaatttgatggtggggatgggttgcaaagagaagggaggaagaaggatggagaggctgagtaacaaggcttgtcatgaatagttatgactaattctcttaaattacgtcctgtgaggtacacaggaaactccttaccattattcccaattctacagtaaaaaatatagcctagacatctcctttatgtgtgagatatggaagggcagtgctatggtttttttattcccaccaaaatgcatgctgaaatttgattccccagtgtggcagtgttgggaaagtgaagcctrgtggaagctgtttgggtcatggggttggatcccttatgaataggttggtgcccttctggtggttgtgaatgagctcgctctctgacaagactggattattttttgcaggaatggattatttcctgctagagtaggtcattataaagccaagatgcccctccagtcttccctcttcacacgtctgcttcccctttgaaattctccaccatgttatgatgcagcatgaaaaatcttgccagaaggcagggccatgcccctggacttcctagcctgcagaactgtgagctaaataagcctcttttctcacaaattactcaggctcaggtattctgttatagcaacacaaaacagactaagaccaggtatcaacaagaaagcggtcaagtcctttgtttgggtcaatgccaagaagaagataaaaaacaaaaggaacaaagaagccatatgactcagattgacagatgtagtaaaaacaaagtatgagatagagatgactaccagaaggtaagcctctaaggaattgaaaaaaaatcttggtgagggtcgggggagcaggttgtacttctccttggttgtagaataggggtttggtttgctcttatctggatattaaaggacatctgctatcaggggtacatgaaaagcagatgaaacggagctgctgggaatgaagagagacacccagaacactcctcctttcactcgtgccccttcttactgtaccccacctgcctttgaagcttttacttgctgagaacagagaaatgaaaggaagttcaggagagtcatgggtgggaggaggagaagagctgaggaatgaggcactggggatttggattcaaacccatggtatagtagggatattcctgagatagccatatccccagtttccaacatcatggatgcgtctccttttcttacctatacaacagggataaaaacacctgccctccagag

SEQ ID NO: 59661 - DNA, 2022 bp, Homo sapiens
tgtaaattatatgggggacagtttaatgatctacaaagcagcacatccagccagcacagacaacatcttcgaaatagggcaagagaattaatttagatgggagaggagagggtgctgaggtgggtgagtggagaaagggctctatgggagccctttatgggaaggactccttggagacaataaccttaaagcgagagtaagatagagtgaagaggatggtgctgctttgtgtatttcagggaggattaagcaagagacaggaggctagcacaacctggggaacagagaagaaaatggtccttttaaaaaggagggagataaaaaaggaaactggattccaaagaacaaaggcaagttcttccctctgtgccccatttatttaagaagactaggcaggaatagtagaattctaaatgctttctgaaaaatattctaagacatcagctttcaaatttttattgtataaaaacatttttgtttttaaaataaatttatgcaaagttccactagaatgtgaactccatgatgacacgggtttttgtcccattgttaactgttatatccccagagtctgtcacatagcaggcactcaataaatatttgttgaatgaatgaatgagtaggtatgcctttgggctgggaaagatctttacctctctagcagagaccagagctccttagggaaagcactttattttagggaaataccttgctaaatcaccttcagggagaaggcaaccaagaaacagctaaaggctttttgtaagtaataaacttgaatttgatggtggggatgggttgcaaagagaagggaggaagaaggatggagaggctgagtaacaaggcttgtcatgaatagttatgactaattctcttaaattacgtcctgtgaggtacacaggaaactccttaccattattcccaattctacagtaaaaaatatagcctagacatctcctttatgtgtgagatatggaagggcagtgctatggtttttttattcccaccaaaatgcatgctgaaatttgattccccagtgtggcagtgttgggaaagtgaagcctggtggaagctgtttgggtcatggggttggatcccttatgaataggttggtgcccttctggtggttgtgaatgagctcgctctctgacaagactggattattttttgcaggaatggattatttcctgctagagtaggtcattataaagccaagatgcccctccagtcttccctcttcacacgtckgcttcccctttgaaattctccaccatgttatgatgcagcatgaaaaatcttgccagaaggcagggccatgcccctggacttcctagcctgcagaactgtgagctaaataagcctcttttctcacaaattactcaggctcaggtattctgttatagcaacacaaaacagactaagaccaggtatcaacaagaaagcggtcaagtcctttgtttgggtcaatgccaagaagaagataaaaaacaaaaggaacaaagaagccatatgactcagattgacagatgtagtaaaaacaaagtatgagatagagatgactaccagaaggtaagcctctaaggaattgaaaaaaaatcttggtgagggtcgggggagcaggttgtacttctccttggttgtagaataggggtttggtttgctcttatctggatattaaaggacatctgctatcaggggtacatgaaaagcagatgaaacggagctgctgggaatgaagagagacacccagaacactcctcctttcactcgtgccccttcttactgtaccccacctgcctttgaagcttttacttgctgagaacagagaaatgaaaggaagttcaggagagtcatgggtgggaggaggagaagagctgaggaatgaggcactggggatttggattcaaacccatggtatagtagggatattcctgagatagccatatccccagtttccaacatcatggatgcgtctccttttcttacctatacaacagggataaaaacacctgccctccagag

SEQ ID NO: 59662 - DNA, 2022 bp, Homo sapiens
tgtaaattatatgggggacagtttaatgatctacaaagcagcacatccagccagcacagacaacatcttcgaaatagggcaagagaattaatttagatgggagaggagagggtgctgaggtgggtgagtggagaaagggctctatgggagccctttatgggaaggactccttggagacaataaccttaaagcgagagtaagatagagtgaagaggatggtgctgctttgtgtatttcagggaggattaagcaagagacaggaggctagcacaacctggggaacagagaagaaaatggtccttttaaaaaggagggagataaaaaaggaaactggattccaaagaacaaaggcaagttcttccctctgtgccccatttatttaagaagactaggcaggaatagtagaattctaaatgctttctgaaaaatattctaagacatcagctttcaaatttttattgtataaaaacatttttgtttttaaaataaatttatgcaaagttccactagaatgtgaactccatgatgacacgggtttttgtcccattgttaactgttatatccccagagtctgtcacatagcaggcactcaataaatatttgttgaatgaatgaatgagtaggtatgcctttgggctgggaaagatctttacctctctagcagagaccagagctccttagggaaagcactttattttagggaaataccttgctaaatcaccttcagggagaaggcaaccaagaaacagctaaaggctttttgtaagtaataaacttgaatttgatggtggggatgggttgcaaagagaagggaggaagaaggatggagaggctgagtaacaaggcttgtcatgaatagttatgactaattctcttaaattacgtcctgtgaggtacacaggaaactccttaccattattcccaattctacagtaaaaaatatagcctagacatctcctttatgtgtgagatatggaagggcagtgctatggtttttttattcccaccaaaatgcatgctgaaatttgattccccagtgtggcagtgttgggaaagtgaagcctggtggaagctgtttgggtcatggggttggatcccttatgaataggttggtgcccttctggtggttgtgaatgagctcgctctctgacaagactggattattttttgcaggaatggattatttcctgctagagtaggtcattataaagccaagatgcccctccagtcttccctcttcacacgtctgcttcccctttgaaattctccaccatgttatgatgcagcatgaaaaatcttgccagaaggcagggccatrcccctggacttcctagcctgcagaactgtgagctaaataagcctcttttctcacaaattactcaggctcaggtattctgttatagcaacacaaaacagactaagaccaggtatcaacaagaaagcggtcaagtcctttgtttgggtcaatgccaagaagaagataaaaaacaaaaggaacaaagaagccatatgactcagattgacagatgtagtaaaaacaaagtatgagatagagatgactaccagaaggtaagcctctaaggaattgaaaaaaaatcttggtgagggtcgggggagcaggttgtacttctccttggttgtagaataggggtttggtttgctcttatctggatattaaaggacatctgctatcaggggtacatgaaaagcagatgaaacggagctgctgggaatgaagagagacacccagaacactcctcctttcactcgtgccccttcttactgtaccccacctgcctttgaagcttttacttgctgagaacagagaaatgaaaggaagttcaggagagtcatgggtgggaggaggagaagagctgaggaatgaggcactggggatttggattcaaacccatggtatagtagggatattcctgagatagccatatccccagtttccaacatcatggatgcgtctccttttcttacctatacaacagggataaaaacacctgccctccagag

SEQ ID NO: 59663 - DNA, 2022 bp, Homo sapiens
tgtaaattatatgggggacagtttaatgatctacaaagcagcacatccagccagcacagacaacatcttcgaaatagggcaagagaattaatttagatgggagaggagagggtgctgaggtgggtgagtggagaaagggctctatgggagccctttatgggaaggactccttggagacaataaccttaaagcgagagtaagatagagtgaagaggatggtgctgctttgtgtatttcagggaggattaagcaagagacaggaggctagcacaacctggggaacagagaagaaaatggtccttttaaaaaggagggagataaaaaaggaaactggattccaaagaacaaaggcaagttcttccctctgtgccccatttatttaagaagactaggcaggaatagtagaattctaaatgctttctgaaaaatattctaagacatcagctttcaaatttttattgtataaaaacatttttgtttttaaaataaatttatgcaaagttccactagaatgtgaactccatgatgacacgggtttttgtcccattgttaactgttatatccccagagtctgtcacatagcaggcactcaataaatatttgttgaatgaatgaatgagtaggtatgcctttgggctgggaaagatctttacctctctagcagagaccagagctccttagggaaagcactttattttagggaaataccttgctaaatcaccttcagggagaaggcaaccaagaaacagctaaaggctttttgtaagtaataaacttgaatttgatggtggggatgggttgcaaagagaagggaggaagaaggatggagaggctgagtaacaaggcttgtcatgaatagttatgactaattctcttaaattacgtcctgtgaggtacacaggaaactccttaccattattcccaattctacagtaaaaaatatagcctagacatctcctttatgtgtgagatatggaagggcagtgctatggtttttttattcccaccaaaatgcatgctgaaatttgattccccagtgtggcagtgttgggaaagtgaagcctggtggaagctgtttgggtcatggggttggatcccttatgaataggttggtgcccttctggtggttgtgaatgagctcgctctctgacaagactggattattttttgcaggaatggattatttcctgctagagtaggtcattataaagccaagatgcccctccagtcttccctcttcacacgtctgcttcccctttgaaattctccaccatgttatgatgcagcatgaaaaatcttgccagaaggcagggccatgcccctggacttcctagcctgcagaactgtgagctaaataarcctcttttctcacaaattactcaggctcaggtattctgttatagcaacacaaaacagactaagaccaggtatcaacaagaaagcggtcaagtcctttgtttgggtcaatgccaagaagaagataaaaaacaaaaggaacaaagaagccatatgactcagattgacagatgtagtaaaaacaaagtatgagatagagatgactaccagaaggtaagcctctaaggaattgaaaaaaaatcttggtgagggtcgggggagcaggttgtacttctccttggttgtagaataggggtttggtttgctcttatctggatattaaaggacatctgctatcaggggtacatgaaaagcagatgaaacggagctgctgggaatgaagagagacacccagaacactcctcctttcactcgtgccccttcttactgtaccccacctgcctttgaagcttttacttgctgagaacagagaaatgaaaggaagttcaggagagtcatgggtgggaggaggagaagagctgaggaatgaggcactggggatttggattcaaacccatggtatagtagggatattcctgagatagccatatccccagtttccaacatcatggatgcgtctccttttcttacctatacaacagggataaaaacacctgccctccagag

SEQ ID NO: 59664 - DNA, 1135 bp, Homo sapiens
ctcacgcaccctcacacacgcacagcaggctcagatgaataggagatgtccctccagctctcccacatctcagggattacgctcagagctcctggcactgacgtttggaaaatctgagagacctctgcctctagaccacattattatattattcattttatatttcttctatatttttgagttttatgttttttattagaaaaaaacattttattagctgggggaggggggagagagagagagagagagatttaaatacttctcctgacttcaaatctctcacctctgagatagctgctggtttgtttatgtagttattcccaactgtggtcaactgaaaaatagccccaaatatgtcattgtcctaatctctggcacctgtgattgtgaccttacatggcaaaagaaattttrcagctatgattaaattaaggacctcgagattggggattactttggattttccaggaggacccggtgtcgtctcaagggtcctttaagagggaggcaggcaggttggagaggagaaggccacgtgatgctggacgcagaggactaagtgatgtgctgtgaagagggaggaacaggccacaagccaaggaatacaggccacactggaagctaaaaaaggcaaggaaagggaccctctctttagaaccttcagaagaaagcagccctaccaacaccttcactttagcccagtgaaactcattctggacttctgacctccagaactataatgtaataaatttatgtggttttaagtcactaagtttgaggtaattttttacagcagcaatagaaaattaatacaccaaatgttctctatactctgtgtgtgtgtgtgtgtgtgtgtgtgtgtgtgtgtgtgtgtgtacttcacttttttggccaaatgaaattatataaagtatgtatttttaaaaacttgatcaggaggctgaggcaggagaatggcatgaacccgggaggcggtgcttgcagtgagccaagatcgcgcaactgcactccagcctgggcgacggagcaagactccatgtaaaaaaaaaagattgatatcaataattcctataacattatcttttttaaaagttttatggtaatcctttgtatgggtgaacatattgtatttagt

SEQ ID NO: 59665 - DNA, 640 bp, Homo sapiens
cgtttcctgcagttccatgtccctgagatatctagaataggcgaattccgagattgaaagtagattagaggtttccagggactggggagaggcagctgaaagggattatttaatgagttcagaatttccatttgggatgattaaaaagttttggaaatactaatgatgggtacacaatattatgaaggtcgttattgctaataaatttgtacacctaaaaaataattaaaatggaaaattttattttacrtgcatcttcccacacaaaaaaaagaaattccaaatagacttctgttgatactccttctcccctccagcaaccatcctatgtccttgaaaacagttactaggtctcaacgccagaaattcattcctcccctcctcttttcttttgaaccaacttcaagcagcctttccttctgctgctgcacccacctggaggaggtgatgggaaagcgtggccagggctgcagagagaaggagagaagtggggcagtgaggcgtgaacacctcgctgctgtgagagcggcaggaaacataggcacaatctagacaggggtgcaggggccagggagggttgttggttttgcaataaaagacatgacagcacgtgtgtgtgctcccgggaaggatccagagg

SEQ ID NO: 59666 - DNA, 1466 bp, Homo sapiens
tgcttccaggcccactcatggggctgttggagggcttggttcttcctgagctgttagactgaaggtttcagttccttgcttgttattgggtagagactgttctcagtgtctggtcacctgaggcctccacagggcagcttgctcactcagtcagagaagggatggaaaaacaaaagcatgtcaccatctaccatcacctaatctgggacctgacatctcaatcattaagccaccaagcctgtcccacactcaaaaggaagagattacacaagggtgtgaatgccaagaagcaaggatcactgggcatcaccttagagactggccaccagacacagccacaaaagtagaccctccttgtctatgggtggagtgatagaaagatgtgaggaacagagctatggcaatcattttgctgcagtgaaaggagagctggggattttgaggaaggcatgacatggagcctgaggacagggccaacaccaagggatacagaaagaacagacttagaagaaccaggtccttgatgacatgattaagcctcttgatcagcctcctctgtagccagaaacctcggaaatgttcagatataacgtgagataataaatgccacggacagaaagtcctaacagatgcatgaccccacatataaatatgggcaaggtagtgaaaataacctcctgaggttgtttgcctctggatacaagccttttttgtcattcattatcatttgctcacagatgattcacatcggtactgtgagctggcctggggtgaccatccacaagctcagggctgggtttctagctgcatccatattccccttatattgaagaacaccttatattttatcaagagccccgaagtcaagcagctgatgaggttaaggtctgtctacacctgagcacacagccaaaacccccaagtcccagggactattcatttcactgtgttcgcaggtgggtttttaacaaaattagtaatgagatcttgcctccaaatcccttttccctggtgaattcactgggggaaaatcagcttgtctggggggagcctgcgtggcctgtttttttcaactgatgttgaaatcctaccatctcccagctctgcccttccacccgcacccacccacatggagacaactaaccattaacttgtcttttcccatttcactgaagaatttgcgagcacagactcagcactcaccctctctctctgacttcctcagaytccaaacagcacttatagaaagtcaaagtgtaattgtggagatgtatttgtgctctggccttttcaacattttgagaatcacacactgtgggctccccccagccctgcccttctccctaccccataaacaatgtctgacctatagcctttgaggtaggtttctgatgggaattgcagatgatggagccaccttctgctttagggacctcccccattcccgggtggacaccgcccccccc

SEQ ID NO: 59667 - DNA, 1152 bp, Homo sapiens
tgcatgatactcgccagattcaaaagggaaaatgtcctcaagaagcctttctgtcccctctattgagcctggagatttatttttccccccatgggtgttcattaaaggaacactacggcatgacatggaatccttatcctaacaacaacaggccatagaacactattcttttcttctattactccatagtgtgggaagatgggatggkaagaacaaagtctgtctctggaagcacgggcgctgtctctgaagacaaattgatcgtaacacaagcagacccggtggaacgacctccatgctgaaccctcagctccccctgcatttggaccatggcctgatggaaggtgcgagaaaccctgtgaccacgttacagcacaggggcagcttggccaggccaccccttgggcctaatttttctccctggccaaaggggtcagactattccagtgctgtctgctccctggcctccagagtaatcaaacacacatgtttggcgctccactaatcagggaatgaaataaagctagatgtttccatatgttgattcaatttacaagcaaaagtaagtgtcaggtagggggcacaacagtaaggggtgagcagtgaagaaatgattccacaatgacgtttcgtaaggagcaaaaagatgaggaagaaaaggggagacacatcattgaaggccaggctctgtgacaatttatatttgcctatatatctgtatctctctctgtcttatctaatgaaataccaacaacaacctgagaacagttctgtcttccgtcacagataaagagactgatctcagagtggtacagatctacaaccacgtgaagaattggatttatattcatctgactccagaaagttcctgagattcctctgcttcatcatctttcccatgccctttaaaacacgttatcaaatagcaacaggtggtgcaataactagacaaatgattctcagcctttttctttgccattagcactcccggaaggagacgtgttggacacttttccttgtcaccaccccatgaaccttccataccacaggtatactgtgtattcggttatgtatcatctgtacatctgtttctaaaacacagaaacagtaagagccccccatccaagaatccattttaatcctcttgggtgt

SEQ ID NO: 59668 - DNA, 662 bp, Homo sapiens
cagggattggggaagatgaccccacctacccaccaccagagtgcctcggacctcagcagatggcagctctctggattggggtcatgattaattcatctcttaatccctggcacctagtaagtgcctggtacacagcaggtgccccagtgaataattgaatgaatgaatgaatgaatgagctggctgagttgcctgctttaaattgttgtttgccaaacagttgctcctggatatcctggtgtcatgatattttctgtctgtgctggacatctttagtgtgtcactccaggcccaatcttcactctgttcatctaggcctgttggcttccagcccttgggtgtccagctagaggttggaagcaggtagagaaagaggccaggggrtgtttacagccccagttcctctctgcaatgtcccaggttggctgcatccctccaacaaaggatagggctcctatggggtggtcctctcttacagccaccctcttcaggttctggtaacttaccttcaggtgtggtgatagctcctcactgttgctactggaggggaagggcttctctaccccctgctcacacctttgcagataattgattagttagcgcttctccatttcctgtgtcagcataccctcctctgttttctagtgggatcctaactgata

SEQ ID NO: 59669 - DNA, 752 bp, Homo sapiens
tccgtgtacccaacacccagatgaacatgaccagaggagaagcacccagaaacccctctgctccccctcagccactaccttttccacgatggctgaatcttggcggtctatgcttttgatagaaatggaatgctacacacgtgtgcttgtgtgcctagcttttcttgctgctgtgcctacctgcttttcttgcctgcactacattacgaacttactcataaaaacactatgcagtcgagtatagctgcaggtrgctctttttcattgctatataacgtttcattgtgagatagaatgatttatttaaccattctcctgttgatagacatctgggttgtttggcaattatgatgagcgctgtggttaatgtcctcctagtgggtgtcttattttagacatataaatgcactgctgtatcacaaggaatgaaattgcagggtcaaagagtaggcaatgttcagatgtagtaggaacttcctaactgtttccaaagtggttgacaatgtccctggctccaagcttggaagcccagcccccgatgctgggacactcacactgtgcccagtctcctgccccagggtcagtgaaccacccccacctgctgctttctgccttctgtggccctgagatggcaattccaagatgggctgtcaataccaaaccttgtcacctcccaagacaacagggctgtcaatgacatctcaacaacggaatttctaacttgcaggttttaaaagggggttagcttttag

SEQ ID NO: 59670 - DNA, 1587 bp, Homo sapiens
tgccattttatatgaacacaagtaatggattaacagacaagctttgcaagacagaagctaaccaacctgactttaatcgtcactacctttgcagtcaggagctgggtaacttcctgcagtaagaagccttaggggaatgcaatttccattgctttgtgatgttaatttaaggcaattatcgtaagtagactcccaaaaagttttgcatattatttgtccttgtgaaagcccagtgctgttggagagtcggggtgctggagaagccctaggaaaggaatagtcagaatttatgttttgttttgttttgtttttgttgggacagagtctcactctgttgcccaggctggtatgcagtggcacgatctctgctcactgcagctctccgcccccggggttaaactgattctcccaccttagcctcctaagtagctgggattataggcaacgcaccaccatgtccggctaatttttgtatttttagtagagagggggtttcaccatgttggccaggttggtctcgaacccctgacctcaagtaaactacctgccttggtcttccaaagtgctgggattacaggcgtgagccaccgtgcccaacctagaatttacgtttttttgtttgtttgtttgttttgtttttttttttagagacaagtcttgccacattgcctaggctggccttggacttctgggctcaagggatcctcccaagtagctgggatttagatacttctgtaagagctgaagatcccaaagtttgaaaacttttagcgttttccaactttcctctgaaaggctggaaaccctgctccaagagcactctctacttaggkttttttttttttttttttttttgagacggagtctcgctctgtcgcccaggctggagtgcagtggcgggatctcggctcactgcaagctccgcctcccgggttcacgccattctcccgcctcagcctcccaagtagctgggactacaggcgcccgccactacgcccggctaattttttgtatttttagtagagacggggtttcaccgttttagccgggatggtctcgatctcctgacctcgtgatccgcccgcctcggcctcccaaagtgctgggattacaggcgtgagccacttaggtttttttttttgagacagagtcttgctctgtcacccaggctgaagtgcaatggcgcaatctcggctcactgcaacctccgcctgccgggttcaagcgattctcctgcctcagcctcccaagtagctgggattacaggcgcctgccaccatgcctggctaattttgtatttttagtagagatggggtttcaacatgttggccaggctagtctcgaactcctgacctcaggcgatccacccaccttggcctcccaaagtgctaggaatacaggcgtgagccaccgcctctggcctccatttagtattttctcggcacctgcattttcagtttttcctcggcaggaagggcaagaataaaactgcttctccagttcatttggctgtattagaacagttttgctgtgtatggagggaaaaaaatgggcatttttttctccttgacacttccgggaccacta

SEQ ID NO: 59671 - DNA, 583 bp, Homo sapiens
gcctcccatctgctcaggaggcttcggcagaaagatcacttgagcctgggaattcaaggctacaaatgtgctatgattacacctctgaatagccactgcactccagcctgggcaacataccaagaccacgtctctaaaaaaccaaaacgaaacaaaaaaaaaaaaaaaagaaaaacaaacacaaatcagggcactgacatgtacagttgtttcttgaaactgatggactgacaagacagcaatatgattggtggatcagacaaagttaccaacctaatagaacaacaagtcctaaggtcaagattaattgttatgtaacaaatcctggctgtccactggatattgctttcaaaataagagtccatagagggcagaggggatagatagtaatataaaaggtatttgttaataccgaaaagactgagaaaaaacacttccctttccaatgtgaaggactaaataatccaaacttttcccactataaaacacagacttttctaagtcattggatgtggggctctggggtagcctgagctgtttgtcccacaccaagatgcttcaaamcattattaaaaatgtttgg

SEQ ID NO: 59672 - DNA, 753 bp, Homo sapiens
  misc_feature (1)...(753): n = A,T,C or G
acatcagcttctaaaagcatggttgaagccatggtgcggtgcacagtctctcgaacaacatttgcacttttgtatgattaaccatcttgatcattcagtctgggatggaattactagaatagtgctctgaagtttaaagaaatgatggaaatggagaaaataagatgatactaagaaaaatataaataagacaacataaaaatgattaatgtatagagattaaggatatacatatatccttaattggatgttacttagttttaatgtggtcatttacacattcaattttaaatggaaaagcaaacataaacacataaaatactagaactatatagagataagtgtgtcygaaaggtgagatgtaatcacagatttcaataaagtattagagactcactcttgtaatcctagcactttgagtcaggaagattgcttgagtccaggagtttgagaccagcctggacgacacaggaaaactccatctcttacaaaaaaatacaaaaattagccaggcttggtggcacatgcttatactcccagccactcaggaggctaatgtgggagaatcatttgacaccgggaagtcaaggatgcagtgggccatgatcatgccactcccactgcagcctgggcaacagagtgataccctgtctcnatnnnaaaccaccaataaaaagaaaatattaaagattcagtggtgttctgatacaatggtgtttaccccttgcactggactccaagttccttacaaga

SEQ ID NO: 59673 - DNA, 765 bp, Homo sapiens
taagtaaatgaccacttctcagttcttccaggaattttcatggctgacaaataggccacagatgaatcgtgaggcaactgacttatggcactgagcatttccagaccacacacctgtaagttaaagagatagaaaaacaggaaaggactaacaggcctgccaaacacagtccacaccttccaatctagtagatacaccagggactcaacacgmcgcagcatcctccggtttacaccatccccaatcttgaagcgatactgaagctactctaagattcaagagcaatgctgtctttcttctcactacagtgccaatcttgagtgggcagaatttgctgaagggaaactctgaagggtaaatcaatgagataggagtaaggatggtattgaggttaaggagatggatgaagcagatgagcatccaccaaaatctgttctcacctttgagcatgtggccaagatagtatagagaagacactcagccctggcaaagaagagacacaggcaccgagatcccatggcctcatacatctggtatactccctcctcccttcccaagatgacccaagtcacatagcagaaagctgtcccttcctaacattgctgattatgctaaatttctaaccatcagaggaagagtctaaccatttatctccttgactaatgcccctcaaggttgctaaagcaagagtcaaacatccctgaacctgaccatcttccaaggttaccgaagcgagactctggcattcccgataagaaccggacc

SEQ ID NO: 59674 - DNA, 765 bp, Homo sapiens
taagtaaatgaccacttctcagttcttccaggaattttcatggctgacaaataggccacagatgaatcgtgaggcaactgacttatggcactgagcatttccagaccacacacctgtaagttaaagagatagaaaaacaggaaaggactaacaggcctgccaaacacagtccacaccttccaatctagtagatacaccagggactcaacacgccgcagcatcctccggtttacaccatccccaatcttgaagcgatactgaagctactctaagattcaagagcaatgctgtctttcttctcactacagtgccaatcttgagtgggcagaatttgctgaagggaaactctgaagggtaaatcaatgagataggagtaaggatggtattgaggttaaggagatggatgaagcagatgagcatccaccaaaatctgttctcacctttgagcatgtggccragatagtatagagaagacactcagccctggcaaagaagagacacaggcaccgagatcccatggcctcatacatctggtatactccctcctcccttcccaagatgacccaagtcacatagcagaaagctgtcccttcctaacattgctgattatgctaaatttctaaccatcagaggaagagtctaaccatttatctccttgactaatgcccctcaaggttgctaaagcaagagtcaaacatccctgaacctgaccatcttccaaggttaccgaagcgagactctggcattcccgataagaaccggacc

SEQ ID NO: 59675 - DNA, 765 bp, Homo sapiens
taagtaaatgaccacttctcagttcttccaggaattttcatggctgacaaataggccacagatgaatcgtgaggcaactgacttatggcactgagcatttccagaccacacacctgtaagttaaagagatagaaaaacaggaaaggactaacaggcctgccaaacacagtccacaccttccaatctagtagatacaccagggactcaacacgccgcagcatcctccggtttacaccatccccaatcttgaagcgatactgaagctactctaagattcaagagcaatgctgtctttcttctcactacagtgccaatcttgagtgggcagaatttgctgaagggaaactctgaagggtaaatcaatgagataggagtaaggatggtattgaggttaaggagatggatgaagcagatgagcatccaccaaaatctgttctcacctttgagcatgtggccaagatagtatagagaagacactcagccctggcaaagaagagacacaggcaccgagatcccatggcctcatacatctggtatactccctcctcccttcccaagatgacccaagtcacayagcagaaagctgtcccttcctaacattgctgattatgctaaatttctaaccatcagaggaagagtctaaccatttatctccttgactaatgcccctcaaggttgctaaagcaagagtcaaacatccctgaacctgaccatcttccaaggttaccgaagcgagactctggcattcccgataagaaccggacc

SEQ ID NO: 59676 - DNA, 1206 bp, Homo sapiens
ttaatgcatgtgctcaagctcactcacccaattcctgagatcttattggaagttgaytaccaatttcaaatgtttttatctatttgggaaattgcctctccctggcgcctgcaaccagctatcatttttagagaggcagtgtcataactgctgaaccgtcacctgatggtcccctgacatcctggtggggaggggagccctctcctgccctgttcatgcccatctaactacctgctgtcaagccccatcctggtagaattgctgtacctcctgagctggtggtgtgtagtatactaaaagagacatattgtggctaagatcaatgataaccataaggtccacctaagcatctcacagggctaatatgtgccacttagcaatatgatacaacctggccaggagatttccaggagacaaggccacctcagcacagatgtaattttcataacccttaaaacaaagcttaccctcacatgagtaacttaaactccctttatgaaagaaacatctggtaactgacccagactgaatccaggtatatgaaagggagaaggatcttccaaacccttagaatgatctctggaggaggagcctcccagtcagctggtctgaccccaactgtaaatggcccatgctcctactaaccatcttgcaagagcactgccggaacactgcttgagcatcatgtggtttctaagacttatctttgacatgaatcaaaccaaagatgaaaagtaacccttggggaagttagccaactaggaccatccaaaacctccaaacacaaaagggtttgggttggaaagggaacatccctagacaagaatgccacacttttactgttcattcttgaaattcagaagttttttttaagcaataaatgtttctcaatttattggggtttatttggtcaatttccagagcctggaaatgtttgtgacaattttatccagttttgtcattgtttttatgaaaagaatttgccaatcactgcagtcacacctctcatgcaaactcttgtggacagtttgtttttaattctttacctcattatttcctcattatgtttgcccatattaatccttctattctcagcttttgttttctagcctctcagtttctattttcagcattttactgtatttctctggaaaagttgaaatgaaaaacatagcatcagctatggatattatactataattacaa

SEQ ID NO: 59677 - DNA, 1222 bp, Homo sapiens
  misc_feature (1)...(1222): n = A,T,C or G
cattttatatatatatgctccataatttcataaagcctgctgtcatctttggcactcagcagataataatttctgttgaaagagttgagtgatttcttttctgtgcacgggcttctcatcaatcactccctgcatcttgaagcacaaaggattcttttgacacctggggagaggagtgtctctgcatcagacactgcacctgcagaaaaattcccatgctaaggaagatttggggagctcagaatagaaagtttcattagttccattctgtgtgtaatgacagcttcttctcaaggctgaggcaagcactcattctccaggtgaggacagcaatttacctgtagctctatgggtggcttgggaattgactgctccccaatgtctgccttgtcccattgggtagcctcagcttctgctcacctgtgcccccaactgggcctatgggccaaatagctctttaagacaaagaactgggaaatttgaaactcaatgattcagtactctcccttggaaattcagtagtgtcagaaccagggggcaccagataaccattttccaacaacacaacagcactgctttttttgtttgtttgtttttaccagaagaaagcggctgctaatggatgctgggctgacagcaacaatattattttccaagctgggccacaccagactttcttgggctgctccacaagggaaaatctgatttgtttattctgagtgaaaatcagtatgattgcagtttctgccgcttggttcaggatatcttantcagtgcgggcctgttttgataacctacagatggatggcagccccaaaacgaacatggcatgccaccctgttcttgtgtctactgattggaagcatctatcaaaatacctctttggagctgaatttctcccctgattgagtattttgaggcagcatatcagggagcttctatgtgttgaaaggtttcttttcacacagatgaatgtgtgttaggtaacttgtcatctcttagagttctgctttaattgcaattaatgttaaaaatatttttagttcctgcgcgccgggttctgttgctctttctgtcatgagtattttcacacgggctgtgtaaatcctcaaagattttattggaaagttctcacttcctattggaattttagaataactatatagtgtaatgaagaaagtgccactgaccattattttttctkgggaggctgctggatgca

SEQ ID NO: 59678 - DNA, 1311 bp, Homo sapiens
tgaggtcagtgagaatggggcaggaggccaggccagcccagctcgggctgtgtctccagctgactgagtatctgtgtgtgaggggcctttgtgtgtctgggcgtgtacccacttcccatatccgggtcttgcccatctgtctattgtgaggggaagagggaagcatctccaagacatgttgttaagtggaaaccaaaccaaaccaagccaaacaaaaaaacaagttgcagaacaatgtctacaatgttatcccattaataaraaatgaattaaggaagaaacgccacaaaacaggactcttaaatctacagatatatacatgtttgtaaacatatggagaaaggtctgcaaggatgcacaccaaactgtcaacagtgtaaggcactccaaggaaggggactgaggggaggaaacaggaatttcatttcatctgatttgttgttgttacaatgaatatgtactcatgtgttgcttgtagaaattctggagtgcagtggcatggtcataactcatagcagcctcaaattcctgggctcaaggaatcctctcacctcagcctcctgagtagctgggactacaggcaagcaccaccatgcccagctactttttaaaatttttagtagagatggggtctcactcttttgcctagcctggtcttgaactcctggcctcaagcaatcctcccacttcagccttccaaagtgctgggattatagacctgagccaccaaacccagcctagaatttttaagtaaggcaaaaatctgtaccacctatgtaaagtgcttcaagcagtctggcatataataggccttcaaaaaatagtgggttcctagccccaccaggctactccttggcaggaactctactccaaacttccctccagcccccttggtgtcagagcctggcacacagtaggtgcttcataaatggcagcctgtttatgtcttctctcagtccatgtcttgcttgtgttaagatgaaatgatctagctaggtggatgctttgtcaaatgaaaagatacacaaagtgaagggcacatgacttggcacacagaagaacatgggacatgcgtgtatttcccttgctacactgttcactctggttgtgtgcacgcagcatctgtgggccctggctggacacatttagtagatcagcagtaagtggcagttttgttctctggattgtttcatgttggtgtctgtggcccatctgcacacactcacacagcagggccgccatgaatagcagtggtggggcagaggggtccctggcaggtgggaccactgctgccttgggccctgtctacca

SEQ ID NO: 59679 - DNA, 744 bp, Homo sapiens
tgctttcctggccccagacatcaatggcagcaagtgccaggaaggttccaacggccaggctgtatctctcactctttgtgttccaaacaggtgactgctggtttgcccatcacaacgagcctcttgtgccttgtaggcttagtctaagatcagaaccatgggcactccttcttggcttcctcctcgactcacttgacttttcctgtgttggtagctcttcctcctctgacctttcagataccccctagttatgccagaagtgcagagtgcatttatgtttctgaatcctccttgctggtctggtgtaattcctgaaagaaggcatactgcagtaattttacttatgattctttttgcaactagcaagatcaaccagrtatttatttattttcattttttagaaaattttaatataattttaatgttgtagggagcatggggaatatggagaagggcaggaagagacttttgtgggtgatgttggttagcttgattgtggtggtgatttcatggatatatacaaatgtcaatatcaaagataaaaattgtataatttaaatatgtgcagtgtatcatatatcaattatacttcaataagcctgttaaaatagttttaacaatgatgatatattgcaacttttatgtattttaaactaattgagtttttatacatgaaattgtacatgtaattgagtttaaaatacgtaaaattttaatgacaagttaaattttataacatacatt

SEQ ID NO: 59680 - DNA, 731 bp, Homo sapiens
acatgagaccattctcccatggtatggaggaatagaggggatagcagagggcaggtgggggaaacagtcctcaggccggccttgggacctcatggccaggaaggatgagagcaggtagacagagcatcagctgcagggctgccttcctctctaacctgctcaccaaccacatcagttcgggagcagcccacagcctcttcagacaacagcctgaatggggaacgtgagggcagacccagctcccggctccctgcagcctccggaagcatgggactggacgttgttttgcagaggctggggcgaggaggataccatctgtcagtcttggctggatgacatcatgggaagggggtatagtggggccttgcaggccagaggtggcttggaggagcccctggaaagaggcttaagaggtgagactcaacagccatggcgacagagcatagggctttaagatgaatttgcaggggttacaggattacaactgcaatgtgggctaataatagtgccccctgcattaagctgcagagattgagcgagtaagtgggaagctgagaaaatgcccccatggggtagacactcaataagcatctgctgttattaccaggactcgtatggtcatgggtgacagcttcagaccacaggcagtccacctacaacctgtgcccctatccamcatgccatcctgcccacccacccacgccagctcccccaacccccaacacttttgg

SEQ ID NO: 59681 - DNA, 662 bp, Homo sapiens
ccttgttctccatccagcccccagacaaaagtccctctgtctaagaaggcggaattgaggggagggggcacccccaactgggaccatgggggagcctgcacagaccccatccggaaggaatgcctggaggaggaggagcaggagacaggggaggaaagggggagggaggcttgtacagtgcwgggggccttatgtggactaggaggcagccgcccccaccagcacccactctgtagacccaggcgtctggctcccagcacccacggaaagagcctggctaggaaactgcagcctggtgcctggcagacagttctcattctccccagggcagggagcaggttatgaccaggactaaggtcccagagtccccaccctgacccctccctgctgttccagccgctccctcatatccacccctgccccatctcctgactttggtcacgctagcatcttctgctgatcctgaaattgtaccagcggcaagatgtggcctggaaggggactttaagttctccacaactgccagcaatccttccaccaggcaaaacacatcatctaaggaaaagaagtgaggtcggaacaccaacgcatcatctcactgcatggccctggaggctctgccgtttaaagaccccagaaccttccccattcaaggtcctctc

SEQ ID NO: 59682 - DNA, 592 bp, Homo sapiens
agcctctgcctcctgggttcaagcaattcttgtgcctcagcctcctgagtagctgggattacaggcatgcgccactactcctggctaatttttgtattttttcagtagagacggggtttctccatgttggccaggctggtctcgaactcctggcctcaggtgatccacctgcctcggcctcccgaagtgctgtgattacaggtgtgagtcactgtgcccagctggacacttgcttcttgatgctaggaagaatgggctggacaactggctattactccctgaggattggggagggggttccccaaagggatattggagcatgagagggtgtttcttctgggcagagcaagcagaagcatccccaagaccccctttctgctcttggcactcgggtgttgatctaagcatcttctcttctcagaccaaggtgatggcactgaacgggaagccygtgggggctcagtacctgcccagctacctctccctcggcagctggtactcccccagccagtgctacctgcagctgcagccaccctcccacccactgcaggtaagattttcaggagctacccttcctgggccatgcgggatc

SEQ ID NO: 59683 - DNA, 813 bp, Homo sapiens
cttcttttctcaccagctcaggctgaaaccctgaaacccctagtcatcccagattctccctctcctgcacccccacagctgatgagtcagcgattcctatctcagggtcccttctttcctattacatcaggcttcattctatttttatttttatttttatttttatttatttatttattgagacggagtctcactgtcaccctggctggagtgcaatggcgtgatcttggctcactgcaacctgtgcctcccgggttcaagcarttctcctgtgtcagtctcctgagtaggagggactacaggcgcatgccaccaccccagctcatttttgtatttttagtagagatggggtttcaccatgttagccaggatggtctcgatctcctgacctcgtgatccgccagcctcagcctcccaaagtgaggtacctgctgggaccactcctcgtacctgcctgtcaagatgttgttcttccctttctgggaaggagctctgtgttttgttaccactgtgtctctactggaatatagtaggtgcatcaatgtctggtgaatgaatgaacccagggataatttgagatctgctgtgatctcttccacagagctctcattaccctcctctcttctcagtttgggtgttcacctatgccttcttgcccaggtgaccagggctggctgctccttgtgtcccttttcctgttgaggtggcccaccctcactgaaattgtcctctggcagcccttggactgggctgtctgagcttcaactagcagaggcacctcgccggcttccctgtgcttcttgggtagtgagg

SEQ ID NO: 59684 - DNA, 738 bp, Homo sapiens
gtggcacagggtccagaaggttcccggaggcacttaggcttcctgagcccatggacccagcacgccagcctgtctcagccctgaagggcagttggaggctgatggaaggtttcaggaagcagggaacgagcagtggttgtgcctggtggttcagatgaccaggactgagaatggactgctgggctcaggagcaagggaggtcacggtggtcttgtccaaaggtgttctggtgcggtggtgtgtctgcaagctggattgtggggggcgggattcaagggaaggagaaaggagagaaaggggagctggtgaataaagaacttggggtgtttgctgtcaaggggatgggagaaatggggggaggcagagagtgcaggtaggaggaagaatgacctccagcatctggtggagagaggagctgtggggattcaggcagggaggtgggacgttgyggggcatttccttttggaagtgagggctgggctttagcgcccagaatggggggcgctttatcctgggagcacaaaggtccattcacagggccgggggaatgcagccatcaggactggaggtggctggatgtggtggcgggagggtctcctggggccacttctgtcttcccagtgaaggaggaaacaggtcacctgctgagaccaagggttgggcctggcgtaggaggtgggaggaacagttttgagggaggggtccgggagagggctgggggacagaatgggactaacc

SEQ ID NO: 59685 - DNA, 745 bp, Homo sapiens
cttggacgaaattgggcttttagaagcaagtggtattgttcaaaaacacggcctgcgtttcctggcttgaatggagagtgtctcttgactgtgctgactttcggggattcttttcttaacagcagatagcagtggggtcggaaagggtgacctgcagtccacgttgctggaagggcatggcacagctccacctgacctggatctctctgctattaatggtaaatcatttgtttcaccccttctgtcactcactgggggttgcagtaggtctcagtgggcttccaaagtacaattggcctacagtggggtcacatccaacaaacccattgtaagttgaaaatattgtacatcaaaaatatacttaataccttggtaaagggtattaaacttgccttttgccccttgcaaagttgaacaactttaactggactgttataagtccatatactcctcaatttatgatggggttacatcccaataaacmcatcattagaaaaaaaatggcaaccagggaccagtctatatacgctacttgccattaaaaatgctgtgctttatcttagacaaaagcatcgtcaaaaagacgccacagttagcaaaaacaatatcaaagaaacctgagtcaacatcattttctgcccctcggaaaaagagcccggtaagtgtctgaaagaagagggcagccacagatgggttgcatagatctgatttagagtccactctgaaccagatgctgagtgcccac

SEQ ID NO: 59686 - DNA, 745 bp, Homo sapiens
cttggacgaaattgggcttttagaagcaagtggtattgttcaaaaacacggcctgcgtttcctggcttgaatggagagtgtctcttgactgtgctgactttcggggattcttttcttaacagcagatagcagtggggtcggaaagggtgacctgcagtccacgttgctggaagggcatggcacagctccacctgacctggatctctctgctattaatggtaaatcatttgtttcaccccttctgtcactcactgggggttgcagtaggtctcagtgggcttccaaagtacaattggcctacagtggggtcacatccaacaaacccattgtaagttgaaaatattgtacatcaaaaatatacttaataccttggtaaagggtattaaacttgccttttgccccttgcaaagttgaacaactttaactggactgttataagtccatatactcctcaatttatgatggggttacatcccaataaaccyatcattagaaaaaaaatggcaaccagggaccagtctatatacgctacttgccattaaaaatgctgtgctttatcttagacaaaagcatcgtcaaaaagacgccacagttagcaaaaacaatatcaaagaaacctgagtcaacatcattttctgcccctcggaaaaagagcccggtaagtgtctgaaagaagagggcagccacagatgggttgcatagatctgatttagagtccactctgaaccagatgctgagtgcccac

SEQ ID NO: 59687 - DNA, 468 bp, Homo sapiens
tggctaatttttgcatttttagtagagacggggtttcaccatgttggccaggctggtcttgaactcctgacctcaggtgatccacctgcctcggcctcccaaagtgctgggattactggtgtgagtcaccacgcttggcctcctgtctcttaaaaaaaaaaaaaaattgaatcatttcaggaaaagattacaaaggaaagaaaaaggaacataggacaggtggaacaagtaaaagctagacagtaaagtggtagacgtaagcccagctatatcagtaattacactaaatgtaaatggacaaaatgctctagwtagacagatttcctgactggatccacacaaacaaaaacagaagaatcacacccatctctccttggtgtccccacccccagcctcaggtttggtggtggtggtggtggtggtggtgttgttgtttaagtattttttagttttgtgtgtgtgtgtgtg

SEQ ID NO: 59688 - DNA, 468 bp, Homo sapiens
tggctaatttttgcatttttagtagagacggggtttcaccatgttggccaggctggtcttgaactcctgacctcaggtgatccacctgcctcggcctcccaaagtgctgggattactggtgtgagtcaccacgcttggcctcctgtctcttaaaaaaaaaaaaaaattgaatcatttcaggaaaagattacaaaggaaagaaaaaggaacataggacaggtggaacaagtaaaagctagacagtaaagtggtagacgtaagcccagctatatcagtaattacactaaatgtaaatggacaaaatgctctagtyagacagatttcctgactggatccacacaaacaaaaacagaagaatcacacccatctctccttggtgtccccacccccagcctcaggtttggtggtggtggtggtggtggtggtgttgttgtttaagtattttttagttttgtgtgtgtgtgtgtg

SEQ ID NO: 59689 - DNA, 597 bp, Homo sapiens
tatagtttttgatgtctataaattctgctgctcacataaccaattgccatggctgggtaccacaagacttggttttatccatgccgtgtgcaccatggatccatcacctccaatgtcctaccaactccaggcactgacaaggacctagggcagagtgctgaccaccccaggctctggcttcggtcctcttcctaggttaaaggacgatctttctctcccttgctgctttccacagatccatattccttcaggaaccctgtggacacaatcttcagtggcttcggcttttataaagtaaaggaaaagggtttcttcccattcccagcttctgctgtaagctctgcacctgtaccccacagaaagaaatacaaaytgcctggttcacttcttgaagtgagatgcagtggggagagaatgcaaagatccaaattcagctcccaccctaatagaacacccaagaagcctgccttcctgctgcatgcttgggtgggattctgctcgttgcaatcagaaatgccaaatggaaacagttctacaatcaggggagtgtatttttagggattcttttctctggagccttcctccagcctcctcctt

SEQ ID NO: 59690 - DNA, 831 bp, Homo sapiens
acctgggagacggaggttgcagtgagctgagatcacaccacctgtctgggcaacagagcaagactctgtctcaaaaataaaaacaaaaaagaaaaaagaaatgagatctcgctcggtcacccaggctgaagtgcagtggtgcaatcagggctcactgcagtctcaaactcctgcctcagcctgccaagcagttgagaccacaggtgcatgccaccacgcttggctaatttttaaatattgtatagagatggggtctcgctatgtttcccaggctggtctcaaactcctgggctcaagggatcctcccacctcagcctttcaagtagctgggactctgcgtgcatgccacctcgcttggctggaagggaattttttacaccaggtgaggccttcagggggactgaccttggcgcttgttaaacaagggtggctgagtaatgctcccatagcaagaggcaaacacatgcccagagatgggagacagtctctgaaagggaggacaagtgcaggccacctcctgcctcataccgtaaaggggactgaccatctcctaaatcctgccagttagcacgatcgtccctttcctacctgtgaggcagcaataaacaggtgacgyggagggagtcgctgagccctgctgaagaacagcaggtggggctcagccagggcggcccctatcccttaggtgcagtgctctgctgggtcccgagaaatgcatttcctagacagagccctgtatgtttcagagagtggccctgggggcctggggagacacggtgtgcggtggaaggcagggtgtgggtttgtagtgccccgaggggcaggagcgct

SEQ ID NO: 59691 - DNA, 695 bp, Homo sapiens
tccataaacagggctagaggcagtccagttgtaatgggggtaaaggacactgcagggcacagagacacacagaccctcctgcacagtcaccgactctggcacctccagcctgtatcttgacagtaggtcctgggacgctgtggagaaacgagggtcagcccagcccccactgtccctctcttcatttgcccatagcaggggcagcagcatctctgaggcagaggcttcctgggctccctgtgtgagcagagaagggggagggagaggaggggcagggctgtgggacccacagggggctggagaggagctggagacctcagccctgcatggaagagaaactgcaaacccacatgctataggaactcattccctctgcacagagtgaaggaaaccctaaagctcagagaccctagagacccacccagggaggagaagagaccgtgtccygcctcctacctccgggcttccctgaagcaccagggcctgcaccagacacgtaggtcctgccctcccggcctctggaccatcgtggaggtccctcctgtcttttgagcatctaaatgtggatctccgaggacctcggggcatgagagatggaggggccgtgtgctgagtctccctgtccaggctcaggtgcctctgctgcccttggtttgcgccaggaagtgcttcctccctggcctggcctgagagag

SEQ ID NO: 59692 - DNA, 706 bp, Homo sapiens
ctgtcagggccgggtcacccctggaagatccaccgtccactaccccgtccactcctggggaccctgaggccagagaggatgaaagactcacccagattccaaccccatgcagggcccaccccgcccactgcctccctctcagtgcccttccccttgggtgatattttccataaggtgaaaatgagtcccatrtggccagacctatgaagtacaggctgtggatgtctctctgtaggtcagaggtgacactaggatataagagatgggggtgcaggtgggatgagcaggcaacctctccttcctccctcagcggccgtgaggtggagttcaacacagcagagctagacactgtccccaaagagtcactgtgtagtggggagacactgaggctcctgatatctgagctctccatggcaggagcttcagtgggggtaccaggcagggtgtggtcgctctctcctatgttggggaatcagtctcgggaggactgagcagagagacacggggtcgtggaggtgaggattccgtgtgttgatacacaccaaagacacagagaagagcccagttcacaggaggcctgagaagctaaggctgtgactgttgtacagtgaggtctggaagggaggaatgttggatgggaagggacagatttctaaaggggcaggcgtttctctctcggccatggctctctgggttcaggatggga

SEQ ID NO: 59693 - DNA, 706 bp, Homo sapiens
ctgtcagggccgggtcacccctggaagatccaccgtccactaccccgtccactcctggggaccctgaggccagagaggatgaaagactcacccagattccaaccccatgcagggcccaccccgcccactgcctccctctcagtgcccttccccttgggtgatattttccataaggtgaaaatgagtcccatgtggccagacctatgaagtacaggctgtggatgtctctctgtaggtcagaggtgacactaggatataagagatgggggtgcaggtgggatgagcaggcaacctctccttcctccctcagcggccgtgaggtggagttcaacacagcagagctagacactgtccccaaagagtcactgtgtagtggggagacactgaggctcctgatatctgagctctccatggcaggagcttcagtgggggtaccaggcagggtgtggtcgctctctcctatgttggggaatcagtctcgggaggactgagcagagagacacggggtcgtggaggtgaggattccrtgtgttgatacacaccaaagacacagagaagagcccagttcacaggaggcctgagaagctaaggctgtgactgttgtacagtgaggtctggaagggaggaatgttggatgggaagggacagatttctaaaggggcaggcgtttctctctcggccatggctctctgggttcaggatggga

SEQ ID NO: 59694 - DNA, 706 bp, Homo sapiens
ctgtcagggccgggtcacccctggaagatccaccgtccactaccccgtccactcctggggaccctgaggccagagaggatgaaagactcacccagattccaaccccatgcagggcccaccccgcccactgcctccctctcagtgcccttccccttgggtgatattttccataaggtgaaaatgagtcccatgtggccagacctatgaagtacaggctgtggatgtctctctgtaggtcagaggtgacactaggatataagagatgggggtgcaggtgggatgagcaggcaacctctccttcctccctcagcggccgtgaggtggagttcaacacagcagagctagacactgtccccaaagagtcactgtgtagtggggagacactgaggctcctgatatctgagctctccatggcaggagcttcagtgggggtaccaggcagggtgtggtcgctctctcctatgttggggaatcagtctcgggaggactgagcagagagacacggggtcgtggaggtgaggattccgtgtgttgatamacaccaaagacacagagaagagcccagttcacaggaggcctgagaagctaaggctgtgactgttgtacagtgaggtctggaagggaggaatgttggatgggaagggacagatttctaaaggggcaggcgtttctctctcggccatggctctctgggttcaggatggga

SEQ ID NO: 59695 - DNA, 706 bp, Homo sapiens
ctgtcagggccgggtcacccctggaagatccaccgtccactaccccgtccactcctggggaccctgaggccagagaggatgaaagactcacccagattccaaccccatgcagggcccaccccgcccactgcctccctctcagtgcccttccccttgggtgatattttccataaggtgaaaatgagtcccatgtggccagacctatgaagtacaggctgtggatgtctctctgtaggtcagaggtgacactaggatataagagatgggggtgcaggtgggatgagcaggcaacctctccttcctccctcagcggccgtgaggtggagttcaacacagcagagctagacactgtccccaaagagtcactgtgtagtggggagacactgaggctcctgatatctgagctctccatggcaggagcttcagtgggggtaccaggcagggtgtggtcgctctctcctatgttggggaatcagtctcgggaggactgagcagagagacacggggtcgtggaggtgaggattccgtgtgttgatacayaccaaagacacagagaagagcccagttcacaggaggcctgagaagctaaggctgtgactgttgtacagtgaggtctggaagggaggaatgttggatgggaagggacagatttctaaaggggcaggcgtttctctctcggccatggctctctgggttcaggatggga

SEQ ID NO: 59696 - DNA, 706 bp, Homo sapiens
ctgtcagggccgggtcacccctggaagatccaccgtccactaccccgtccactcctggggaccctgaggccagagaggatgaaagactcacccagattccaaccccatgcagggcccaccccgcccactgcctccctctcagtgcccttccccttgggtgatattttccataaggtgaaaatgagtcccatgtggccagacctatgaagtacaggctgtggatgtctctctgtaggtcagaggtgacactaggatataagagatgggggtgcaggtgggatgagcaggcaacctctccttcctccctcagcggccgtgaggtggagttcaacacagcagagctagacactgtccccaaagagtcactgtgtagtggggagacactgaggctcctgatatctgagctctccatggcaggagcttcagtgggggtaccaggcagggtgtggtcgctctctcctatgttggggaatcagtctcgggaggactgagcagagagacacggggtcgtggaggtgaggattccgtgtgttgatacacaccaaagacacagagaagagcccagttcacaggaggcctgagaagctaaggctgtgactgttgtacagtgaggtctggaagggaggaatgttggatgggaagggacagatttctaaaggggcaggcgtttctctctcggccatggctctctgggwtcaggatggga

SEQ ID NO: 59697 - DNA, 533 bp, Homo sapiens
ccagatgattggacamccctgctagaggataaaagtagtaactctcctctcagcagtctgatggaactgggtaaaccaaatttgatgttccaggtctgataaggagaggcccagtaaacacctcaaaccttccgttaggactcaagaagggttacagattaaaagtaagggtccgctgggcacagtggctcacgcccgtaatcccagcactttgggcggctgaggcaggtggatcacgaggtcaggagatggagaccatcctggctaacacggtgaaagcccgtctgtactaaaagtacaaaaaaaaattagctgggcgcggtggcgggcacctgtaatcccagccactcgggaggctgaggcaggagaatggcgtgaacccaggaagcggagcttgccgtgagctgagatcgtgccactgcactccagcctgggtgacagagtgagactccatctcaaaaaaaaaaagtagtaatattttaaaactatcaaaaaggcaaaaaagggagataaatataaaaggacaaatataa

SEQ ID NO: 59698 - DNA, 533 bp, Homo sapiens
ccagatgattggacaaccctgctagaggataaaagtagtaactctcctctcagcagtctgatggaactgggtaaaccaaatttgatgttccaggtctgataaggagaggcccagtaaacacctcaaaccttccgttaggactcaagaagggttacagattaaaagtaagggtccgctgggcacagtggctcacgcccgtaatcccagcactttgggcggctgaggcaggtggatcacgaggtcaggagatggagaccatcctggctaacacggtgaaagcccgtctgtactaaaagtacaaaaaaaaattagctgggcgcggtggcgggcacctgtaatcccagccactcgggaggctgaggcaggagaatggcgtgaacccaggaagcggagcttgccrtgagctgagatcgtgccactgcactccagcctgggtgacagagtgagactccatctcaaaaaaaaaaagtagtaatattttaaaactatcaaaaaggcaaaaaagggagataaatataaaaggacaaatataa

SEQ ID NO: 59699 - DNA, 504 bp, Homo sapiens
cagaggaggtggaatcggccccgggtctcctcctgcacttcttcgtctgggtcgtttgtggccactggaacatcagccccttccaggaaccagtagccataaccatagtacgaggctggaagggtagtgggcaatctgcagggtacgaggacgcacagaccctcctgcaccgtcagtgactctggcccctccagctggaatctccgctcctgagccagggcccctatggagacatgagggtcagctcggcccagccccacggcacctctcccctggcccactcacctgcccacagcaggggcagcagcagcggtagcatctctgaggcggaggcttcctgggctccctgcatgagcagagaaggggaagggagtggaggggaaggactgyggggaggaacgggtggctggggaggagcgcgtgatctcggctgttcacagaagaggaactgcgaagccacaagccctcggagctccactccctctgcacagagcagacggaaac

SEQ ID NO: 59700 - DNA, 828 bp, Homo sapiens
gcattagagggatgtgaggagccatgtggagcagagtgggcgtggggcaagagtcaggaggtgagacgagccagggcatggtggagaagggcacagggtcgtgtccatcctcagaagtgactgcagagtgaatggaggagtgaccagggctggcttgcagtggggaggagggtgggtctgtttggttttgcataatagctttatcaagataaaattgacataccataagttcacctattaaaatgtaccactcagcggttttgagtatattctcagattgtgtgcagctatctttactatctaactccagaacatttcatcaccatcttagtcagcttggggtaccgtgacaaaataccaccgcctgggtgtcttgtacaacagacatttatttctcacggttctgtaggctggaattctaagagcacagtgccagctgattcgggccctggtaagggccccttcctcaattgcagaaggccgccttctctctgtgcccttatatggcagagagaggaagcaagccctgtggtatttcttcttataagatcactaatctcattcttaaaggccccaccctcgtgacctaatcacctcccaaaggcctcatctccaaataccctcacaatggggattagggtttcaacataggaattttgctatcgacattcagtccatagcagtcactctccgtctttcccatcccctgccaaccagtaacctactttctctctctatggatttgcctgttctagatattccatacgaatggaatcttacaatttgtgacctttgtatctggyttctttcactcagcagaatgttttc

SEQ ID NO: 59701 - DNA, 1163 bp, Homo sapiens
ggctggccggggtgtcctgatgcagcctggggcctgctttgctccccagcccaggggcccgccctctccctcatgcctccagctgctaggagcttggtttccccctggacaccatctcccaagagcctgagaagtgcaccatgattggtaaaggggaccctgtctcctgggcacctgcatggcagcaccccttccactcaagacccagaccttttgtgcctgcggggatggggagtggccttggccccggccctgggctctgtgcaggggaaaccccacaggaaacgagcctggccaaatggccgcccttcccgttctcgtccctgggacacgaatgtgctgtctcacttccggaggcggcccagggaggctggccgccctgcggggcctcgcctgctcccagttggcgcctccagaccctaaggggacagggctgggctggggcctgatgggaaagagtggctggtatgtgtgtatgtgtgtatagggaggggacaaaacaggacatcactcgccgcctgtctcgaagtggtgagcgccaccacatcgggcggacactggggtcctggtgtgagacacccacgtttccgttatcctttgccttggcaaagacagcagcagctctgtcgtgatcatgtttatcactcatggggtcctcaccatgacttatgaagtccatacttattatccctgttttgcagatggggaagctgaggcccagagaggttgagtgacttgcccagagtcacccagctcagaagctgcagagctggggctttcaaatctgggcagacttgggctccaaaactggagtctgctagccaggtgttgggctcttatcaaaagargctccactcactaaagacttagggctggcttcatgcatttgtgaaacgggcagtctcacggcagccctgcttggagggacctggaggttagtttaatgttgcactgctggggtcatgaatttttttttattattattaatttttttgtcttgtattgcccaggctggtctcgaactcctggccccaagcgatcttcctgtcttggcctcccgaagtgccgggattatagggatgagccaccgcgctcagcctgaaattattttctttttttaaacttgtttttgtttattttagagatagggtcttgctctgtca

SEQ ID NO: 59702 - DNA, 1252 bp, Homo sapiens
cctgtagtcccagctactcaggaggctgaggcaggaggagctcctgaggtcaggagctcaaggctacagtgagctatgatcactccactacattccagtctgggtgacagagtgagaccctgtgttttaaaaaaaaaaagcgtcttttctgacatgttttcctgaccctgcttaatgctgatgatgtctttgttgcacaggcaaggagcaaactttcccagctgcatgaaagccgccaggaggcccacaggagcctggagcagtatgaccaggtgctcgatggagcccatggtgccagcctgaccgacctggccaacctgagcgaaggcgtctccctggcagagaggggcagttttggagccatggtaaaggttgaataaacgtattacagtatggggctctggtcccctggtgtgacagcagaacatcccacccgccagatctgttcatggccaacgttggttccagccaagtgcaggcggctgtctgttgtttttgctgccactttgcgcgttcacaccaggccttgcagcctggcacaggtggccatgctgaatcctggcttccagaacaaagtccaagataggcctggatcctttcagaacctgttttgaatgccctccatctctgcggaagtatttacattgggccaaccacccaarttcagagggcttctcaaacttaaccaaaattggatcagtttctgctcattgtggaaaccccacattctactaatcagggggccagggaacatctgaggggcatgtgtctatgtgtatgtgtgtttccacaaggaacaccttgaaaagcaaatgtgttgctaaagatgaggaagtaatggcaagcagcgccccagggtgttgctctttcaagtaagaattggcctctcctgaaattttggttatgtttaaaaacctctgcactttactctgacctcatgaccctggagttgtgatcaggcctggggcaggggactgtcggccccttacatttttgagagctcttgagcccctgataccaagacaggtgtgaccttttccttaggtggtcacatcccccctgttcacaccagagtctgcccctgcagcctcgaacctggggacatgtagtttcccatttcgtcttggtgctgttccgggagcggatgggccgggccgcgcatgtctggatgtttccttggtgctctgctgcctccagcagctctctccgtgctgccaccctctctcccagggctcctccctggagcccttct

SEQ ID NO: 59703 - DNA, 3340 bp, Homo sapiens
ctgacctgtaacggatgctcaccttttgttgaatgagtgaatgagagacaaccgtttcgaaactgctgtggggggaaagctgtctaaaaggaacagcctccacgctgcaattctagcttcgtaagcggggctccaagctgctccttgccaagtgcctgctgtgccacggacgagctaggggcctttggcaaattgctgagcctctctgtgcctcagtttccaaccccttaaggtggagatcaccgtagttccccacctccagtgcttgtggtgagggtgaaatgtgctaatgaggggtcctggttatctcttgcccagggggctctgccctttgatgacgacaacctccgccagctgctggagaaggtgaaacggggcgtcttccacatgccccacttcattcctccagattgccagagcctcctgaggggaatgatcgaagtggagcccgaaaaaaggctcagtgtgagttgagggggggaccggcggaggggggaacagtggccgatgaagacagaaccccctagaaaagtcatggggatgggtttccagaaccctgctcgtcagtccccagggtgactgggatcgccagctgagccgcagcccaggtccagcacagctgccgctccaaactggggagggggctacgcaagattggggcggggagctccaggcagcgggagggcgcaggagtaaggaggcgaacaggatgccactgcgcatgcggcaaagtaatgcggccggtccggggtacacggagaccgcgcgtgcgcggggcgatgcactcagtcgccactagagggcgatgtaatatgtcatcctgcccccggtggggtgggcggggagatgatcagggaccccaaaaccaccccagtctttcattgcgcgcctacatgtgcctacgacctcacttctgcttctctacgactcaccaccctcacagctggagcaaattcagaaacatccttggtacctgtgagtatggggtaactggactcttgggtccctggcggaaataggggaggggccaaagcagtagaagcggctgggaggggtgggatgccagggttcctgagaggcaacgggctagggactcggacttatgggtcctgggggaagaggacacagctagagaaggagtctaggggtcagaggcaggaggggctaagctaggagtccaggactcccaggtttgagggaaaaagggactgggggcctggactcctggatccgagggaggaggggctgggggcctggacttctgggtctgaagaaggaggggccgggggcctggacccctcggtcggagggaaaaggggctggaggtctggactcctgggtctgagatggggggcgaggtctggggcgtctggattcctgggtatgagagagaaggggccggggcctagactcggatttcggggtccgggatcattgagtctagaatgaagaatgctgaatctcagaagcccggttcccaataatgtttctccacttccccagaggcgggaaacacgagccagacccgtgcctggagccagcccctggccgccgggtagccatgcggagcctgccatccaacggagagctggaccccgacgtcctagagagcatggcatcactgggctgcttcagggaccgcgagaggctgcatcgcgagctgcgcagtgaggagtaagaccccaagacccctgcacccgtgtacccacgtggggcgagctgcagcagctccctgcgcacatgcagagtgctgggcgaggaaccctggcctctcatggggcatggtttgaagctcccgcctgggagtgatggaaccagcggagaaaacggcccagaaacacgctgagaaagtattaatagatgctgcgacatagtacttacatatacatagtacttacaaatagttcttgcctggatgttaggtgttacagtgttattataattgagtgaaacacagctgagatgtaccctaaaccagagaaactgaccatactgatacctagaaaaaatggaaccatgggcagaaatacagggagcggaggagacctcctctgagcattgatgttggacctcagccctctgctacctctttccacctttcccaccccctgccttagggagaaccaagaaaagatgatatattatctgcttttggatcggaaggagcggtatcccagctgtgaggaccaggacctgcctccccggaatgatgttggtgagaaggcagggctaggggaccagacacctgggtctcgagattggaagaggctggccacggggaccccagattcccaaggaaagaaggggctgcaggctctgrgcttccagctttagactgcttgacttgctctttgacatttatcaaatcccctctccactctaggcctgtttccccatgtgtgcagtttctgaggcagttgtacacagctgggtgaaaccatctcttgattgggttgaaactgttgtccctcagaccccccccggaagcgtgtggattctcccatgctgagccgtcacgggaagcggcgaccagagcggaagtccatggaagtcctgagcatcaccgatgccgggggtggtggctcccctgtacccacccgacgggccttggagatggcccagcacagccagaggtgggagcccctgtccctccaggaggatccacaatccctgggtctaggagttcaagattctaaccccagctctacctcaaatgtgctgtgtccttgggacaattcacctcccctctctgggcctcatttcctcacctggaaggactgtagaagtgagggaacatctgtggtttttgaaaccctcccatctgattttttttttttaaatctatcctggaaacagatcccgtagcgtcagtggagcctccacgggtctgtcctccagccctctaagcagcccaagggtaaggccaggtccccagtgggatttaagaaggagaaaggggtggagacatggagcaaagattgagtagcagaaactacaattcctgtgcagtcttgagacttgcttctttgtccctggagggccaaagacccaaggcctccaaagtattttggtccattggccatttctacctccttaggattgcatgcctgaagagattttacaaaagttagttgagtgcctgctgtgtactagtatctgcaccggctgggttttcagcccacagcatgatagaaagtctttgctatccttgctctggggcctgggaaggaggatacttggactacaagttgcagcatgcaccgggccagcgtccgtgagtgtgcgtgtgagtggggctcctagagcctcctgggagttgtagtccactcgcttatctcag

SEQ ID NO: 59704 - DNA, 494 bp, Homo sapiens
gttgtattgccagggaaagaagtcagagagtgccaagacggttattcacggcatggttatgcctatgactgacccatggcctccagccacacccgccttctctgggactcagtttccctctctaggaaatggacacatagctgcctggaaaagggaccatctccagccctcagtgtcagtaaaaacgtcaggcaattgcttgagaacggtggccagagctccctgagcaggccttttggaggggcttagagaggaggagggaatgctgaagttggccttcctttgctcatctgtgcagtgcggtcgcagtgccctcycggtgtctctgccagtctgtgcgtccacagctcttcttagtttcttggcctttttcagccatggatgagagcattaacatctgggcctaatttggccacaggtacctgaaaagacccctggctaccagcttcccctcatggggcctcagcttctgaagaaggaataaggaaggtgtg

SEQ ID NO: 59705 - DNA, 645 bp, Homo sapiens
cattgtaagtgtgcagttccagagccagaagataaccagataatttataatccaagcaataatattgcaaaagtaaaaggaggcactatttaatcatcattccagggcaatagctgtatactattcagacaaactgaagagtaaagtcccctagtttaaaaactcgacaaacgtaaaatatgcttgcacatctttttagtaataaatatttaccttgcatctactattttcagagacacatactaggcactgtagcaatatatatagaacagtgtacagggcactgtggtgaatttaaagacaagtcatatatcttcctatcttgtggttcagaattcactytaggacagagaacattaaaaatacaataaaaagcagtaaatgatggtgcaagctgaattaagcttgatgtgatgttagccagccacaaggtttccaacagaattactgatatgatttggctgtgtacccacccatatctcatcttgaatcctagttcccattgaattatagttcatttctataattcctatagttccaattttatagttcagccaacaatccccatgtgttgtgggagggacccggtgggaggtaactgaatcataggagcagtttcccccatgcagctgtcgtgatagtgag

SEQ ID NO: 59706 - DNA, 725 bp, Homo sapiens
aaccgattaatatttgtcctccaaaatttactgcaacacgtaattctgaactgaaaaataaaaaacccaaacttcaaatttctcagttttttcctatgcaggctaccatctcataggggtatacaattggcagtttatttttttcccatttttcaaattaaagtgaatttcttgagtttcatgacgatgaagcttattcataaagacaacgtgtgtggataagtcagcctatttgaggcatctagggttaatgttactctgaaaacagatgtgctactgggacagtccctgcagcagcatcaggcacttcctctactacacagtagtttataaaacacccagtaaacaattttaagtagatcatccctttactcagaggtttacatggttccactgtcacgcatcatacaattaataacaggcatgttttggaccttacaaaaatcgacatcattgtcctttcatttccacctayatatataatagatcttcagatgaatactgaaaaacttgatcaaaaatggatgtttatgtatacattattcagtgctcaaatacttcaaaacatttttaacagtgacaaatcactgaattttcattcagaagtttgcctattttacacatctatattcaatgagccttcaatagtactagcaaagtggggggagagtgggcagtgatcattacatcttcccactaaataccaacatccagaatcctgctct

SEQ ID NO: 59707 - DNA, 725 bp, Homo sapiens
aaccgattaatatttgtcctccaaaatttactgcaacacgtaattctgaactgaaaaataaaaaacccaaacttcaaatttctcagttttttcctatgcaggctaccatctcataggggtatacaattggcagtttatttttttcccatttttcaaattaaagtgaatttcttgagtttcatgacgatgaagcttattcataaagacaacgtgtgtggataagtcagcctatttgaggcatctagggttaatgttactctgaaaacagatgtgctactgggacagtccctgcagcagcatcaggcacttcctctactacacagtagtttataaaacacccagtaaacaattttaagtagatcatccctttactcagaggtttacatggttccactgtcacgcatcatacaattaataacaggcatgttttggaccttacaaaaatcgacatcattgtcctttcatttccacctatatatataatagatcttcagatgaatactgaaaaacttgatcaaaaatggatgtttatgtatacattattcagtgctcaaatacttcaaaacatttttaacagtgacaaatcactgaattttcattcagaagtttgcctattttacacatctatattcaatgagccttcaatagtactagcaaaktggggggagagtgggcagtgatcattacatcttcccactaaataccaacatccagaatcctgctct

SEQ ID NO: 59708 - DNA, 1002 bp, Homo sapiens
tacagtgtgggtgagcatctcttccaacatatttgcaatccatttccaatgctggacagagccactttctccctctgtctccattatccctctagcacawaaaggatgactgctatcccaggccctgtgcaaaattattactttagtgccaactcacatactcagctgacattattttgtaaaaaatatatagcaattcagttaatttgtctgcttccagacctgaaaaatgctgacacttcgggcctatgtttgaatggctcacaggtcatatttggacaaggaggagggtgggccaggaagacacactccacccacgactccaatatttgcagcactaggtggtgcttaatttctgaaaacactttcacatctgttcactcatgtgtgcaacgtttttcacatgcctacagtgtgagcagtgatgtggcagtgggcaaagatcttcctatcccaggagcacagacctgggtccaagtctcagctctgccaattacagcttgaagaccataaggatattatgtatgctttctcacctcagctcccccacctttaaatggaaattataatgccaatcttaacagattgtgataaggtaaataaaaagaagtatataatgctctggctggtgtcccgcctgttgtatatgctcaccttgcagctgctgtggtccttgctatttttggtggctattgttccagattttggaagctcagggataaatagggcagtctctattcttgggatgctcattatctactgaaggaaacagacaaacaaaaataattataatgccctgtgggctgcaatggaagtataggagaaatgctgcagaaagagaatctttcccttgacttctcttgtagcttgagtaatagccagtagtcatcattcattgaacacgtggtgtgtgccttgtattatgcagaattttccatatgcttacaagcactctgggaggtaagtgttatcattattaccctttgatggaggagatcaaga

SEQ ID NO: 59709 - DNA, 1002 bp, Homo sapiens
tacagtgtgggtgagcatctcttccaacatatttgcaatccatttccaatgctggacagagccactttctccctctgtctccattatccctctagcacataaaggatgactgctatcccaggccctgtgcaaaattattactttagtgccaactcacatactcagctgacattattttgtaaaaaatatatagcaattcagttaatttgtctgcttccagacctgaaaaatgctgacacttcgggcctatgtttgaatggctcacaggtcatatttggacaaggaggagggtgggccaggaagacacactccacccacgactccaatatttgcagcactaggtggtgcttaatttctgaaaacactttcacatctgttcactcatgtgtgcaacgtttttcacatgcctacagtgtgagcagtgatgtggcagtgggcaaagatcttcctatcccaggagcacagacctgggtcyaagtctcagctctgccaattacagcttgaagaccataaggatattatgtatgctttctcacctcagctcccccacctttaaatggaaattataatgccaatcttaacagattgtgataaggtaaataaaaagaagtatataatgctctggctggtgtcccgcctgttgtatatgctcaccttgcagctgctgtggtccttgctatttttggtggctattgttccagattttggaagctcagggataaatagggcagtctctattcttgggatgctcattatctactgaaggaaacagacaaacaaaaataattataatgccctgtgggctgcaatggaagtataggagaaatgctgcagaaagagaatctttcccttgacttctcttgtagcttgagtaatagccagtagtcatcattcattgaacacgtggtgtgtgccttgtattatgcagaattttccatatgcttacaagcactctgggaggtaagtgttatcattattaccctttgatggaggagatcaaga

SEQ ID NO: 59710 - DNA, 553 bp, Homo sapiens
ataatccatctttcccttggggatttgaattggcacctatgaaacacatgaattttcctgtgtatttgggtctgcttttgcactttctgtctattcctaagacacagcagccatccaaattactatagcttgtatttatttttgataatttcttactatcaaatttttttatccggtaatcccagcactttgggaggccaagatgggcagatcacttgaggttatgagtttgagaccagcctgaccaacatggtgaaaccccatctctactaaaaatacaaaaaaaattagcaaggcatggtgtcaggtgcctgtagtcccagctacttgggaggtcaaggcacaagaatcacttgaacctgggaggtggaggttgcagtgagctgaggttgcccactgcactccagcctggatgacacagcacccaggctgattgttcatcctgaggtcaggagttcaagaccagcctggccaatatggtgaaaccccatctctacaaaaatacaaaaattagccgggcatgatggcrggtgcctgtaatcccagctactca

SEQ ID NO: 59711 - DNA, 944 bp, Homo sapiens
cccctaaaatcttctccacctcccaagatctctctctatgcataagtgccccccaccccgccactgcccaagatgcaaactctctctctctctttcccttcctctacccaatactcagagtcctccttctcccctagttcactaccgggtgttcactgtgaaccacaagatggaccctgtgaccaggacattcactctggacatcaaggtggtctttcccgatgaggggtggggggtggtggtggatcctggacactggggttacayggtgtgctgaagtcctgggggcatgagccaccagggccctcccagagggcagtcaccagccccaccccctatccccacagaacccaaagggaatcaccgtgattagccagagtctgatggccaaggatggcttctttttcagctcctttcacctcccagagcttgtcaggtgcccttgtcaggtctgggagcccgaggggtggcaaaggaggctgtcattctctgtctccatctctcttaactttctgtgcctcagtttggggacctggaccatcgaagccagctaccaaagtacacccaagcagaagttcgaggctgcctttgatgtgaaggaatatggtgagaaaggtgtgggtggggtgagcaagatgaatacgccagggacaggacttggaatagaaaggaggtctcaaggggaacctctgctgtaacccagggcctgagctggatgctaagtgttgggtgctggtgttgcagcccttcgggcttgacagagccaccaaggaaggagcaggactgggaggggacgagggagcaggtagaatactgagggtgaccatggcttttttttttctcccagtcctcccatcttttgaggtccagctggtcccaaataagactttcttttacctcaaggatgaggctctgggcgttgacatccaggctcggtgagcccc

SEQ ID NO: 59712 - DNA, 611 bp, Homo sapiens
cgcctaagcctgacagttaagactggaatctggagccgggcgtggtggctcatgcctgtattcccagcatttggggatgctgatgcgggaggatcacttgagcccaggaattcgagaccagcctgagcagcatggtgaaaccccgtctttacaaaaaatagaaaaattagtcggatatggtgttgcgtgcctgtagtcccggctactcgggaggctgaggtgggaggattccttgagcccaggaaattaaggctgtagtgaatcgggatcgtgccacttcactccagtctgggcgaccggaggagaccgtgttagaaaaaaaaagactagaatctggaggcagcaaagcagggttggaaactgacttctccccagtatctgatgcaagttacttaacctctctgggcctgagttcgctcatttgtcaatgggaagatgcgctgtgagcaagagacagagttagaactcaaatctgcgtccgaytgactctaaaggctaagatccttttgctcctctgggcttgttgaaagggtcagatgcaagacagaccataacaggatctgcaccgtcagcttatagttgtcacaacaagggataagctatgttttctt

SEQ ID NO: 59713 - DNA, 749 bp, Homo sapiens
tttgctgaattttgcttggagtcctacaatttccatttaccacatgggttgcagtgtagggtgatggtgatgtgtggacagagacagggtcattgtgatcaagttaaaatgaggtcatgctgaactaggktaggcccatgcaatgagttttctccttataagaagaggaagatttggacacacacacagtgagaacacaatgtgaagattcaggcaaagattggagagatgcagccacaagaatgccagcaaccaccaaaagttagaagaggcacagaagatgcttttctggaggcttcataggaagcacggtctgccaacaccttgattttggacttctgacctccacaacagagacaaatttctgttgttttaagccaccaaatttatgctactttattatagcagccacaggcaaccaattcatggccccacccagcttcaatgccttaaatgggccacatgcccagatgaacttcaccaggttgtctccagcactaactctctgttgtgctcctggagctgttctgcaatccatcccctctccttcctccagtgctccatgcagttcaccaaaacggcccttcacattcaacggtgtacatctgggcagcttggatatatatcctaggattcagaccagtgatagtagcaggtgcagctcatccccacagagaaagagtaggaacatcaagagggtgccatggaaaccacagagtcaaattaaacatgaatcatggcttttcatc

SEQ ID NO: 59714 - DNA, 711 bp, Homo sapiens
ccccaaaaaatgagggaagctattttgaatggggaggggccagcctatccaagcaccacatctgccttccaggactcagcgttgacagtggcgggtccagctttccccagcagccgtacaaagactgttctagcatcattttctccttcagagcctgagcctcagctctctgtcaccgaygtcacttaagggcttttttttaaatcaaggttcccggaacccactcattatctaaaaatggacccattgtacaaagacagacaaaagtgtttgccaaaagcatgagctgggggtattgtcctggaggcagctggaatgggatcataattcagtaagcaaagccctaattcaccatacagtgttctctcctgcaaaaccacataggcagaagaagttgtggtcaggactctcccttgcatagtgggagtggtctgcacccctggcccaagccaccaaatcccagaagctgcctcagtagtgatgaaaacaaaaaccacctcctacctttctggatacctcctaggagagcaatacatttccaggggaatcctagacacatacaaaagcaagggcagtgacccagaaggcagccggctttgtccattgctgtccaaaagaaaggcccagaatgtaaaggacacacatttttttgccactgtagaagagaacaattgatggtccatcaggactctttggaactgtgtgggcaga

SEQ ID NO: 59715 - DNA, 1485 bp, Homo sapiens
gaatagacaactgtacaagtggttgtgaaagtgggttggagaaggggccccccaaaaaagtcagcatgagttcaggaaagtggcacatctctgcaacagagtcaggtgtgatggggcaaatagagtgaatgtgaaatcgctctttcagctgcaattatacataatgggttgaatagtgtccacctcaaatgtatatctgcccagagcctcagaatgtgaccgtatttggaattagggtctttgcagatgtaaatgagttatggatctctaacwaaaagtatcctaggtttagggtgggccctaaatccaatgacttacaagaacaggagaggacacacaaagaggcagagaaagctatgtgaagacagagacagagattggaaggatgcggtcacaagccagggaatgcacggattgctggagaccccagcagatgggagaggcatggggcaaattctccccaagagccttgggtaggaagtgtagccctgcaaacatcttgattttgggcttctagctttcagaactgcaggagaaagtatttctgatgttataagtcaccagttttgtggtattttattatggcagccttacagaaccaattcagcattacaggaaaatgaagatttttttttttctgatggagcgggagagatgtggtctgaatggaacttaataattgaaaactggcagcagaaaggcctgtattaatttcttacaaatgcagtaaaaacatgcatgactgtccaagagttacacaacatctccatgcctcaatttcctcttctgtttgagaataataatagtcttagcctcatagggtctggctccagagcctgtactcttaacaggagtttgagtaaatcagggatggcagtgaccagaaggaagagcaggtagcagtgaaggggtggggaggacctaccgtcagaagcagacctgaaggaagtcagggagaggcacatgtacaggtggtgttgaaatccagacctaagaaagagaatctagtagccctgcatgttttgcccaagggacactcagttggcacctgtcatttccctgtgggccagaggtgaacaggagctgacattacctgatagtgacaaggcacttggacccttgatttgttttgtttgtttctatttcttgaaagctaggggtgatctgcaatggactgaattgtgtatttctgccaatatggaaaaagcgcagtattccaaagacttttgtgctgactgtaaatgaacacttgtttgacagtcaagtgaccacatccctttttgtgggtcagaaagttttctgctaacacatctgctcttgctaaaggaagccaagccaagggtttgattcagctgcctgagggatgccaatgaataatagaaaatggttctcttctttttcttcttttttcttatcatattaaatagacatgctggagcccccagaatccccatttctcttggtttttgttttctcttttcttta

SEQ ID NO: 59716 - DNA, 1105 bp, Homo sapiens
tggtttggaaaacatagttatagtccttgatcagccattacctgactgtgttcttagttcagtcacttagcagttgtgcacttccatttcctcatctaatatctgaagttatttcccaatgctgaccattctagtaatgattaactctacattgctgactagtgtggggcaactcagtttattttattttattttattttattttattttattttattttattttatttgagacggagtctcactcttgtctcccaggctggagtgcagtggcgcgatctcggctcactgcaagctccgcctcccgggttttacgccattctcctgcctcagcctccctagtagctgggactacaggcatgcaccacctatgcccggctaattttttttttttttttttgtatttttagtagagatggggtttcaccttattagccaggatggtctyaaactcctgaccttttgatccgccagcctcggcctcccaaagtgctgggattacaggcttgagccactgcacccggcgcaactcagtttaaacataatcaaatgcctggactggtctttgtctaatctgtttcttttttttttttttttcttgacctggagataggggatctgattctgagtcaagtcagcattgtgttacggtggtgaaaaggtaagctcataatatcaatgctctgctgaagagttgctgccactgacaacatcattagcctccttgtaataggacccagggaagggattgggactgtgtaggaattgttttccagagtaggaaagaaagagtggaacatgcaaggatataacttctcatagacaaacatggctgtgcaaaagaatcctcattcctatccttaaacaattagtgccatggggtttgcatatcatctaactgaaaaggagaaattagaaaatagacaacctagacatatactcatataggaagcactcggtaaattttggttggattaattagattcaaatagtaccagtttcttgtgtaaacttagtggaacaaatggccaacgacttagaagcctgagggggcagttccagcatatttatttcgttgccagcaacaccagtgtttgtgaccacaa

SEQ ID NO: 59717 - DNA, 727 bp, Homo sapiens
atgccaattttctgggctgacctcatcagtctccttccatagagggattttatctctaactgtcgatgtttctaaattccaagcactagattttggattatcgcttaaaattttgtttaattaaaaagtggttatagatagaaccrctggcctattctctgttttgaataggaatgagactttgcttttaatttacactcctctgaatatacattagaggttatgctaagggtttgcaaagttaaaagacacactaagtatacaaaatttttgatattttgacttacacattcttatgtattacttagtgatgacttttgtgttaggttacagatttattcatacaacacaatcactttcatgatgaatttatcctacattttcatgccaaagtggatcacttcacggacaggttctagaaattatcagcatgaattgggagggaaaatactcactagatattacattatatagctgtttgcttatgtatatatatcacctttttgttcttcattcaaaaataaaagtagcataacaagtccaattatctgttttatttgattgttttcagattaaatgtggagtattttacattaaatcccacagagggaggtctcattgacctggctgtcttgctgagccattactcataaatctctaatcaagacaagtttttaaagtgagacacagttaatttcagaattcaaatcacactttatttttagaa

SEQ ID NO: 59718 - DNA, 630 bp, Homo sapiens
agagcttgaggtatgagtccttcatatcaggtggccacttgctttagtttctatggaaacatacctttttgaggacctggaattccacctctgcagcatcttcacttcggacccacagctggttctgtataccccagagaacaatcagggtccattttargcaaccgacctccaaagtcttggccagggcaggttttgggttgagacagaaaccataaaatctgaagaaaagtagagcctgaagtgttatgcttggtataaggagcagaactcatttctttttatgtttgtattgatatctcatgtctgtatgtttatggcaagacagaacaagagaatacgggttattcgactatttgtctctcctctccttccccctacctctcttgattgtgctactctgatgaaccttgctgagggcattttgtgtgtctgcataaaatgcacagcaagaagttaaggcaaggccagatggctaggcattttctatgtacttgcttgtggtcatttttccttaagcaactcttttcagggagaccattaatgctaaattccctaaggaaatggaaaggaatcagtaccttccatcatttatgggatagccttcccatgtcagagagatcagctatg

SEQ ID NO: 59719 - DNA, 630 bp, Homo sapiens
agagcttgaggtatgagtccttcatatcaggtggccacttgctttagtttctatggaaacatacctttttgaggacctggaattccacctctgcagcatcttcacttcggacccacagctggttctgtataccccagagaacaatcagggtccattttaggcaaccgacctccaaagtcttggccagggcaggttttgggttgagacagaaaccataaaatctgaagaaaagtagagcctgaagtgttatgcttggtataaggagcagaactcatttctttttatgtttgtattgatatctcatgtctgtatgtttatggcaagacagaacaagagaatacgggttattcractatttgtctctcctctccttccccctacctctcttgattgtgctactctgatgaaccttgctgagggcattttgtgtgtctgcataaaatgcacagcaagaagttaaggcaaggccagatggctaggcattttctatgtacttgcttgtggtcatttttccttaagcaactcttttcagggagaccattaatgctaaattccctaaggaaatggaaaggaatcagtaccttccatcatttatgggatagccttcccatgtcagagagatcagctatg

SEQ ID NO: 59720 - DNA, 699 bp, Homo sapiens
tgggtgcaaacagaggtaacagaatgttgtttacctactgatctcttagggtgaggcagagctgaccaagaagagtgtgtatgggggattgtttcgattttaaatttgtttgtaaattggtattatttaatttatctttcctatttttaaactggttgtttcctttgcagcattgccgtcaggcaccacaaagaatattttctaaaaagtaagatgttaaatagcaacagtgattcagcttattgttgttttaagtaaataaacggggtcctcaatttttcctatgaagagagggtaatgaaaataaatggctcccaaatttgaggtctatttgagaggtgtggagattctatattattattaaaaagaccagtgccttaatctaatatgtttcttagtgactcaacccaaaccaatcccaaacaagtcagcagaactgtgattggaaaagaggctgctcctctgttatgaatgagttaatattgattgtgctatggagggggtgggggagtgtggatgtggggactctgcttagagcaaaaacaataggaaaacctctagggagagactccaagaggaaacactacagtcctgaatcactacattccccargaagtaaaaagaagggtcttttctctcatgtgtgaggtagaggtcgcttcaagtctctcagaggtagcagctgctatggcagatagg

SEQ ID NO: 59721 - DNA, 909 bp, Homo sapiens
tgcatcatagacattaatttaaaaactaaaactataaacttctggaagaaaatatagggaaaaaatatttggaacctcggagtcagaaagtttttttgatagaaaacaaaatgtatattttagaaatctgctttttgaaagacacgtgtgatattggtctttaacctggtttcctgacatgcaactccttttgaagattataatcttcaaaatgatgtattttgtttcatattgagttgagttgtggccagggaaccgtaggtagcttcaggatgggggcagttaccagaaagaccaaggcaagattccagggtcaggactttcaaccgcacccctcaaccgctgagaagagaagaggagctgagggttaagttcatcaccaatagccaatgatttaaattatcatgtctacgtaatgaggcttccataaaatcccaaaagaacaaggtttcgtggccaggcgtggtagaggccaggtgtgatggaggycaggcatggtggctcatgcctgtaatccagcactttgggaggccgaggcaggcagatcacctgaggtcaggaattcaagaccagcctggccaacatggtgaaaccctgtccctactaaaaaatacaaaaattagccaggtgtgttggcacctgttggcgcctgtaatcccagctactcgggaggctgaggcaggagaatctcttgatcccaggatgtggaggttgcaatgagccgagatcgtaccactgcactcaagccttggtgacagagggagactccgtctcagaaaacaacaacaacaacaacaaagaacaaggtttggagagcttccagacagcagaacacatggaggttgctggaggacggtgcacccagggagaatgtggaagctccacacctcttccccactgcctcaccct

SEQ ID NO: 59722 - DNA, 909 bp, Homo sapiens
tgcatcatagacattaatttaaaaactaaaactataaacttctggaagaaaatatagggaaaaaatatttggaacctcggagtcagaaagtttttttgatagaaaacaaaatgtatattttagaaatctgctttttgaaagacacgtgtgatattggtctttaacctggtttcctgacatgcaactccttttgaagattataatcttcaaaatgatgtattttgtttcatattgagttgagttgtggccagggaaccgtaggtagcttcaggatgggggcagttaccagaaagaccaaggcaagattccagggtcaggactttcaaccgcacccctcaaccgctgagaagagaagaggagctgagggttaagttcatcaccaatagccaatgatttaaattatcatgtctacgtaatgaggcttccataaaatcccaaaagaacaaggtttcgtggccaggcgtggtagaggccaggtgtgatggaggtcaggcatggtggctcatgcctgtaatccagcrctttgggaggccgaggcaggcagatcacctgaggtcaggaattcaagaccagcctggccaacatggtgaaaccctgtccctactaaaaaatacaaaaattagccaggtgtgttggcacctgttggcgcctgtaatcccagctactcgggaggctgaggcaggagaatctcttgatcccaggatgtggaggttgcaatgagccgagatcgtaccactgcactcaagccttggtgacagagggagactccgtctcagaaaacaacaacaacaacaacaaagaacaaggtttggagagcttccagacagcagaacacatggaggttgctggaggacggtgcacccagggagaatgtggaagctccacacctcttccccactgcctcaccct

SEQ ID NO: 59723 - DNA, 909 bp, Homo sapiens
tgcatcatagacattaatttaaaaactaaaactataaacttctggaagaaaatatagggaaaaaatatttggaacctcggagtcagaaagtttttttgatagaaaacaaaatgtatattttagaaatctgctttttgaaagacacgtgtgatattggtctttaacctggtttcctgacatgcaactccttttgaagattataatcttcaaaatgatgtattttgtttcatattgagttgagttgtggccagggaaccgtaggtagcttcaggatgggggcagttaccagaaagaccaaggcaagattccagggtcaggactttcaaccgcacccctcaaccgctgagaagagaagaggagctgagggttaagttcatcaccaatagccaatgatttaaattatcatgtctacgtaatgaggcttccataaaatcccaaaagaacaaggtttcgtggccaggcgtggtagaggccaggtgtgatggaggtcaggcatggtggctcatgcctgtaatccagcactttgggaggccgaggcaggcagatcacctgaggtcaggaattcaagaccagcctggccaacatggtgaaaccctgtccctactaaaaaatayaaaaattagccaggtgtgttggcacctgttggcgcctgtaatcccagctactcgggaggctgaggcaggagaatctcttgatcccaggatgtggaggttgcaatgagccgagatcgtaccactgcactcaagccttggtgacagagggagactccgtctcagaaaacaacaacaacaacaacaaagaacaaggtttggagagcttccagacagcagaacacatggaggttgctggaggacggtgcacccagggagaatgtggaagctccacacctcttccccactgcctcaccct

SEQ ID NO: 59724 - DNA, 909 bp, Homo sapiens
tgcatcatagacattaatttaaaaactaaaactataaacttctggaagaaaatatagggaaaaaatatttggaacctcggagtcagaaagtttttttgatagaaaacaaaatgtatattttagaaatctgctttttgaaagacacgtgtgatattggtctttaacctggtttcctgacatgcaactccttttgaagattataatcttcaaaatgatgtattttgtttcatattgagttgagttgtggccagggaaccgtaggtagcttcaggatgggggcagttaccagaaagaccaaggcaagattccagggtcaggactttcaaccgcacccctcaaccgctgagaagagaagaggagctgagggttaagttcatcaccaatagccaatgatttaaattatcatgtctacgtaatgaggcttccataaaatcccaaaagaacaaggtttcgtggccaggcgtggtagaggccaggtgtgatggaggtcaggcatggtggctcatgcctgtaatccagcactttgggaggccgaggcaggcagatcacctgaggtcaggaattcaagaccagcctggccaacatggtgaaaccctgtccctactaaaaaatacaaaaattagccaggtgtgttggcacctgttggcgcctgtaatcccagctactcgggaggctgaggcaggagaatctcttgatcccaggatgtggaggttgcaatgagccgagatcgtaccactgcactcaagccttggtgacagagggagactccgtctcagaaaacaacaacaacaacaacaaagaacaaggtttggagagcttccagacagcagaacacatggaggttgctggaggacggtgcacccmgggagaatgtggaagctccacacctcttccccactgcctcaccct

SEQ ID NO: 59725 - DNA, 581 bp, Homo sapiens
aaaaaggtaaatgagttttccagaatcacacaataggttactaataaagccaggatttaaactggctccacttcatgccctattctctatatggtaattgtactgtgttttatgtattttttatawaaattcattatttttttaaaaaaaacctacattgttttatactgaattatgtttttccccattagaccaggaattatttcaaccatgttttattcactcatgtaatcctagtcttggaccagcatccagagaagagtaagtgaagaatagttaaaataacttttatattccataaagacattataagaattgagtgatgcaaatataatgagtgattgaattttgaaatttatggaaaattataatctcagtaataagaaagtgaaaaagttttcaacttgggaaacaatgaatacaacaaaactgtaactttatatttttaaaatctagtttctacttttatgctgataaaccaaaatataactaagtgtaagttaagggagttttataaatctctgtttatactaaacattttacttttccaagtacctttgataatatatcatatgcatagc

SEQ ID NO: 59726 - DNA, 1351 bp, Homo sapiens
tgaatttcaagctaaaaagtgatctagagaggaatattgctgttacaagtaaatataagcatcctctgatgtatgagctttggtggcctctgtgtggtgaggtttcccacattagctttcatggatatgtgggtatgcccagtgtgtatgccttaaaaatcctagactcggccaggcgcagtggctcatgcctgtaatcccagcactttgggaggccaaggcaggtggatcacgaggtcaggagatcgagaccatcctggctaacacagtgaaaccccctctctactaaaaatacagaaaattagccgggcgtgcgtggtggtgggtgcctgtagtcccagctacttgggaggctgaggcaggagaatggcatgaacctgggaggtggagcttgcagtgagcagagatcacgccactgcactccagcctgggcgacagagtgagaccccgtctcaaaaaaaaaaaaaaaaaaatcctagactcatctggtacactccatatgcctctacctaaataaactgtaaccattagaaagggtttattgtatacacatatggaaagcaatttcattgggtggacctcatcattctatacatttatctccttgctctagcatccaatttcactgggctgcaagatatcaataagccttgcctctttaaactacttatgtacaaataaaagtgatggtgagaacctggctcaggaaatgcagtagcaggccatattgcatccaaaggtgagtgctctgtaataggtgtgatagttagtgtaaggatataagcatgagtttgagttatcagggatttgtgtgtttggccaggtgcctatagttgagtatggatggccctccgtgagcagttcactgtgcccatgtgggggtacacgtacacatggctttaaacgactcccttcagtatgtattagtgggtgtgtagtttgttttctgggccgagctcatgagtctgagctagctgctgactgacccttttttccacctgtgctgtggtaagagagagtgtgctgagaacctcctcctcagaaagccaaactggttaaactggctgctccctgaatgaaaacaattacttctgataatccactaaaaaggargcaaaggaaaggaaaataagaatgataatagcagtgatcacttttctaatagccttcctgaattcaccgtgctgatccaacgttttatttttcagaacttctcctttgtgccactctcttaaggtctgttttttgaaagtttcatcactagtgctagtccttccatgtggcctcatgaattgtggaagctttctcagccacatttctccttgccattttggtttacacactggataca

SEQ ID NO: 59727 - DNA, 591 bp, Homo sapiens
gtgtgtgtgtgtgtgtgtgtattcaaaaagtttgaaagaatatttgccgattaatggtggattttcagcggtgactttattggtagacaggagtaagagttaccaaaaaaaaaaaatcaatttttttttttttttttgagacggagtctcgctctgtcgcccaggctggagtgcagtggtgcgatctcggctcactgcaagctccgcctcccgggttcacaccattctcctgcctcagcctcccgagtagctgggactacaggtgcccgccaccacgcctggctaatttctttttttgtgtttttggtagagacggagtttcaccatgttagccagtatggtctcaatctcctggcctygtgatccgcccgcctcggcctcccaaagtgctgggattacaggcgtgagccaccgcgcccagccaaaaaaatcaatttttacgacagatatttatatagtgtgttaattttctgcaaaggtatcattttggaaaccacaataatatgtaaaactatatttttttaaaacctatccactcaaacagttaaaatacctccattgattctggaagctggacatcaaaatggttta

SEQ ID NO: 59728 - DNA, 1301 bp, Homo sapiens
tgcattcctgttttccagctctaatgttgccttttccaaaaycacctatggccctcccagccccccatcctgtgcctataaaaactccaggctcagccaccagagagaagagaaacagctggacactggagactatggttggacatcggagggaagtggcttgacttcagagggacagcttgatggcattgctttggggccagactccagaggaagattatcttcccacttcatttccttttcagctccccttcctactgagagccactttcattggcaataaaatcctccacatttaccatctccaatttgttcatgcaacctcattcctcctggatgttggacaagaactcgggtgcaggtgcaaaaggctgtcacactgaccctccactgaactgtgaacacttaagccatctacagatggtaaagctaaaagagcgctgactgtaacactctttctggggcttcaggggtctccagaatccccctagacactgccatggagccacacagagttttgctcctgccagtgcccaaaagtgctagccccagctccagttcacctgttctcccccttcctgtgaggggtggagcacagcaggaccaaatgagtggtgtccatccctaccagcactgaaggggctgctggctatttctagtgcccgggcactcgagtttcacccatgaagaggtcagagaaaattttctgcttcagtaggtgctttatcacaaacttctcattgtttataattctaaaattcacttgtcaattgattggttgaaattcaaaacaaattttcttttttgtgttatttatgtattattgttacataataattgtacatgtgactttgtccattaaacaactatgacgaaataagccaacaactgaagaacaaaaggaagaatgaaataatcttcattgtgaacaataaaaatcattctacaaagcaagcttaagcatggcttatgattctcttaagttgtttctaaagatgtaccacttttgaatttcttggggtttgcaaactcaaactaataagacaaaacaaaacaaaaaaccaaggcacttgtaatctatcctttgattttgaaggaggttgatagagtaggataaataattctttcacaaagatatttcactgataacgtgttcatgtatttattcaaattgaatctgttttctgaaaacagctttattatctcctagtgttagtatctcactctgcttttaattacacataactgagtagtattcaccatcatttgccagccaaccaacacagcactatgttcttcaa

SEQ ID NO: 59729 - DNA, 641 bp, Homo sapiens
tatggattaaatgttttaaaatgagtctagtctaatttttctaataaaaaagtaattgctagctctaaaaaaaaatgggaagctataatggaagaagmctgggtaatggagagttggctctaccactaggctcatggaggacaccaagaccaggcaaaaaactcccatgctaacttctcctgagttgttctttcaggccattgctccaagtatggtgttggaattcccgcaccagaatcacccaggtgattaagatgtagatttctcgatcccattttagacctactccaccacagtttctgagtataaatctgcattttaaataagcactcttaggtggttctaaatcaggagttttaaacctggcttcacagacatgctaggacaaggttctcaaactttagtgtacataagaatcacctgaagagtgggataaaacgcagatactggaatctggaagtcccagagcctgtctgtgtttttaatttgcatcctgggtctcttgaatgagggtggtctagggacctcactctgagaaaccctgcctaggaggttttaggagttccatgccctgccatccccatccttccatctctgctccctgacaacttaaatgcaaactttatctgtatgtgcctctg

SEQ ID NO: 59730 - DNA, 872 bp, Homo sapiens
tattttgcctgtgagaaaactgaggctcagaaaggttattcagctgcccaaggtcatgacatgaacctgcgggactgacttcagaggccccacactctcgacacacgcacacactcgccccacacacggtgcccgctgcgggggaccggggctatgggactgggaccgaagtggaggccggatccaacaaggcaaagctcggagtcccggcggaggggcggacaggtggagggkttccactcgcactgaccgcagcgcacgggcagcggggctgaccaggcgcttcccggccccataaaactcgggcgggaggcgaacgccgttttatgcaggcggccgggcggcctggctcgctttcattcccggctccgcgaggcgcgagggccgagccctccaagctcgtaaacgccttggccgcgagctccctccccgggcccgcgggccgtcatataaggcgcagcgccggcttggggtccagccgcccgcccctgccgccaccgcaccatgtcctgcctctactcccgcctcagcgccccctgcggggtccgcgccttcagctgcatctcggcctgcgggccccggcccggccgctgctgcatcaccgccgccccctaccgcggcgtctcctgctaccgcggcctcaccggaggcttcggcagccacagcgtgtgcgggggcttccgcgccggctcctgcggacgcagcttcggctaccgctccgggggcgtgtgcggacccagccccccatgcatcgccaccgtgtcggtcaacgagagcctcctcacgcccctcaacctggagatcgaccccaacgcacagtgcgtgaagcacgacgagaaggacgctatcaagtccctcaacagcagggttcg

SEQ ID NO: 59731 - DNA, 681 bp, Homo sapiens
  misc_feature (1)...(681): n = A,T,C or G
tttgaagagaacagcaaacatgattatagaaactgaaatgtaaataacttaaattctgttaaaggaaatttccctataggtgaagaatgatagataatattctgaaacacaacccttcataaggggaagaatagaagtatcaagtatcagatgatacgattgtgtgtgtgtgggtttttttttttttttytggggacagagtctcgctctgtcgtccaggctggagtgcagtggtgggatctcagctcactgcaagctccgtctcccaggttcacgccgttctcctgcctcagcctcccgagtagctgggactacaggcgcgtgccaacatgcccggctaattttttatatttttagtagaaacggggtttcactgtgttagccaggatggtctcgatctcctgaactcatgatccgcacgcatcagctcccaaagtgctgggattagaggcgtgagcaccgcngccgggccgattgtgttttgtatacagcacttcagcccttacaacaaatctgcaaggtagtcattcaaatcccatttaaaacatttgcaaaattaagggtcaggttaatctccacaagagaagctggaagaattctaagcctctgattccaaaggagaagggaattagcttttagagtgttctatgtgctagttccctttatctggaatcttactga

SEQ ID NO: 59732 - DNA, 737 bp, Homo sapiens
aatagctcttaaaaatccacagggaagtgagccttggttgaacactttgcatgtgaatcccatttctctgggttttcactgttattgactgttagtcaaaggtgtcctgtgagctccagtttcctgtttggccaaatgaaggcaatgggacttgataagaacaatcacaagaacccctctatctggcctccatttttaacactgctctccattgtctgtggggtgtttgtgttcactctagctgtctggggagaaaggaggcagaagggagtgaaggaccctggtatcaaatttaccacctttcccttcatgctaacactccccgccrcacccagccaagatgtttacagggcaggagattaagatgcaaaggaaagtggtgatgcctgggaacggccttggctgttttggaaaatacacaccaacacacagacacagctgctattgacttcaaagacataatgattctaggatggcaacattatgatttggtagttagatctcgtaaatttacgtcatttgtttaaagccctacagggcacaaacaagtagagtaaactgcaatagtcagatcacctgacaaaagtaatcataagatgagaaggccagcaccaaggagagactgtttcttattactacactaaatgaactggacaattccactgggaatgtttactttgtgtcatacaagccactctaaccgaggcccaggggatggaggaagttccagagaggca

SEQ ID NO: 59733 - DNA, 982 bp, Homo sapiens
tgcattaaaaattcaagatatataccaagatatttggttgtaaattatttttacatgtactcctaaaagcaacmttttcatttgaaaaaggatcactgtccaaaaatttgattggtgtcatagccacaccacatacttgctcacaaccacccctgactaacacatacacacacacacccccacgagtgcatacacacacacacacacaactctcatagcacattggataagtaggtcattgcatttatcttccagttttaaaactttccatggcagcagactgacacgtttagaaaaaatggaatcagtttttgtataagttgcatgtttccaaatcacctcctctcctcaaatagaagtactgtgggtattggaaaattgtcagcaaaatttccctgaagctaaacaatttaagttaaaactccttgcccttcaatttgttcagatttcttgtctcctatagttaaactgaagggggaaaagtgttcagtgaaatgtctactcaatgattctatcaatttaggagcaggatcaaacaagagaatgaatcatgcaacaagcctcgtacactggaaaatgggtcatctttctgtaagcagtgagagatctggagccaaaccaggttgaaaatgtcatttaagtagattcttttaacttgtttctgaaaaaaaaaatgtcactgacaactatttgtcttctcagacactactttcaaataccttatcctgcaagccaaagaatatatttaattccagagaaaagcctttcagcaccctgagaaatcctttttgttcaaaactaatcaatttttgctttgtgcacaaaagtaaaatactttgtcaaactctctgcagaaatccttttagctatcttaaaaaatacatttggtacagccctggctgatttctgttatatgagcaaaaatttactttgtcaaattatattcttcagaaagcctttcagctgacttaaaaatccattt

SEQ ID NO: 59734 - DNA, 982 bp, Homo sapiens
tgcattaaaaattcaagatatataccaagatatttggttgtaaattatttttacatgtactcctaaaagcaaccttttcatttgaaaaaggatcactgtccaaaaatttgattggtgtcatagccacaccacatacttgctcacaaccacccctgactaacacatacacacacacacccccacgagtgcatacacacacacacacacaactctcatagcacattggataagtaggtcattgcatttatcttccagttttaaaactttccatggcagcagactgacacgtttagaaaaaatggaatcagtttttgtataagttgcatgtttccaaatcacctcctctcctcaaatakaagtactgtgggtattggaaaattgtcagcaaaatttccctgaagctaaacaatttaagttaaaactccttgcccttcaatttgttcagatttcttgtctcctatagttaaactgaagggggaaaagtgttcagtgaaatgtctactcaatgattctatcaatttaggagcaggatcaaacaagagaatgaatcatgcaacaagcctcgtacactggaaaatgggtcatctttctgtaagcagtgagagatctggagccaaaccaggttgaaaatgtcatttaagtagattcttttaacttgtttctgaaaaaaaaaatgtcactgacaactatttgtcttctcagacactactttcaaataccttatcctgcaagccaaagaatatatttaattccagagaaaagcctttcagcaccctgagaaatcctttttgttcaaaactaatcaatttttgctttgtgcacaaaagtaaaatactttgtcaaactctctgcagaaatccttttagctatcttaaaaaatacatttggtacagccctggctgatttctgttatatgagcaaaaatttactttgtcaaattatattcttcagaaagcctttcagctgacttaaaaatccattt

SEQ ID NO: 59735 - DNA, 982 bp, Homo sapiens
tgcattaaaaattcaagatatataccaagatatttggttgtaaattatttttacatgtactcctaaaagcaaccttttcatttgaaaaaggatcactgtccaaaaatttgattggtgtcatagccacaccacatacttgctcacaaccacccctgactaacacatacacacacacacccccacgagtgcatacacacacacacacacaactctcatagcacattggataagtaggtcattgcatttatcttccagttttaaaactttccatggcagcagactgacacgtttagaaaaaatggaatcagtttttgtataagttgcatgtttccaaatcacctcctctcctcaaatagaagtactgtgggtattggaaaattgtcagcaaaatttccctgaagctaaacaatttaagttaaaactccttgcccttcaatttgttcagatttcttgtctcctatagttaaactgaagggggaaaagtgttcagtgaaatgtctactcartgattctatcaatttaggagcaggatcaaacaagagaatgaatcatgcaacaagcctcgtacactggaaaatgggtcatctttctgtaagcagtgagagatctggagccaaaccaggttgaaaatgtcatttaagtagattcttttaacttgtttctgaaaaaaaaaatgtcactgacaactatttgtcttctcagacactactttcaaataccttatcctgcaagccaaagaatatatttaattccagagaaaagcctttcagcaccctgagaaatcctttttgttcaaaactaatcaatttttgctttgtgcacaaaagtaaaatactttgtcaaactctctgcagaaatccttttagctatcttaaaaaatacatttggtacagccctggctgatttctgttatatgagcaaaaatttactttgtcaaattatattcttcagaaagcctttcagctgacttaaaaatccattt

SEQ ID NO: 59736 - DNA, 1104 bp, Homo sapiens
ataatggtcacgttggagcaattgccatttcaaatcattaggaacactcaggtcactttggcatggagctattttgtaaaagacgtagaagccatttataaactttggtttgctttttaaaaatttatttcattctgaggcttatccgtgtaaaattaccaaaatgattgtggttagactctacattgtcacagtrtttaaatgtgcacaatattccacttagaaataatgtcagtactaaaagtagtagagggctttgatagcaatattaatacatcgttaagcccttctcattaaacagtgtaatagtcttgttgaagtttgttaggcattttaaccactactaattaaaaatagacctactgactagtctgttttactgtgctttattgtgtcttggatgttcattcagatacttttgctgttgagaaatcaaatcgtctcttatggttttaattacaaaatacatattagagggatacagttcttagggctgtgatttttaatttgtgtaacctttttttattttggaaaggaaatttcagattttttctagtaatttttcatttgtgagtgttgttttctagatacagaaaatgtacctagatagatgatcacattttaggatattttgcttacgtgttattttatatttatatactataataccattgtatagttcagaacaagaaaatatcttgataaatcatctgctactgtgaggcagttaaaaaaatttgaggctcactgaaaatgtgtgacttgcccactgtctcatattgctagtattggagagaaaactagaatctaggcctttattttcctgatgtaatgattttagctaattattatttattttcttaaatcattgcattaattgatttttcacaagtagagcctatatcagtgtttgcaataattaaattttaagtatatttctataattgtaaataaaatcctgacatttgttacaggatggggttttctttcatcatatttttataataaaaattaagcagttataaaaataaatagcctagtttttcaattggtataagctggctttattttatactgctaataaaggcacattatgttcaagca

SEQ ID NO: 59737 - DNA, 1104 bp, Homo sapiens
ataatggtcacgttggagcaattgccatttcaaatcattaggaacactcaggtcactttggcatggagctattttgtaaaagacgtagaagccatttataaactttggtttgctttttaaaaatttatttcattctgaggcttatccgtgtaaaattaccaaaatgattgtggttagactctacattgtcacagtatttaaatgtgcacaatattccacttagaaataatgtcagtactaaaagtagtagagggctttgatagcaatattaatacatcgttaagcccttctcattaaacagtgtaatagtcttgttgaagtttgttaggcattttaaccactactaattaaaaatagacctactgactagtctgttttactgtgctttattgtgtcttggatgttcattcagatacttttgctgttgagaaatcaaatcgtctcttatggttttaattacaaaatacatattagagggatacagttcttagggctgtgatttttaatttgtgtaacctttttttattttggaaaggaaatttcagattttttctagtaatttttcatttgtgagtgttgttttctagatacagaaaatgtacctagatagatgatcacattttaggatattttgcttacgtgttattttatatttatatactataataccattgtatagttcagaacaagaaaatatcttgataaatcatctgctactgtgaggcagttaaaaaaatttgaggctcactgaaaatgtgtgacttgcccactgtctcatattgctagtattggagagaaaactagaatctaggcctttattttcctgatgtaatgattttagctaattattatttattttcttaaatcattgcattaattsatttttcacaagtagagcctatatcagtgtttgcaataattaaattttaagtatatttctataattgtaaataaaatcctgacatttgttacaggatggggttttctttcatcatatttttataataaaaattaagcagttataaaaataaatagcctagtttttcaattggtataagctggctttattttatactgctaataaaggcacattatgttcaagca

SEQ ID NO: 59738 - DNA, 737 bp, Homo sapiens
ctgaaaccatgttccatggagacttatgtaaaaataaataaataaaagagactcagggccaggygcgatggctcacgcctgtaatcccagcactttgggaagccgaggtggcgggtggatcatgaggtaaggagtttgagaccagcctggccaatataatgaaaccccatctctactaaaaatacaaaaaattagctgggcatggtggtgggcacctataatcccagctacttgggaggctgaggcaggagaattgcttgaacccaggaggcggaggttgcagtgagccgagatcgtgccactgcattccagcccaggtgacagtgcgagactccgtctcaaaaaaaaaaaaaaaaaaagagagactcagataaacaagagatccaaaaacttgagaaggtctagccttccaaacagaagatctgtgagggatatggcattccatgaggaatccaatgctttttaatcttctacagccaacagactctcttgaaaaactgttgaaagctatgggaactctccgcagggaattgtacatggaaaccaaattctacaaacatttttaggggattgctgcccctccaccaccactgccaaagcccatccacagacaacccccgtagaagaccaaaaccagcgttcagagcctcgggattaggcatcacctgtgtaacgcccaccccttgccaaagtcataaaccagaaccaatggatgggtgtcatatggaggtgagcat

SEQ ID NO: 59739 - DNA, 1104 bp, Homo sapiens
gaggctgggaagtccaagatcaaggtgctggcagagccagtgtctgctgagggcctgtttcatggtttgtaactaggcatctttttgttatatctctatgtgaaggaaaccagaaagagcatctatcgttatattttcacatgtaggagaccacagagggcatctttcccatgtctctgcttatgagggaactaatcccattcatgagggcctcatcctcataagctaaccaaagctccatctcctaataccatcagatttggggtttgtacttcaacatacgaacatgggggcggggkacaaaaacgtctagcccataatacccacattttagaatctttagaattctactaatttatcaagatatatgttaatatctggaaaaatattatctcctctgtaacaaaaataaaatttctctattaaataaggtggccatataattcatcttccaagttgaaacacatttgagagtaaaagggggcactattagtgattgcccaatgacaacgggtataaactgagatcctaccaggcaaactgggatgtgtagtctgcatattattaaactgtttaacgtttttggttagtacttttacacatcactgtcacagcttttaaatgtataaacccacagctcataaatttggtaattatctttttggaaagctgactctttggagaaacgactttcagcaaattgatttttcttctatgttttcttctggctcttaacctgagccagggttagaccgccttggctcaggtctagttcacagtgccccaaacacacctttccagcatgaacaactcatgcaaagttgtgctttgtccctctttctcccagactcttcaataactaaaattgccattaactagggactagcatttggcagttttaaaaagacactgtaaaactgctgaataaagagccacataaactaagatcagcacccccaaaactgtgaaagtgcttaaaccttaacacaaggtttaaaataaactcttgattgaattcatctactccattttctctcttcaataaataagatgaatttcaagcagccaaagctatttgacataagtagtaatgcaaataaaaat

SEQ ID NO: 59740 - DNA, 1104 bp, Homo sapiens
gaggctgggaagtccaagatcaaggtgctggcagagccagtgtctgctgagggcctgtttcatggtttgtaactaggcatctttttgttatatctctatgtgaaggaaaccagaaagagcatctatcgttatattttcacatgtaggagaccacagagggcatctttcccatgtctctgcttatgagggaactaatcccattcatgagggcctcatcctcataagctaaccaaagctccatctcctaataccatcagatttggggtttgtacttcaacatacgaacatgggggcgggggacaaaaacgtctagcccataatacccacattttagaatctttagaattctactaatttatcaagatatatgttaatatctggaaaaatattatctcctctgtaacaaaaataaaatttctctattaaataaggtggccatataattcatcttccaagttgaaacacatttgagagtaaaagggggcactattagtgattgcccaatgacaaygggtataaactgagatcctaccaggcaaactgggatgtgtagtctgcatattattaaactgtttaacgtttttggttagtacttttacacatcactgtcacagcttttaaatgtataaacccacagctcataaatttggtaattatctttttggaaagctgactctttggagaaacgactttcagcaaattgatttttcttctatgttttcttctggctcttaacctgagccagggttagaccgccttggctcaggtctagttcacagtgccccaaacacacctttccagcatgaacaactcatgcaaagttgtgctttgtccctctttctcccagactcttcaataactaaaattgccattaactagggactagcatttggcagttttaaaaagacactgtaaaactgctgaataaagagccacataaactaagatcagcacccccaaaactgtgaaagtgcttaaaccttaacacaaggtttaaaataaactcttgattgaattcatctactccattttctctcttcaataaataagatgaatttcaagcagccaaagctatttgacataagtagtaatgcaaataaaaat

SEQ ID NO: 59741 - DNA, 1104 bp, Homo sapiens
gaggctgggaagtccaagatcaaggtgctggcagagccagtgtctgctgagggcctgtttcatggtttgtaactaggcatctttttgttatatctctatgtgaaggaaaccagaaagagcatctatcgttatattttcacatgtaggagaccacagagggcatctttcccatgtctctgcttatgagggaactaatcccattcatgagggcctcatcctcataagctaaccaaagctccatctcctaataccatcagatttggggtttgtacttcaacatacgaacatgggggcgggggacaaaaacgtctagcccataatacccacattttagaatctttagaattctactaatttatcaagatatatgttaatatctggaaaaatattatctcctctgtaacaaaaataaaatttctctattaaataaggtggccatataattcatcttccaagttgaaacacatttgagagtaaaagggggcactattagtgattgcccaatgacaacgggtataaactgagatcctaccaggcaaactgggatgtgtagtctgcatattattaaactgtttaacgtttttggttagtacttttacacatcactgtcacagcttttaaatgtataaacccacagctcataaatttggtaattatctttttggaaagctgactctttggagaaacgactttcagcaaattgatttttcttctatgttttcttctggctcttaacctgagccagggttagaccgccttggctcaggtctagttcacagtgccccaaacacacctttccagcatgaacaactcatgcaaagttgtgctttgtccctctttctcccagactcttcaataactaaaattgccattaactagggactagcatttggcagttttaaaaagacactgtaaaactgctgaataaagagccacataaactaagatcagcayccccaaaactgtgaaagtgcttaaaccttaacacaaggtttaaaataaactcttgattgaattcatctactccattttctctcttcaataaataagatgaatttcaagcagccaaagctatttgacataagtagtaatgcaaataaaaat

SEQ ID NO: 59742 - DNA, 1575 bp, Homo sapiens
aaagactattttatttacatttttacctctttcttcaaatatgagaaatatgtctggactaagtcactttgagccagtgccattatctttttaggaggaaatttaccaacacctaatattaaaaatatatatatacatgcttgatgcaaagagacgcaaggtcagcttaaacaaagttcacttaggtttcatgttaatataagcttatctcaccaagtcactgcccaaatttgcagaaaactagattctcccaccagaaattgtccatttctaggcttgtatgaggcaggaaactgtcaagaggcagcaaaagagggtagactttgatgaataaactcaaatcatcatgatatattgtaccttagatagtgctgtacctcatttcctggtacacactcgctcccagagaaagggaaatgagttttgctttttaaaaacagaacattttactagacacatggaacagaattgaacagactcccatttcatatggcccactttgccctcagcttccaactgtgcttaatacacaggaaagtgcaattttatctggccattttcataccaagtgtcaccttcctaagaacttataaattacgaaatattcctgtctaatacagtcacagttcctatgtcctatctctctgttcataagttcccagttttctctgaacatattttaaaaatggtcatttgaaaaaaaattaacctttggagtacttcagtggggatcctgcacagtcccccagaactgtgtttctaagaaaatgacacattctacaaatattgagctatcctgtgtttattattcaagtatcagatacttttagtttatctggtcctcactttaatgtgtttaatttttttcaatagagaaaaggaaattaaatgtattacttctgcactgctaacctgctctttcacaaaggcatctctgaaaggcagccttgtgtttgtgttggtcactccattaaccatgtggagtactggggcgggagcactgtggtttctgtgcatcatggtggctccatctctctcgtggtctctccctctctctcttctttctctcttgtgttggtatgcaaacacagaagggcactttggcaagaggtggaaagaaggatttcactggtgaaaaagaatctcacaaggtgaagagaatatgaatttgtaaaatttgcactatgatatgcatggaacaataacctatgacagtaaattgtatgtgctagagaagaggcacaaaaagttttaagaagggttaggtcctgcaacttgagaggagtaaggaaagtcttttgtgaaataaactgcatttgggttgaaacctgaaggacagcagagttgttctctccacctgttgccattccacctctwttttcgtctttcaaaatccaacctatcccttcagggttcagtttggactctagactatctgtaaacccattcccaatgtcacacctgtacctgttcatattttcttttcactctttgagccaggagtcactttgcactccactatggcattcatcatactcatattacacctgtctgtgtgttttatggttgactctc

SEQ ID NO: 59743 - DNA, 1536 bp, Homo sapiens
cacctactgaagagaagtaaaaatcttaagggtccaacaaatacacctcagaaaatgctgcatgtttatatgctaccctgccttgtgttgttttccacttcctgaaagaacaggtcaggtgctaacggtaacaatacagcatgtgtcttctgtaacctcaagcaaggacatgatggcttgaaaaaagcctctgctgccttgcgtttctctaggctgactgtagggctttgggtcattcataaacagcaggacctaagttacctgtatttccctggcgtggtacacgatgatcagaccgagcaggatgatcgtggagagactgataaggcatttcagagctaaggaatacagcgacgcctgcaacacagtcagacagaagcacttttaagaaagaagcacttttaaccgccttccacgtccccagagtcagtcagtcccccacaggtggacctgaactcacagaaggaagataaggggagaggggtgcacctgtcttggctctgtgatctgtcagatcactcggcctcaaaaccaaaagagacgagagtagacctggaaagactgggaagacgcgtggctgggctgctgggtccacgccatagaggaccgaagcgagcgccgctgttccaggctagcaaaaccagaggaacttacttctgagttcaagagagcgggttgaaagggcccttctaaacataattcacgaggggatgaattacagatggtttccccaccgacttccagaaccacttacttaaggtgcccgaatgcgctgagcactcttaactgcctcgagaactttggctgcacgcggaaagggttcatctccgagttgtttagctgactacggatgcgcgtcctagacgcgcccgctgtcctggcgggctcccttgatcgtcccggagaggctagggatccgcacgcaaagggtccccgccagtgcccatcccaaccacccagtgcccgactccggtagcgtgggctggggttcaagcctgtaccttgtcgtaggcgccccacgacagctcggtctcgatgaccatgaccacgatgccgaacatgccgaagatgagcgcgtagtcgctgagccgcttgcgcttttcgaacagggcgcgccggtggcccagcttgtagccgatgttctggtttttctttttgctggacttggtgccactgctgctgccgtgcccgctcccgccaccgccgccgcctcctccagtgctgcctccgccgccggttccatagagcgccaggttgttggagttgttgtgctcgggcttagacaccacgatctcgggggctgaggacgaaacagcggcggcggcggcggcagcggctgcagacggggaggacgcgccgccacctcctccgacagacgcggggggctgcaggggctgcgcctctgagtccatctcgtgsaggttccggcgggacgcgctcaagttgctgagcggccgcatgacgcccccgttgtacctgcagctgctcatggctatttcggtgaaggggttgctctcgcggcgcgcctggggctgg

SEQ ID NO: 59744 - DNA, 2236 bp, Homo sapiens
tgaaaatgaaattcctttcagtctagagtgtttctccagatgataattaacttacaggtgtgcaccaccacaaaattcacaaacacttggttaaataaatatatagtgatattaaagcttttctacatgtaaagggaaaggatggtaagaggaggttactacaggatatgagatttaaatggtaaatacaataataaaaggacatgtaaacaaaagcaaatttgggaatgaaattcagcatctaaactttagaaaatagatatactattgaacactgagtcttgtttcagtagtaaaattatttactctcaaagttggataaacttagaaatcttttgaggatttttttctgcctatttatggcatcttatcatttaaagtcaactggaaataatagccaattgattccagctgattcttttacttgtaaataatttaattcctatccaataaagtacattttgtacattacgctacatttttgttcatttatcaaatacttagtgatactaaacatatgttactacatcccagaaatatattgcacagggctctgactttcagtactttctcacacattttggccaagttttggagtctgataatttcacattttggccccaccccttatgtaatctagggacgtttttacatcctttctgtgactcacttctccaacctgtaaaatgagcctacttcaactcactctactaacttgttgggaatgatacaacgtaactatggaaactattaagatgtgtagaacatcctatgcaccttaaagacagctatccccttatgcaaaaaaaaaaaaaaaaaagatggcagagaaattttaaaataacctccattaagctgtgtataaaccactgaagtttttattctaaaactcaagttttattctaaagctcagctatccccttctattaaataaaaaggcagagaaattttaaaataacctgaattaagctgtgtataaatcactaaagtttttattctgaactcaaactttaatttggtattgtggtaataccataatagatagctttatgtggcttcytactcatctattaaagaggatcagaactcatgatctggccatggccagtttcccttccagaaatctgttggcccctttaatctggccacatttcagtgttaataagcacttgaacctctataagtgggatcccctgtccttttccttggagataacatttatttccattcattttttgtttggcaaatcctcattttgtaatatccaagtctttcgtgtttctttataagaaatgtgcttccctaacttttattatcactatcctttgtgcattaacattttaacacttgctacacattaatatcccaatttttatatgcaaaatgaagatagtaataatttctacctcagagtgtgtgatagtaaatggagaagagcttgcaaactcttcagcataatgattttacattgtaagcgtttaagaactgttagccaacagtttttgtctcttttacactcatgcttatgtttcttatgcatgacaaactatatactttataaactctacaaatattggaataactgaaaaatagcaaatattaatttaatcaataatatatatcacagaaaacagcacattttgcaaaaataaatgcattccacaaatataaaagattaatgtattggtattaatacaatatttacaaaaccaaatggttatgtggaatattttctattagtattattggccccaaatatttttataaattatataaagtttatattttagtagttggaaattctaaagacattgagatataacttctttatctaagagattttcagaatgttctgtaaatgcgcttcaggttggatctggattgcagattgcatacatatctctgcctcaaaaccttgaaattccaaaaaaattgtaaactacaaattattccataatagtgctgagaaacaagtaactatgtcatgaacataaaaggaaataccgagaaatttctggaacatagaaagcagaagagaaaagaacaaagaaactatagcctaaaactcttcaaagacttaatgggaagtcaagagcagatggagagtacctcaagctctcaaagatactagaagcaggagggctccagatgccattttcagggaacacaattaagtcagtgtttcactattaatccagcctagttccttaaaccattcctacatccaccctcagta

SEQ ID NO: 59745 - DNA, 1162 bp, Homo sapiens
ttctaattcccctccctccttttagacctgcttggttcccatcccttccctccaccaatggagctgcctgggacaggtrccctaaactcagttcgttttttatacttgtgccctggtacaggatagcaagcacccagagggctacttcttactctttactatataagctgtgtatgggtcagttgtagccttgccatgctatctcccaggcacggccatatctcctgcttggtactggacattcgttccttctatatctcagttcttcatactgagcaaccaacaaaatacacaagttggctttaatatcacccaacctgagataatgcagtaaagaatatcaactacaggatctcttttcttcacttacataatttgccttcaaattactcagagagcaggctcaaatgcagctcctcaagccctatctccagggactgtgtttttctaagtctgaggtgagaccctggacttgatgtatcattaaccagcatcccatgtggttttgatacccttgaagtaaggaccacaccaggcaaaacatggtatagcatgactttctttctgaggcccttaataactccatatagctggactattggagactactctgtgtcaggtggtttacatatataatttaactcacagtaattccatggctgctattaggatagtattatctgatttttttcagccagagaagtaaagaaaatgatccatctatcaccctgcatttattaagtgccagaatagacctgtgatttaaattgcatcttctgattcctagactaagggtctttccataacactatacaaaccaaagctattgcctagtctttgctcatacaatcttacttgctctgaagttgtttcctgttaaaatattgatgaatgacaagtgtcactcttcaaatcatcaaagaaatatattaccatgtctcactttctgctaaaatggatttctgaatctacaaggcaatcacatccagatttcctcaataaaataggtcttttaactagacctccacagtgcaaaactgaggggaaactggcatttactgcgaagggaagatttaaacccatttttgtgcctgaatagctagacattccattttactgtatattgaaagctcttagagggcaaaaaaatattcttttcaaa

SEQ ID NO: 59746 - DNA, 818 bp, Homo sapiens
gactcattcaggattctggatttaatgtgttggctttagttcctaggagtcaaattaatagtgtgctaaattggctgattaaaatctggactcagccatggtgtgacagattatattttccaaagtactgcatttggaatatacatcctggtccaatgcttagtcctggggctaagccagttctgctttctattgtaatatggtttggaggattctggatcattatgatatcccacagttgataaaattatgttaatcaacttcatgatcaggaagtagcaaacttctttgctgccgtagcaagacacatgtatgccacaggaagaaaaataaaaagaaagcttagggccttgccatcttgagattttctagagtccagtgatttgggtatttggggatatttcttctaaattgaaagacaggttgttgtaccttgccttgctcagaatgaggcccagagcttggtgagcctctttggaattcggaggtacttataccccatttgggttgctttgactcatttagcgggcagcccatgaggtaccagttttgaatggggcctgaaataagaaatggcgccgcagcaggtccaggctatggtttctgctgcctggccacttgagctttgggacctggcaaaactgacaagagaagaaaatatcttaggggaaagaaactctagtaaaatgaaagcaaatgatttttttattttctcattttaataaaacaatataatacttattatagaaactttaaagacacaagtaagaaraaagaagaaaataaatcacctacagccccacaacctgtacaactat

SEQ ID NO: 59747 - DNA, 864 bp, Homo sapiens
cattaattgcttcattcatttgttcaaccatctgatcactcaaggaacatttagtgagccctgggccaagctactgcgctggcataagtgtaacggagagggagacagccttcttagccccagtgtcaggctaatgttttataacttgaaggtttccttggctgcttgttcagtgttgggaagaaaaatgggagagagcaagagaagaaggaaggaaacagaatgaggaaaagagacaggtatgaagggtgctagagcgtgtgaagaaggggtaaaaaaaagaaaccttcaaaatgagtttttcttctgaaaatgaatccttttatgagggggagaggagaaacacatcaactgaacagtgagattagactgatgaatgtggaggagaaccctactgttcctcagatgattgcttgctttaacaagaataggtgtgcaataggactgccaaaagttattycccatgttaaaatctgaaaaccaaaatgaccccatctctggctcgccggccactgtggtctgtagaggggctaattctgagcacttgagttctgggaaacccatcaaacacgtggaaatgagcttgatgagaatcgctagatgtgaaggggctgagtgctactaagacaaattccactgccccattcccttactgaccaaccacctatattttatcatttttattgaagcacactttaccagcgtcattacatattaacctgtgttgagattgaaacagaagattcacagtgatgcaccctaaaggatgtgcaaaacttgagagaacaccaggaccaaaagaaacctagcttgttttctgacaacagctgatggtcattctaacaagagctgatgtagcatgca

SEQ ID NO: 59748 - DNA, 864 bp, Homo sapiens
cattaattgcttcattcatttgttcaaccatctgatcactcaaggaacatttagtgagccctgggccaagctactgcgctggcataagtgtaacggagagggagacagccttcttagccccagtgtcaggctaatgttttataacttgaaggtttccttggctgcttgttcagtgttgggaagaaaaatgggagagagcaagagaagaaggaaggaaacagaatgaggaaaagagacaggtatgaagggtgctagagcgtgtgaagaaggggtaaaaaaaagaaaccttcaaaatgagtttttcttctgaaaatgaatccttttatgagggggagaggagaaacacatcaactgaacagtgagattagactgatgaatgtggaggagaaccctactgttcctcagatgattgcttgctttaacaagaataggtgtgcaataggactgccaaaagttattccccatgttaaaatctgaaaaccaaaatgaccccatctctggctcgccggccactgtggtctgtagaggggctaattctgagcacttgagttctgggaaacccatcaaacacgtggaaatgagcttgatgagaatcgctagatgtgaaggggctgagtgctactaagacaaattccactgccccattcccttactgaccaaccacctatattttatcatttttattgaagcacactttaccagcgtcattacatattaacctgtgttgagattgaaacagaagattcacagtgatgcaccctaaaggatgtgcaaaacttgagagaacaccaggaccaaaagaaacctarcttgttttctgacaacagctgatggtcattctaacaagagctgatgtagcatgca

SEQ ID NO: 59749 - DNA, 939 bp, Homo sapiens
ggcaaaataagaaaatattccaaaagtagcatgctattctaaatatattatatgatgttattaaaatgtcagcacagctttgatggttctataatgttaatttttttaaaatgcaaaacctcataaatatattatggccctttctggaaagggaagaagataagcaggcgtatagaaaatgtcatgtgaaataaaatcacaacatttgagtggaatctagtcaaattctgccacaagcgactggtgaggcagggaatgaggacctgagttttcaataggaggaagatgaatgagaatgctgctgcttgctgaaggaggaaaagggagatttgaatccattccctgccactgcgtggtgctaggagccaaaggagagaattgacaagctgacccctgctattcagygtgacactccattaaggaagtttaaccccctggtaaggatttttaaagtggcaaaagtaaagggaaacaagtggcttttctgggtcgataatgttaaatatgaggctctatcacagtctaagaatcccagactcttctcaggagtatggctttctctgaagtaaacagtaggaagagtcaacaatagcagaaacagacaaacgctgtgggcagcaccaggtacttgaatcccagcctgattgggaatgggtaagtgccaatgggaaactaagagaacatgtggaatgtgatggatggcagcagtttgaggggcttcttgggaatctctcttctcgctgaacccctgatcctgtaatgggtggaagtagaacaatgacaaaccactcctttgatgcctagctacagatcactaaaggattatttaggactttgactatcagcaggctgctgaggtctagacaagaacctgctcatgggcaccattaaatgagtcattttattaaataaaacaaagcccatgtaaaaattaaggac

SEQ ID NO: 59750 - DNA, 1322 bp, Homo sapiens
cacacattaaaatctcccattagttctgccttttcgttgaaggctgatgatacagatttcaacattgagatcgggttcccaccacacgaggggctaaggaagagtatgtgtgatatgtctagagagcttcttagtcctcccgtgtttttcgattagagttaatggaaaatcacagcaaccccatccaggcaggatatctaatggttcagactcttccgtaatgaaggtttgagtcatcctgccaggccaagcatcatgaccaactgacatgctatctcagggcaaagggaatgcgaaacgggtagcgaaagaaggtagttataaacgccagctacatcagtgtgagctgctgcagaaaccacgactgtaatagtatttacctaatgggttaataatatctaccagcacaggtgggaatacaaaataaccaaaacacaagttatcctttcaaataaaacgctttgggaaaaagaacatcttttactaacagaaatttcttagcctctggaaggccagttgattcggtaacatatgccaggagacttcagcaatatcctgctccattgtagaaaacagcaatctgatccttttctctcctcaatcattaacgagattatgcatttggggtgtgataatcctccagggacaagtattctcaaatcatacgtttcagtttcttcttaaggtgcttaacaaagtctcgtctcatacatctgaagagaaagagacatgtcattaaccaaaagatagccaaagaacctatgctgtaggaagcgctgtgacagatagaaagatgaagtaacagtcagcatggaaatagaaatgtatctgcatggtaagaggcagtctagccggcataacaaatgctggcaagggtgtggagaaaagggaaccttcatacactgttggtgrgaatataaattactacaacaactaactatgaagaacagtttggaggttcctcaaacaactaaaaatggagctatcatatgatccagcaatcccactgctgggtatatacccaagagaaaggaagtcagtgtaccgaacagatatctgcactcccatgtttgttgcagcaccatccacagtagccaagatttggaagcaacctaagtgtccactaacacatgaatgggtaaagaaaatatggtacatatacaccacagagtactgtttagccataaaaaaaagaatgagattcagtcatttgcaacaacacggatagaaccgaaggtccttatgttaagtgaaataagccaggcacagaaagacaaacttcacatgttctcacttatttttgggagtaaaagtgtaaaaca

SEQ ID NO: 59751 - DNA, 1322 bp, Homo sapiens
cacacattaaaatctcccattagttctgccttttcgttgaaggctgatgatacagatttcaacattgagatcgggttcccaccacacgaggggctaaggaagagtatgtgtgatatgtctagagagcttcttagtcctcccgtgtttttcgattagagttaatggaaaatcacagcaaccccatccaggcaggatatctaatggttcagactcttccgtaatgaaggtttgagtcatcctgccaggccaagcatcatgaccaactgacatgctatctcagggcaaagggaatgcgaaacgggtagcgaaagaaggtagttataaacgccagctacatcagtgtgagctgctgcagaaaccacgactgtaatagtatttacctaatgggttaataatatctaccagcacaggtgggaatacaaaataaccaaaacacaagttatcctttcaaataaaacgctttgggaaaaagaacatcttttactaacagaaatttcttagcctctggaaggccagttgattcggtaacatatgccaggagacttcagcaatatcctgctccattgtagaaaacagcaatctgatccttttctctcctcaatcattaacgagattatgcatttggggtgtgataatcctccagggacaagtattctcaaatcatacgtttcagtttcttcttaaggtgcttaacaaagtctcgtctcatacatctgaagagaaagagacatgtcattaaccaaaagatagccaaagaacctatgctgtaggaagcgctgtgacagatagaaagatgaagtaacagtcagcatggaaatagaaatgtatctgcatggtaagaggcagtctagccggcataacaaatgctggcaagggtgtggagaaaagggaaccttcatacactgttggtgagaayataaattactacaacaactaactatgaagaacagtttggaggttcctcaaacaactaaaaatggagctatcatatgatccagcaatcccactgctgggtatatacccaagagaaaggaagtcagtgtaccgaacagatatctgcactcccatgtttgttgcagcaccatccacagtagccaagatttggaagcaacctaagtgtccactaacacatgaatgggtaaagaaaatatggtacatatacaccacagagtactgtttagccataaaaaaaagaatgagattcagtcatttgcaacaacacggatagaaccgaaggtccttatgttaagtgaaataagccaggcacagaaagacaaacttcacatgttctcacttatttttgggagtaaaagtgtaaaaca

SEQ ID NO: 59752 - DNA, 938 bp, Homo sapiens
aggacatacatcagccatggtggagtatattgcagaaaggcaacactgatttaacatttgaaaatcgacaaatgtagtgcaccacattaacaacaacaacaacaacaacaacaaaaacagggaaacaccgcatgatcattttcatacatggatcaatgtttaaagtccattcgtgataaaaactatcaccaacttaggaaaaagggcaactttcctattctggttagcatatgtacaaaaaatttttaaatgccatacttcatagtgacgtatcagtattttctccctgagtttgaaaacaagacaaagatgtccactatccattcaacaatttactggaggttctaaaaagtgccatatcatcaggaaaatacaataggtttaaaatttggaaagaaakaaaactgtcattattcacagatgacattgttctgtacatagaaaaatgcagaagaataaaatcattacagttaataagcaaatttagtcaacttactagatacaatgaaaaccaatggcatttctgtataatgaatagcaattctgtataatgaatggcattatacagaatggcaattctgtataacgaataattagaatatgagatttcaaatgtcattaaaaacagttccaaaaacatcaaatatttaggaataaatctaatcaagatgtgctagagtacttcacaaaaattataaaacatcactcagagaaattcaagactgcagtaaatggagaaaaatattctttccatgcattggaagacattactttttttttttttgagtcggagcctcgctctgtcacccaggctgcagtggagtggcacagtctctgctcactgcaacctccacttcccaggttcaagcaattctcctgcctcagcctcctgagtagctgcgattacgggcgcctgccacgacgctggataaagaaaa

SEQ ID NO: 59753 - DNA, 938 bp, Homo sapiens
aggacatacatcagccatggtggagtatattgcagaaaggcaacactgatttaacatttgaaaatcgacaaatgtagtgcaccacattaacaacaacaacaacaacaacaacaaaaacagggaaacaccgcatgatcattttcatacatggatcaatgtttaaagtccattcgtgataaaaactatcaccaacttaggaaaaagggcaactttcctattctggttagcatatgtacaaaaaatttttaaatgccatacttcatagtgacgtatcagtattttctccctgagtttgaaaacaagacaaagatgtccactatccattcaacaatttactggaggttctaaaaagtgccatatcatcaggaaaatacaataggtttaaaatttggaaagaaataaaactgtcattattcacagatgacattgttctgtacatagaaaaatgcagaagaataaaatcattacagttaataagcaaatttagtcaacttactagatacaatgaaaaccaatggcatttctgtataatgaatagcaattctgtataatgaatggcattatacagaatggcaattctgtataacgaataattagaatatgagatttcaaatgtcrttaaaaacagttccaaaaacatcaaatatttaggaataaatctaatcaagatgtgctagagtacttcacaaaaattataaaacatcactcagagaaattcaagactgcagtaaatggagaaaaatattctttccatgcattggaagacattactttttttttttttgagtcggagcctcgctctgtcacccaggctgcagtggagtggcacagtctctgctcactgcaacctccacttcccaggttcaagcaattctcctgcctcagcctcctgagtagctgcgattacgggcgcctgccacgacgctggataaagaaaa

SEQ ID NO: 59754 - DNA, 761 bp, Homo sapiens
ttattaacctcttatgaattaataaaggagtaatgggaacaatgtccttctattgacacaaactgaactgcctgtttcttattaatttgattaaatacccatctggaccaagagagctacaatagcttgttaggtatttctgacctaataacagatttatttctgagtaagattatataataatacttaaatctaatgacgtttaagcttgattttttcacatatgaatccagtgtaactttttgattgattacgtgatggtgattattgatgggatgttcgttggtgtccaataatgtgttaaaattgggagcaaatatttagaagaccatactattaacaagaagctgtttataggatttcatctaaatctcatattgtgatatgcaagattctattcttattcacttcccacatcagggtaaagaaattaatttgccttcaatctcaggaaaaccagaagtagactagcactagttctcagrcaatgtcactgctgtgactgctgttctcttctaagtggatactgtagcacaacagagagtacatttattaatttgaatggtttggcacagctaagaggtctccccaccacctgcatctgtgaattagtaacataaactgaaacagaacctgcattgaaagtaacaatattggcagcagctgacaatgagaagttagaatattcagacactgtgctaagcacttttccctaagcatcatcttatttaatcatcacaatataccatgaaatagttaca

SEQ ID NO: 59755 - DNA, 1312 bp, Homo sapiens
atctgttttgtttcctcattctctcctaacagctaaaattttaaccaaagaaaactataactttctatttaagacaatgtgatttttcccatctctttttctttcaacacaaagtcccttatgcctacagtgcctttcccacctctccttcctcacccctattctggtaaaagccctaataccttatggctcaatccaaagtttgccacttacggagttttcactgagtccaggacagagtcagttcattcttctcaatgattctcttccatcatgcttcacaacttaaagtayagtcagatgcttctgtgtgtgtatttcagttctgctgcgcctatgcagttctaccatcccatgcagtgtatggcccagagcagctatttaatacaaattgagtcaaagaataggagtggggacatagtgaaaactgcattcaccaaggaaacattttgttattgtctccagtattcactgagttctgtttgaaaataaaatcattaaagaaactacatatgctatgttttcttgatttcgaaaatgccacctattttaagacacatattaattatgaggttcatcatcaaatttaagaacagctgggggagcgggattgacaaacatattttaatatgcatattgactgcaagctatatcccagtttcagaaacaataagatattgggaagaacttgccccttagaattgaggaaactgtcattgcttttctccaaaaacaaaacatttattggcccttcctttgccccaactgggctcctcttcctgtctctcttatcccagaccaagcatttcattacctcgctttatgcagacccaacacattaggacctcatcttggggtgtccagtgatgacagatgatgatagttttttttttattcgtctgttaattcgaccaacacactaagctattcttttttttcagattccccccatttttctttatctgaataagttataatactcctcaaagtggggttcagacatggtttttttctaggaaatcttcctagagtccttgaacttgagtaggtcctttcttttctctttccaaggtacccagttcatatatctgtcataatatgtaccaaatgctattgttttctcagtttacttgcagcttcactgatctccgaatctctggaggtcaaaaaccctgtcttcaatctctgcatcctcagcctctacctcagtacctctacagatgtttctcaagtaaaggtgcatgactaaatactaaatgaatcctgtctccagagtcagatgatgaaggtgacacaatagcataataagatg

SEQ ID NO: 59756 - DNA, 1312 bp, Homo sapiens
atctgttttgtttcctcattctctcctaacagctaaaattttaaccaaagaaaactataactttctatttaagacaatgtgatttttcccatctctttttctttcaacacaaagtcccttatgcctacagtgcctttcccacctctccttcctcacccctattctggtaaaagccctaataccttatggctcaatccaaagtttgccacttacggagttttcactgagtccaggacagagtcagttcattcttctcaatgattctcttccatcatgcttcacaacttaaagtatagtcagatgcttctgtgtgtgtatttcagttctgctgcgcctatgcagttctaccatcccatgcagtgtatggcccagagcagctatttaatacaaattgagtcaaagaataggagtggggacatagtgaaaactgcattcacsaaggaaacattttgttattgtctccagtattcactgagttctgtttgaaaataaaatcattaaagaaactacatatgctatgttttcttgatttcgaaaatgccacctattttaagacacatattaattatgaggttcatcatcaaatttaagaacagctgggggagcgggattgacaaacatattttaatatgcatattgactgcaagctatatcccagtttcagaaacaataagatattgggaagaacttgccccttagaattgaggaaactgtcattgcttttctccaaaaacaaaacatttattggcccttcctttgccccaactgggctcctcttcctgtctctcttatcccagaccaagcatttcattacctcgctttatgcagacccaacacattaggacctcatcttggggtgtccagtgatgacagatgatgatagttttttttttattcgtctgttaattcgaccaacacactaagctattcttttttttcagattccccccatttttctttatctgaataagttataatactcctcaaagtggggttcagacatggtttttttctaggaaatcttcctagagtccttgaacttgagtaggtcctttcttttctctttccaaggtacccagttcatatatctgtcataatatgtaccaaatgctattgttttctcagtttacttgcagcttcactgatctccgaatctctggaggtcaaaaaccctgtcttcaatctctgcatcctcagcctctacctcagtacctctacagatgtttctcaagtaaaggtgcatgactaaatactaaatgaatcctgtctccagagtcagatgatgaaggtgacacaatagcataataagatg

SEQ ID NO: 59757 - DNA, 1312 bp, Homo sapiens
atctgttttgtttcctcattctctcctaacagctaaaattttaaccaaagaaaactataactttctatttaagacaatgtgatttttcccatctctttttctttcaacacaaagtcccttatgcctacagtgcctttcccacctctccttcctcacccctattctggtaaaagccctaataccttatggctcaatccaaagtttgccacttacggagttttcactgagtccaggacagagtcagttcattcttctcaatgattctcttccatcatgcttcacaacttaaagtatagtcagatgcttctgtgtgtgtatttcagttctgctgcgcctatgcagttctaccatcccatgcagtgtatggcccagagcagctatttaatacaaattgagtcaaagaataggagtggggacatagtgaaaactgcattcaccaaggaaacattttgttattgtctccagtattcactgagttctgtttgaaaataaaatcattaaagaaactacatatgctatgttttcttgatttcgaaratgccacctattttaagacacatattaattatgaggttcatcatcaaatttaagaacagctgggggagcgggattgacaaacatattttaatatgcatattgactgcaagctatatcccagtttcagaaacaataagatattgggaagaacttgccccttagaattgaggaaactgtcattgcttttctccaaaaacaaaacatttattggcccttcctttgccccaactgggctcctcttcctgtctctcttatcccagaccaagcatttcattacctcgctttatgcagacccaacacattaggacctcatcttggggtgtccagtgatgacagatgatgatagttttttttttattcgtctgttaattcgaccaacacactaagctattcttttttttcagattccccccatttttctttatctgaataagttataatactcctcaaagtggggttcagacatggtttttttctaggaaatcttcctagagtccttgaacttgagtaggtcctttcttttctctttccaaggtacccagttcatatatctgtcataatatgtaccaaatgctattgttttctcagtttacttgcagcttcactgatctccgaatctctggaggtcaaaaaccctgtcttcaatctctgcatcctcagcctctacctcagtacctctacagatgtttctcaagtaaaggtgcatgactaaatactaaatgaatcctgtctccagagtcagatgatgaaggtgacacaatagcataataagatg

SEQ ID NO: 59758 - DNA, 740 bp, Homo sapiens
agggtgagaccccatctcaaaaaagaaaaaaaaaaggaatagaatagaatgaggcagaagtaacagcctgacttgtaagaccaagtaacaaaaggcgctatggcatccttcccgctttctctcttgaattgctcactgtgagaggaagccagccgccatgttgtaagaacactcaagtagtccctatggagaagtccatgtggtgagcaactgaggcctcctgccaacagccatgtgagggagccaatttggaaacaaatcttccagccccagtagagccttcagatgaagacagcaacagccaacaccttgactgcaacctcagcaaagatccccaggcagaaacacccagctaagctgctcctgaattcctgatccataagaattaatacataataaatagagataatacgtttgttgttttaaatggctacatttggggtcacttgttacacagcagtggataactattgcatctctcacagggtctttctcctgcactgggcagcraggacctggaggtaggaaccatgtgttcctttttcccccaggatgaagaccagagcctagctcactcaatgaataaatgaatgaatgtgcgttgagtataagggaacccatctagaacagatcccaagttttcaggctccctggcaggatcttggagccttctggtaagtagttaggggaggtgctaacaggacggcactgcactgagtgtaccacatgcttatcccatg

SEQ ID NO: 59759 - DNA, 1550 bp, Homo sapiens
caaactcctggcctcaagkgatccacccgcctcagcctcccaaagtgctgggattacaggcatgagccaccgcgcctggtccctcctttatcttcttattgctggttcctcatcattcagatctcagtttaaatatctcctctttgatgacctgatccaaaatagccaccaggttaccttctatatcatctcaccttactctaattctcaatgctgtatttattatctgttaatttccttgttgatttgtacatttattgttctcttctcctccttccaccctcctcacactagaatgtgagcagggtccacatctttacccccagtgcctagaatagtatttggcatgtagtattcaattttggtgtttaataaatatttgatgaataaatgatacatttaatccttcatgcatgattctcagcacatggaagatactcactaaatgtcctcttgttgtctttccccaagagtacattcttgtgtctggggctagtctagaagtttccagtgaagacaatcatctgataaagagattcatatttctgtgttaggatcctgattattagggtttctagacaaaggggaattacattttaccaagaaaaaaacagtgatagaattccagggatcattagtgtcacatttttcagtgtgggactttcctggccctcctaactacaagactggttctcagattccacaaaatcgacatgttttatcttgggattctgtcgtgtaaatttttgaaacacttcatttgggaggatcacgtggatttttaggtgggaagaaggggatagcaaaggaagtggcattcttctctgcctttgttaatagtatcatttcctgtgcccatttcaacgttagctctggtataacacaagtgataagccgtgtgtgttattgaaatctgagaaaagggcaccaaaaaatgtttagtactttgtactggtctaaaattcatgacttgaatatgtggggagagagtgaggaagattgggaagatgtatactgaagtggtttccctttgaggtattatttgaagattggtgtgatttttgggaaagctcttgtagtggattttaaagcttccaggaaaaaatctgtaccaatgaacacgactaatgattttgtcagcagatgattcgctttttgacagaaatataccacatgtttttggggtatttggagaaaccatcacccttgacccagtaggatttttttttaaactgggccaaatgcttattgtattcacagttcatacatgagtcaagagctgggcgccattactcagcttgtgatattgatcacctgttcatcacgattcatcatttcaagcagccatccttatgaaagcaggcaagtgtgtcaagtagtatttcatggacatatttagagcgttcttcttcttccttcttctttcttcttcttcttcttttttgagatggggtctccctatattgcccaggctggtcttgaactcctgggctcaagtgatccttctgcctcagcctgagtgttactctctttgacttatccataaaagt

SEQ ID NO: 59760 - DNA, 670 bp, Homo sapiens
aaaatgtctattttaagtgtcaaaaaagttaaacaatgaccatagccaaacatactttatcattatatattattataaatacataatatatgcttgtatgtgacttatagtataggcatctattaatatattgtgtttttataaatatataatatatattataaagatctatttagccgtatatatttagcaatctgtgacctactttgcaagactagaattctcctctgttatggttagaaggattattaactacagggggaaatgggatttgggcttgtatttttccactattacataagcaaataaaactgccaagctgctgcctttatttaaatattccttaatgatgtgtgagacttttcctctgyatcttccttgttttgttctctctctctctgtctctcaaaacaactgtgccttttgtggaaagaaaattgtggcaaatattaaacaggaagctaagccagcacgggaaggaagatgtttgtcttacataaagccgatttaaactactctcatccttgcctcatccctgaagccacgtctggctcatgctgtggggagcactgtgctcagactcagcaaaagccctccctgctgcctgggacaattcctgcctccctgagagccttcctgggcagcacctgctctcctctggcggtgcaga

SEQ ID NO: 59761 - DNA, 1006 bp, Homo sapiens
cagcctgccgattatgtgtgtaaataaagttttattggcacacagcacattcactttgaatgtattgtctaagacagagttgagtagctgcaagaaaggccacctggcttgcaaagatggaaatatttactattttgctttttatactaagaaaaagtgtacagatacctgatgtaacagcccaccaaaacttgaacacattcctcttgcatagtaaatttgactgaacggaatccagttaktccccatacatgcagctgcgtgtagttcatgtatcaatgggatttgactggctctttagtgtgtatgtgattgacccatgctggttttatgaactggattatttccttacatcctctcctccactggcctgtcctgcatatttttctcccaaattagcaatggttggaaaattggctcctaccaagaccgagaggtagcagaggagaccacagaaaagcaggtgattagcaaggatgaaaagattcttctgccactgcctgagcgacagaaccaaagggaagtcaactcagccacactgaaaactggtctaggaataacaggaaattcagaggacacgcgacaaatgcctctttgctgtcagagttcactggttggaaatcgtccatcataagcaagacaggatggtaagtcgacaagccactttctctgcctcagcagttgacccttccagttcttatcaccccgcaaaaatgaaatgagggccaccaggtcctgccatccacgctccactccggcttttcagaagctggtccacttggaacaggaaacttcaaatcagtggtgttcaaatagaggtcataaggtatttggaagcagattagtgggtgtcatgaagtcttttgtaagtcatgaaggagaacagagaagcatcagtttgtaacataaagcaaaagcaaatattgttttcagaaactgcatttcagatataaatgtacacacatatgtgtatgtatttatataatatgtgtgcatttatgtgtgt

SEQ ID NO: 59762 - DNA, 1006 bp, Homo sapiens
cagcctgccgattatgtgtgtaaataaagttttattggcacacagcacattcactttgaatgtattgtctaagacagagttgagtagctgcaagaaaggccacctggcttgcaaagatggaaatatttactattttgctttttatactaagaaaaagtgtacagatacctgatgtaacagcccaccaaaacttgaacacattcctcttgcatagtaaatttgactgaacggaatccagttattccccatacatgcagctgcgtgtagttcatgtatcaatgggatttgactggctctttagtgtgtatgtgattgacccatgctggttttatgaactggattatttccttacatcctctcctccacyggcctgtcctgcatatttttctcccaaattagcaatggttggaaaattggctcctaccaagaccgagaggtagcagaggagaccacagaaaagcaggtgattagcaaggatgaaaagattcttctgccactgcctgagcgacagaaccaaagggaagtcaactcagccacactgaaaactggtctaggaataacaggaaattcagaggacacgcgacaaatgcctctttgctgtcagagttcactggttggaaatcgtccatcataagcaagacaggatggtaagtcgacaagccactttctctgcctcagcagttgacccttccagttcttatcaccccgcaaaaatgaaatgagggccaccaggtcctgccatccacgctccactccggcttttcagaagctggtccacttggaacaggaaacttcaaatcagtggtgttcaaatagaggtcataaggtatttggaagcagattagtgggtgtcatgaagtcttttgtaagtcatgaaggagaacagagaagcatcagtttgtaacataaagcaaaagcaaatattgttttcagaaactgcatttcagatataaatgtacacacatatgtgtatgtatttatataatatgtgtgcatttatgtgtgt

SEQ ID NO: 59763 - DNA, 1006 bp, Homo sapiens
cagcctgccgattatgtgtgtaaataaagttttattggcacacagcacattcactttgaatgtattgtctaagacagagttgagtagctgcaagaaaggccacctggcttgcaaagatggaaatatttactattttgctttttatactaagaaaaagtgtacagatacctgatgtaacagcccaccaaaacttgaacacattcctcttgcatagtaaatttgactgaacggaatccagttattccccatacatgcagctgcgtgtagttcatgtatcaatgggatttgactggctctttagtgtgtatgtgattgacccatgctggttttatgaactggattatttccttacatcctctcctccactggcctgtcctgcatatttttctcccaaattagcaatggttggaaaattggctcctaccaagaccgagaggtagcagaggagaccacagaaaagcaggtgattagcaaggatgaaaagattcttctgccactgcctgagcgacagaaccaaagggaagtcaactcagccacactgaaaactggtctaggaataacaggaaattcagaggacacgcgacaaatgcctctttgctgtcagagttcacyggttggaaatcgtccatcataagcaagacaggatggtaagtcgacaagccactttctctgcctcagcagttgacccttccagttcttatcaccccgcaaaaatgaaatgagggccaccaggtcctgccatccacgctccactccggcttttcagaagctggtccacttggaacaggaaacttcaaatcagtggtgttcaaatagaggtcataaggtatttggaagcagattagtgggtgtcatgaagtcttttgtaagtcatgaaggagaacagagaagcatcagtttgtaacataaagcaaaagcaaatattgttttcagaaactgcatttcagatataaatgtacacacatatgtgtatgtatttatataatatgtgtgcatttatgtgtgt

SEQ ID NO: 59764 - DNA, 1006 bp, Homo sapiens
cagcctgccgattatgtgtgtaaataaagttttattggcacacagcacattcactttgaatgtattgtctaagacagagttgagtagctgcaagaaaggccacctggcttgcaaagatggaaatatttactattttgctttttatactaagaaaaagtgtacagatacctgatgtaacagcccaccaaaacttgaacacattcctcttgcatagtaaatttgactgaacggaatccagttattccccatacatgcagctgcgtgtagttcatgtatcaatgggatttgactggctctttagtgtgtatgtgattgacccatgctggttttatgaactggattatttccttacatcctctcctccactggcctgtcctgcatatttttctcccaaattagcaatggttggaaaattggctcctaccaagaccgagaggtagcagaggagaccacagaaaagcaggtgattagcaaggatgaaaagattcttctgccactgcctgagcgacagaaccaaagggaagtcaactcagccacactgaaaactggtctaggaataacaggaaattcagaggacacgcgacaaatgcctctttgctgtcagagttcactggttggaaatcgyccatcataagcaagacaggatggtaagtcgacaagccactttctctgcctcagcagttgacccttccagttcttatcaccccgcaaaaatgaaatgagggccaccaggtcctgccatccacgctccactccggcttttcagaagctggtccacttggaacaggaaacttcaaatcagtggtgttcaaatagaggtcataaggtatttggaagcagattagtgggtgtcatgaagtcttttgtaagtcatgaaggagaacagagaagcatcagtttgtaacataaagcaaaagcaaatattgttttcagaaactgcatttcagatataaatgtacacacatatgtgtatgtatttatataatatgtgtgcatttatgtgtgt

SEQ ID NO: 59765 - DNA, 1235 bp, Homo sapiens
tcatctaactactagataaatttaatgctaattccatgcagatggaccacataatccaatctcatattttgctaaaaacacccagatgttcaatgtattttttaggttctgcctgggttcagtcactgtatatcatctattttcccaatggaccataagtctcaaccttatcctgtctccatcacacctaaggactttgacttatttttatcagagataataacttactatagtagtatttctgggtagggtgagaggaaagagaaaaataaaaactaaaaaaagaggtgatctgagaaaaaaagagaaaagtgtgaataatttaaaatatctaccaccacacaaaatgatctgatgaaacttgctttctacccgtgaattcactcctgtcatattctctaagataaatcccaaagtaagacaagaaggtgtttgaagtggcttggattaatgctctggcactcgatgccagcttcctcatgaagctaccctagaagcagtttaaggaggcatatttttaaaagaagtattcctctatcttatttccaagtcctactgtctaccttggactctatttcatttagctgtgtttgggcctggttatggggtcactttctcagcaggccttcatctccccaacactggggctctgccatgttcttgcttaccttctccctagggctgtattgtttattcaggtttattgtagcataaatgtagcattttaaagctgaaaaaccattaaagaatcaytaaattcaatatcctcctttcaggagtgtggaaaccagaggtaaaatcagaggtcaaattttcccaattaagcactaaaggcgtggcttgagtattgcacatcttgcaatacttttcttttccttctcaccgtgactactactagtattactagtgtattttgtacaaagtaagttcttcctcacctaacatatatttcctcccttctcaattatactttctttctgtgtgtatcttgtgtcttgtcccaccagcagaaagatatctttcttgaacaaaatgcaagtctgtagctgcattcaggtacaggtggtctgcattcagacctccatttgttggagagaaacttctcattctttctcaattcagagaacctaggatgtatctggcgttctttgagcagatagaaaacaatgtcatttctcccactgaaatgcagaattaagaaaatggttttgaaacctgttcccatctctaacttt

SEQ ID NO: 59766 - DNA, 754 bp, Homo sapiens
agacatttcaaaaggttttttaatatagtaaaagcattctactataaacttgcacatccgtatgtatataatataattactcagatcaactataatatgatttattatacaaactatcttccatatcacacttttctaaaggttggataacaaaatgtgtaatatgtgttttcactagacacaagatgttctgtgtatataagagaagcaaacaaagagtttcaatgtagacagttctgcctggccgagagaattggtttctcaagcatatggatggatccmtttcttccttgttgtctttctgtgagttgatgctggagtgtctgatggtgaggaaggatcagtgcctgagagatatgaagatgagacaccctgacattggcctcagcactagaaacttgtactatttcacatagctccaagaagaattaaaagaaccaaggatctaaccactcccaagctgccttgtaatctgaatccttggaattttcttggcctacttttagctgaagttctgactctgtatcagggagagattcttcactaaattgatccttttcttgagagtgagctaacccaataagcactgaaattcatttaaaggaaaaatttgcattaacatttcttataattttgtatcatttttacatgaaagtgaatattctcctccactctatcccacacgcacacacaggggcactcaatttgggcagtttctttttaatgtctatcagatttactctaggcaaactga

SEQ ID NO: 59767 - DNA, 820 bp, Homo sapiens
agatggaagctgagtcatgatactgttatgttacttgcttaaggccacacatttgatcaggatttgacttcagtattttccaactccaaagcctgtggtcttaaccacacactcttagctacaactgtgtactgcttcccaaagaccrtgtaggaattagaagtggaattctgagatttttaacccccgggggaagcataaagactgtgggtccagagttggaccagaatatctcaaccataactgtataccttgagtttgcccagagtaaacaccattgagccaggggaaacctgtaaggtggcctccttcctctagtcttagcttctatctccacaattaccagaacagctgccagaccagccatccaagtgaccaaaacctggtggcggctgcatgtgccctggtcagacactggttctccaaggttatacattgaaatctgatgtctgggtcccatcctggaagttctatagtttagggtgagtcctgggcttttaaaaagcatctaaggtgattctattgtgcatccaagaatgaacattgttgtgtaaaagaaaagtcaagggtttgaggccccttctttccatagtcagcaaagcagctggcttcatcccaggcttttgcttgaaaaacattaataaatgcctgccgacgatgaatcattcccttaagaagagaacaatttcccaactgtaacttaaagtcttgggagaaaagagaggaaaagccacggagaaaaaaatttctagaagactaaaatgtatttctaacaaaatttaaatacaagataactgatcattgtgggaggctgattttt

SEQ ID NO: 59768 - DNA, 835 bp, Homo sapiens
acaatgctgtggccctcctcacacctcctctaggctctccacattcatatatatctatctggtgaaggaagtaatattttgtttatgtgaagagtttaattgattaagttctgaaatctgttttctattttctatcatcatgccagttaatccattctcaaattttcatcccttccacttagcagaaaaaaaaaaaaaaaaagaaaaaaaatctaagtcctggaatatgctaaaattaagactaacctgaaaatgccattccaattcagaactgctagaatgggtcatttgtcactattacatgtaactgatagcctattttggtagaccagaaactggcttgaagccactagacaagtgtcaaatatgttctcaataaatgcagtctgtgtcattaagctgaatttctttttcaaggaaaggcagyctttcctgaaaattattcttagaaatttggagaaagggaggcaatgtaaaaaaaaacaaaaaacaaaaaaaaaaaaaacacgaaaaaacaaaaaaagaaaacaaggaaaggaataaagcttattaaaggagtagataccctgcaattgacagaaaactcagtaagtttgagaagcctgtagaattaaatcgaccaaaacacagaaaagatatttactctctgagtcttcccagagaaagttgtcacactgtggtgatcctcaagaggtcaggatatattaaaaaacaaagacccactcctcacaatttgggtagaaagatgatgaaaatgacatattcaacagttagagatcaaaaaagcattgcagaaaatttcaccaataagtaaaactgcatacacaggagttgt

SEQ ID NO: 59769 - DNA, 835 bp, Homo sapiens
acaatgctgtggccctcctcacacctcctctaggctctccacattcatatatatctatctggtgaaggaagtaatattttgtttatgtgaagagtttaattgattaagttctgaaatctgttttctattttctatcatcatgccagttaatccattctcaaattttcatcccttccacttagcagaaaaaaaaaaaaaaaaagaaaaaaaatctaagtcctggaatatgctaaaattaagactaacctgaaaatgccattccaattcagaactgctagaatgggtcatttgtcactattacatgtaactgatagcctattttggtagaccagaaactggcttgaagccactagacaagtgtcaaatatgttctcaataaatgcagtctgtgtcattaagctgaatttctttttcaaggaaaggcagtctttcctgaaaattattcttagaaatttggagaaagggaggcaatgtaaaaaaaaamaaaaaacaaaaaaaaaaaaaacacgaaaaaacaaaaaaagaaaacaaggaaaggaataaagcttattaaaggagtagataccctgcaattgacagaaaactcagtaagtttgagaagcctgtagaattaaatcgaccaaaacacagaaaagatatttactctctgagtcttcccagagaaagttgtcacactgtggtgatcctcaagaggtcaggatatattaaaaaacaaagacccactcctcacaatttgggtagaaagatgatgaaaatgacatattcaacagttagagatcaaaaaagcattgcagaaaatttcaccaataagtaaaactgcatacacaggagttgt

SEQ ID NO: 59770 - DNA, 835 bp, Homo sapiens
acaatgctgtggccctcctcacacctcctctaggctctccacattcatatatatctatctggtgaaggaagtaatattttgtttatgtgaagagtttaattgattaagttctgaaatctgttttctattttctatcatcatgccagttaatccattctcaaattttcatcccttccacttagcagaaaaaaaaaaaaaaaaagaaaaaaaatctaagtcctggaatatgctaaaattaagactaacctgaaaatgccattccaattcagaactgctagaatgggtcatttgtcactattacatgtaactgatagcctattttggtagaccagaaactggcttgaagccactagacaagtgtcaaatatgttctcaataaatgcagtctgtgtcattaagctgaatttctttttcaaggaaaggcagtctttcctgaaaattattcttagaaatttggagaaagggaggcaatgtaaaaaaaaacaaaaaamaaaaaaaaaaaaaacacgaaaaaacaaaaaaagaaaacaaggaaaggaataaagcttattaaaggagtagataccctgcaattgacagaaaactcagtaagtttgagaagcctgtagaattaaatcgaccaaaacacagaaaagatatttactctctgagtcttcccagagaaagttgtcacactgtggtgatcctcaagaggtcaggatatattaaaaaacaaagacccactcctcacaatttgggtagaaagatgatgaaaatgacatattcaacagttagagatcaaaaaagcattgcagaaaatttcaccaataagtaaaactgcatacacaggagttgt

SEQ ID NO: 59771 - DNA, 1311 bp, Homo sapiens
tgtatatttcacatgtatgtaatatagatgcacccaacagtcacaggcttcaggagtactctcgctttctgttccataataggaatagttcaagtcctcatcctgctctgctgcaggaatggcagcctgttattaggccctccttcccaagagtttctgtgtatcccaaagaaagctaagtgtttcacaaatttcactctgctacagaagtagcctagacttagggatgtgctcattcaatagctggctctctagaaagaaatgtgtagtttgaatcagagtaggtgtgtgtataattaattttactgatataaaatatgtgtacaccagatttaccgataataaaatatacaatattttcattataaattccatatagcaactgattttcacagactcacagactgctttcattgatttttgccaaacttagtgttcatggacaacacatggttgcaattgacaacaagtacggtcctgacaaaaatgctgtttgatatttggtttacattatagaatacagtaaaagtgaaacaaygaaaccatatgtcagaacctcactcattcatcaagagtaagagcaacttttcactgaatcaaataatcgtttttgaagactagaagtttattcctgttttgcgttatttataatgtaatagacagacatgacacattttaagatttaatctgcattattaacatattccgcatcactttcttaaatctagaaaatcaacaaaacaataaatagagccctgtttggtagcagttgctggtttcagtgatgtaaatacaactgccatggctgacttcgagctatcaccatgacatcaaacatggagttgggaagagctgtgcagtaacatactcttatacaatatttctggccaggcgtcgtggctcacgcctgtaatcccagcactttgggaggctgaggtgggcaaatcacctgatgtcaggcattcgagaccagcctggccaacatggcaaaaccccatctctactataaacacaaaaattagctgggtgtggtggcgggtgcctgtaatcccagctacttgggaggctgagacaggagaatcacttgaatccgggaggcagaggttgcagtgagctgagatcacgccgttgcactccagcctgatgacagagccagactccgtctgagaaaaaaaaaaaaaaaaattccagcctgggcaacagagcgagactccgtctcaaaaataaataaataaataaaatatataaagtacttagaataggcaaacaaggcacactatagatatattggtattattatattatattatt

SEQ ID NO: 59772 - DNA, 759 bp, Homo sapiens
agacccacacacatatatgtttccaacagcactgtttgcaattaaaaaaaaaagaatggaagtagcctaaatgcccatcaaccaaccaataggtggataaagaaaatgtatacacacacacacgcgtgcgcgcacacacacacacacatatacacacacatatacatactatatatatatacaccatggaatactactaagccataaaaataaacaaactaatggcattaacagcaacttgtacaaagtgggagggcattattcttagtgaagtaattcaggaatagaaaactgaacattctaaattgtcacttataaatgggatctaagctatggggatgcaaaggcataagaatgatatagtgggttctaaggattcagaggagagggtgggagggggtgagggatacaagactacacattgagtgcagggtacacttctcatgtgatgtgtgcactaaaacctcagaaattaccactaaagaacttatccatctaatcaaacaccacctgttcccaaatagctattgaaataattaaaaatatgagaataaaatcaaacagatgaatatttttaaatatctggaaaaaatagaattggcttgtgaaaccaaagatgttgcagaatagttcaaatttacagtaggaagcaggaaagagtggctatatttctaattccacataatttccactgagaaatgacttatgtgcttaaaasagtaaacatttggccataaattttagcaaaaaatgtgacaa

SEQ ID NO: 59773 - DNA, 570 bp, Homo sapiens
acagacatgagctaccacgcctagcacaataaattactatagccttagagtcctttttttctaaagtctctttagggaatttgcaagaactgctcacctagaaatgcttccaattgcaactaggctccctgacccacccagggcatttctagggacgtaggtaagcaaggcgacctgaagctaaagcttcattaggctcacagtaaatctggctttgctgcaggctctacacgtgatggcccttgtttttattattataataatttgtaatctccatggtggtttctttttctttttctttttttgagatggagcttcgcactgttgcccaggctggagtgcagtggcgctatctcggctcactgcaacctttgcatcccgggttcaagcgattctgtttcagcctccctggtagctgggactacaggcatgygccaccacgcctggctaatttttgtatttttaatagagatggggtttcaccatgttggccaggctgttctcgaattcctgacctcaagtgatccacccgcctcggcctcccaaagtgctgggattacaggtgagagc

SEQ ID NO: 59774 - DNA, 570 bp, Homo sapiens
acagacatgagctaccacgcctagcacaataaattactatagccttagagtcctttttttctaaagtctctttagggaatttgcaagaactgctcacctagaaatgcttccaattgcaactaggctccctgacccacccagggcatttctagggacgtaggtaagcaaggcgacctgaagctaaagcttcattaggctcacagtaaatctggctttgctgcaggctctacacgtgatggcccttgtttttattattataataatttgtaatctccatggtggtttctttttctttttctttttttgagatggagcttcgcactgttgcccaggctggagtgcagtggcgctatctcggctcactgcaacctttgcatcccgggttcaagcgattctgtttcagcctccctggtagctgggactacaggcatgtgccaccacgccyggctaatttttgtatttttaatagagatggggtttcaccatgttggccaggctgttctcgaattcctgacctcaagtgatccacccgcctcggcctcccaaagtgctgggattacaggtgagagc

SEQ ID NO: 59775 - DNA, 1445 bp, Homo sapiens
tgcatgatggcagtagctggcatggcgcacatgatgataccactctggatcccaagtgctatgtgcgttgttaatggtggctgaaatggactgggcagaccagtctccatgcccatagatggcatgtgcaggtaggtgccagctgtgggggtagtgacagggtgggtaggttcaacctcaaggctatgagagaagtgctcaggtgccaatgttggtggagtgagctggttaatctccaagcctctggactgcatgctttggcttttgggggttcaagcttagctgggtgggcttgacttagggccccacagtggtatgtgcaggtacttgctatggtaagtaggggtgaggagattcccaggcctccaggagaatgctcaagaagggkgtggcagcagtcgtactacattcctgccactgaggaggatagggccaccttcagtgatggcagcctaggctggtggctagggaacacctgccctgctcttgcctcagccccattggcagcagccctcgccttcactgcattttagtcccagcagcagcagcatcctgcactttgttcatgacttagctctagtactgctgggcccaggatagttcatagcctgttgtgtgctatgctcttaaaatggcaccttgctgtagatgcttaggagttgggggaagtgggggacctagtacaaactcattccctggagcagttctattgtctaatctccaggcagctccatatattagtttcagggcttgcataggtgatggggatctcccatgcctgggactgcaggagtccacagttggaatgtggtccactgtgagtctattacttactctttccccacactggggagtcattcccgtctcccagctgatcttggctgagaagagtgcttcacttccctctcctttcttgctttaggtatttttttgtcacttttctgttgaattccagtgtcctctttttaacgatctattcaaagtgcaattatctactcattattttggtggttcttagtgcccaatgcatatttctgaatgaggtaaagaatcagtgatccatttgctttttactgtatgttaggggttgaatgtttcttccaaaactcatgttgaaacttaatccccaatgtggcagtattgagagttgggatatttaagagatgattggatcataagggctctgcctgcaggaatggattaattcattcatggagtaatggacaagtggtttaatggattaatgggttatctttggaggggaactggtggattaataagaaaaggaagagagagctggactaacatattagcacactcaggtttgttgccacgtgatgccttgctcctccttggtttgctgcaaaaagcccaccaacaagaaggccctcactagatatgcccccttgaccttaaacttctcagcttctgtaatgatataagaa

SEQ ID NO: 59776 - DNA, 591 bp, Homo sapiens
cttttaccacaacacgagtgcttagatatttgcagattaaatttctttttctgtgtttttttttttttaatggaatttcactcttgttgcccaggctggagtgcagtggcgtgatcttggctcactgcaacctccacctcctgggttcaagtgattctcctgctgagaatcctgagtagctgggattataggcgcatgctaccaggcccggctaatatttgtatttttagtagagataggtttcaccatgttggccagcctggtctcgaactcctgatcttaggtgatccacctgcctctgcttcccaaagtgctgggattacaggygtgagccaccacacctagcccagattaaatttctataagtactttagaattttcttcataataaaaaattaattaaatttttttcctgtatgagagagcctcaaaatatgattcacaacttactgctacttcatgtatagtgctaactacttttgaatcacttcatgcagattaaagagaactaattaaagatcagtgctcttgagagcaaggcccaatgcagagagaaacaagagctagcagccagaatgcaagggaggagaa

SEQ ID NO: 59777 - DNA, 638 bp, Homo sapiens
tctgtccccgctgggtcrtatcagtcgggattcgagccccggtgaccaatcgacccggtttgttcggaactgacagggttgtcaagacgctgggctttccctggcaaaccaagacgacctgatcacgtagttagaacccagagaaagcattactgggcgtgagccggtcggggctccggtatttgcccttcgcccaggtgttgttttggctacagacttgatgtcctacctgttgaagaagtccccaagaatcgcacccacaccaaaacctaccctacctgttcctcccccaggttgctgtagaaatggacctctacccgcccagatgttaccattcatcgcgaagggtgtcgtgaagatgaatgccctgtcgaacatcatccagcaggaggtcaaggaattttaactgaatgattgaatagtcttgcaagatctatgaaacaagcttcggctgctgtagagaaacaaaaatgggttcctgcaattctaaataagatgtactgggtgctctgagagttaataagctaaaaaattcaatgtttgttacaattatagtgtaaacagaaagcatttctgatacaatattattttactagattcagaaaagtatgagccatggtccctaccactaaaaaaac

SEQ ID NO: 59778 - DNA, 638 bp, Homo sapiens
tctgtccccgctgggtcatatcagtcgggattcgagccccggtgaccaatcgacccggtttgttcggaactgacagggttgtcaagacgctgggctttccctggcaaaccragacgacctgatcacgtagttagaacccagagaaagcattactgggcgtgagccggtcggggctccggtatttgcccttcgcccaggtgttgttttggctacagacttgatgtcctacctgttgaagaagtccccaagaatcgcacccacaccaaaacctaccctacctgttcctcccccaggttgctgtagaaatggacctctacccgcccagatgttaccattcatcgcgaagggtgtcgtgaagatgaatgccctgtcgaacatcatccagcaggaggtcaaggaattttaactgaatgattgaatagtcttgcaagatctatgaaacaagcttcggctgctgtagagaaacaaaaatgggttcctgcaattctaaataagatgtactgggtgctctgagagttaataagctaaaaaattcaatgtttgttacaattatagtgtaaacagaaagcatttctgatacaatattattttactagattcagaaaagtatgagccatggtccctaccactaaaaaaac

SEQ ID NO: 59779 - DNA, 1516 bp, Homo sapiens
ccttctaagatggcttattcacatcactttttctggttagtttaggcttttggaaagaggcctcagtgccttaccatgtgtttcctctccatagagatgttgagtgtcctcacaacatggcagccagttttcctgagtgaccgatccaagagaaagtaaagtggaagccataatgccttttatgatctagcctcagaaatcacccactgtcatttctgcaacattttattggccacacaggtcatcctgtgcatcataggaggagactacacaagagtgtgaataccaggaagcaaggatcactagggccatcttggargttggctaccatacaccaccattcttttccccccttttgttgagaagaggagtaatgcaaataatgctggaaaaatagagaaagataaaaggatatagagtgtaaaacaagtcacctccctctcgtttcctacaagctgtaattctgcacaggaaggctaaggagcatggaggcaggggcacagataatattaaaccaactaagcttctgccatttttaagcgataatgacacctttcccactaactccaaattctgagccaaggagaaacagacccaaatgtcagaataatagagatgagaatgtcaacctcgttactggtaatgttggattgaacttgtggccatagccctcccctccatgtctggaccttgggactaccttcccaagggataatctgggtatgtggggcagattaccttcctcagaattgctgcctcgcccatgtcaaacaccagtgtaagggacgtagggacacagagacagacttccagactcaccttcctgacctctgtgtgcttacaacatagaggtggagcagagcctccttagcctgtgggcaggcggttcagagaggactgaaccccccctgctcagctacttctcccagtctcaccaatcaaataaattcactcctgtttccttggagaagagggagggatagaaatgatacccctctcgggaaatgaaatgaaactctcctttatggccaagatacaaacactggtagggaacaaggatggctgtccttgttaaggtcactcagatgaaccagtctgggccatcagtagtgggttgacacacatatccaaatccagtctttgttagtactaagtctctactaaacagaaaatagcagtattttgagttgttttacaatcataaatgaattaatgttatttcctatttatgttgaaggttcgtgcagactaacagtacaccattttttaaaatcactgctttgaatcgccttaaccaaaatctctttcttttctaggcacagggtggtggtttcctatcctcctcagagtgaggcagaacttgaacttaaagaaggagatattgtgtttgttcataaaaaacgagaggatggctggttcaaaggcacattacaacgtaatgggaaaactggccttttcccaggaagctttgtggaaaacatatgaggagactgacactgaagaagcttaaaatcac

SEQ ID NO: 59780 - DNA, 2435 bp, Homo sapiens
tataaccaaactgcatctgcacctgcattcatttgtatttatacaaataaatgaataagataaaaataaaaaataaaaattatgctatagaaggatacttaaatctgaaagtaacatttgtgtataaaatgtaggttacaaatgaattaagttataccactattaaaaacacaacaaagaacttatactaatgactgaaaaaagtactatataccaaaatattaacagtgattatcattagatactagaattacaggtaatgatttttattttctttatatttttctgctctttccaaactgtctacaacagatatatatattatttttgtattcagataaaaagttgttgaaaaaatgcacacagtactaccttcagatagtctgtaatgaaggcctggaataacaaaactaattttgtattatgtatgtttcactgtgaaattacacagtgaaatacagtcttctctgccataamatcttaccacatttattttaaaagtcagcaatatttccttcatatcctctcatctttaagaagaatgagaaggccagaaggaatgcaagaataaaaggagaagcagctaacacagatattgatactagcctctgcagaatttccaacaaactataaatgaaacttaatttacagtgaagagccacaataatcaacaggcaatccaatcagcttaagaacaatatcatgggggttctcgctgtccaaagttttctgtctttagacacatgtattttccttttttttttttttttgagacaagagtctcactctgtcaccaggctggaatgcagtggtgcgatctaggctcaccgcaacctccgcctcctgggttcaagcgactctcctgcctcaggctccccagtagctgggactacaggcacacgccaccatgcccagctaatttttgtattactagtagagacggggtttcaccaggttggccaggatggtcctgaactcctgacctcaggtgatccacccacctcagcctcccaaagtgctaggattacaggcgtgagccactgtgcccagccaacaaaagtattttcaaaagtgcctcagagagtatcctaggaagaaaacctcatctcacacttgtaataaaagcagaatgaataaaaattgtcaaaaacatgtaaaagttcatgttatcttctcaaagatagacacaattatcctttaagttcttttcaaactctagcaaaattagcatagaatacttcccagtaactctcacaaactgtcagcataaaaatcgatgcattttaacccaaaaaacaaaaacagaaaaacacaataaactacagtagaaatggtttgcaagaaagaccttgtgactatgcaaatcccaggctcaacttctgactctgctggcctggccttttctcaaaggcagtattttgtggttaaaaaaaaccactggattaggacacattaaactagattctgttccctgctctgctgatactattaaagctatcacccgagaaaagtcacgtgctaagaccagctcggtcacggagaccttaacacagcagcactagaggaattaaagacacacacagaaatatagtgtggagtgggaaatcaggggtctcacggccttcagagctgagagcctcaaacagacattcacccacatatttactgacagcaagccagtgataagcattctttctatagatgatagattaactaaaagtattccttacgggaaacaaagggatgggccgaaataaagggatgggtctggctagttatcagcagcaggagcaagcccttaaggcacagatcgctcatgctattgtctgtggttcaggaacgcctttaagcggttttccaccctgggtgggccaggtgttccttgccctcattccggtaaacccacaaacttcagcatgggtgtcatggccatcacaaacaggtcacggtgctgcagggattttgtttatggccagtttgggggccagtttatggccagatttgggggcctgatcccaacagtcatgtactatctgcaactgaatgaccatttctgtatcataaaatgaatgtaataggtggaaaatgacagatctctgaggtttcttttctgttttttcttttttgctttttttcttttgagacagtctggctctgtcacccaagctggagtgcagtggcacaatcacggctcactgcaacctctgcctcccaggttcaagcaattatcctgcctcagcctccccagcagctgggacaacaggcgcctaccaccacgcctggctaattttttttttttttttttttttttttgagacggagtttggctcctgtcacccaggctggagtacaatggcatgatctcagctcactgaaacctccgcctcccgggttcaaacaattcttctgccttagcctcccgagtagttaggatt

SEQ ID NO: 59781 - DNA, 2435 bp, Homo sapiens
tataaccaaactgcatctgcacctgcattcatttgtatttatacaaataaatgaataagataaaaataaaaaataaaaattatgctatagaaggatacttaaatctgaaagtaacatttgtgtataaaatgtaggttacaaatgaattaagttataccactattaaaaacacaacaaagaacttatactaatgactgaaaaaagtactatataccaaaatattaacagtgattatcattagatactagaattacaggtaatgatttttattttctttatatttttctgctctttccaaactgtctacaacagatatatatattatttttgtattcagataaaaagttgttgaaaaaatgcacacagtactaccttcagatagtctgtaatgaaggcctggaataacaaaactaattttgtattatgtatgtttcactgtgaaattacacagtgaaatacagtcttctctgccataacatcttaccacatttattttaaaagtcagcaatatttccttcatatcctctcatctttaagaagaatgagaaggccagaaggaatgcaagaataaaaggagaagcagctaacacagatattgatactagcctctgcagaatttccaacaaactataaatgaaacttaatttacagtgaagagccacaataatcaacaggcaatccaatcagcttaagaacaatatcatgggggttctcgctgtccaaagttttctgtctttagacacatgtattttccttttttttttttttttgagacaagagtctcactctgtcaccaggctggaatgcagtggtgcgatctaggctcaccgcaacctccgcctcctgggttcaagcgactctcctgcctcaggctccccagtagctgggactacaggcacacgccaccatgcccagctaatttttgtattactagtagagacggggtttcaccaggttggccaggatggtcctgaactcctgacctcaggtgatccacccacctcagcctcccaaagtgctaggattacaggcgtgagccactgtgcccagccaacaaaagtattttcaaaagtgcctcagagagtatcctaggaagaaaacctcatctcacacttgtaataaaagcagaatgaataaaaattgtcaaaaacatgtaaaagttcatgttatcttctcaaagatagacacaattatcctttaagttcttttcaaactctagcaaaattagcatagaatacttcccagtaactctcacaaactgtcagcataaaaatcgatgcattttaacccaaaaaacaaaaacagaaaaacacaataaactacagtagaaatggtttgcaagaaagaccttgtgactatgcaaatcccaggctcaacttctgactctgctggcctggccttttctcaaaggcagtattttgtggttaaaaaaaaccactggattaggacacattaaactagattctgttccctgctctgctgatactattaaagctatcacccgagaaaagtcacgtgctaagaccagctcggtcacggagaccttaacacagcagcactagaggaattaaagacacacacagaaatatagtgtggagtgggaaatcaggggtctcacggccttcagagctgagagcctcaaacagacattcacccacatatttactgacagcaagccagtgataagcattctttctatagatgatagattaactaaaagtattccttacgggaaacaaagggatgggccgaaataaagggatgggtctggctagttatcagcagcaggagcaagcccttaaggcacagatcgctcatgctattgtctgtggttcaggaacgcctttaagcggttttccaccctgggtgggccaggtgttccttgccctcattccggtaaacccacaawcttcagcatgggtgtcatggccatcacaaacaggtcacggtgctgcagggattttgtttatggccagtttgggggccagtttatggccagatttgggggcctgatcccaacagtcatgtactatctgcaactgaatgaccatttctgtatcataaaatgaatgtaataggtggaaaatgacagatctctgaggtttcttttctgttttttcttttttgctttttttcttttgagacagtctggctctgtcacccaagctggagtgcagtggcacaatcacggctcactgcaacctctgcctcccaggttcaagcaattatcctgcctcagcctccccagcagctgggacaacaggcgcctaccaccacgcctggctaattttttttttttttttttttttttttgagacggagtttggctcctgtcacccaggctggagtacaatggcatgatctcagctcactgaaacctccgcctcccgggttcaaacaattcttctgccttagcctcccgagtagttaggatt

SEQ ID NO: 59782 - DNA, 2435 bp, Homo sapiens
tataaccaaactgcatctgcacctgcattcatttgtatttatacaaataaatgaataagataaaaataaaaaataaaaattatgctatagaaggatacttaaatctgaaagtaacatttgtgtataaaatgtaggttacaaatgaattaagttataccactattaaaaacacaacaaagaacttatactaatgactgaaaaaagtactatataccaaaatattaacagtgattatcattagatactagaattacaggtaatgatttttattttctttatatttttctgctctttccaaactgtctacaacagatatatatattatttttgtattcagataaaaagttgttgaaaaaatgcacacagtactaccttcagatagtctgtaatgaaggcctggaataacaaaactaattttgtattatgtatgtttcactgtgaaattacacagtgaaatacagtcttctctgccataacatcttaccacatttattttaaaagtcagcaatatttccttcatatcctctcatctttaagaagaatgagaaggccagaaggaatgcaagaataaaaggagaagcagctaacacagatattgatactagcctctgcagaatttccaacaaactataaatgaaacttaatttacagtgaagagccacaataatcaacaggcaatccaatcagcttaagaacaatatcatgggggttctcgctgtccaaagttttctgtctttagacacatgtattttccttttttttttttttttgagacaagagtctcactctgtcaccaggctggaatgcagtggtgcgatctaggctcaccgcaacctccgcctcctgggttcaagcgactctcctgcctcaggctccccagtagctgggactacaggcacacgccaccatgcccagctaatttttgtattactagtagagacggggtttcaccaggttggccaggatggtcctgaactcctgacctcaggtgatccacccacctcagcctcccaaagtgctaggattacaggcgtgagccactgtgcccagccaacaaaagtattttcaaaagtgcctcagagagtatcctaggaagaaaacctcatctcacacttgtaataaaagcagaatgaataaaaattgtcaaaaacatgtaaaagttcatgttatcttctcaaagatagacacaattatcctttaagttcttttcaaactctagcaaaattagcatagaatacttcccagtaactctcacaaactgtcagcataaaaatcgatgcattttaacccaaaaaacaaaaacagaaaaacacaataaactacagtagaaatggtttgcaagaaagaccttgtgactatgcaaatcccaggctcaacttctgactctgctggcctggccttttctcaaaggcagtattttgtggttaaaaaaaaccactggattaggacacattaaactagattctgttccctgctctgctgatactattaaagctatcacccgagaaaagtcacgtgctaagaccagctcggtcacggagaccttaacacagcagcactagaggaattaaagacacacacagaaatatagtgtggagtgggaaatcaggggtctcacggccttcagagctgagagcctcaaacagacattcacccacatatttactgacagcaagccagtgataagcattctttctatagatgatagattaactaaaagtattccttacgggaaacaaagggatgggccgaaataaagggatgggtctggctagttatcagcagcaggagcaagcccttaaggcacagatcgctcatgctattgtctgtggttcaggaacgcctttaagcggttttccaccctgggtgggccaggtgttccttgccctcattccggtaaacccacaaacttcagcatgggtgtcatggccatcacaaacaggtcacggtgctgcagggattttgtttatggccagtttkggggccagtttatggccagatttgggggcctgatcccaacagtcatgtactatctgcaactgaatgaccatttctgtatcataaaatgaatgtaataggtggaaaatgacagatctctgaggtttcttttctgttttttcttttttgctttttttcttttgagacagtctggctctgtcacccaagctggagtgcagtggcacaatcacggctcactgcaacctctgcctcccaggttcaagcaattatcctgcctcagcctccccagcagctgggacaacaggcgcctaccaccacgcctggctaattttttttttttttttttttttttttgagacggagtttggctcctgtcacccaggctggagtacaatggcatgatctcagctcactgaaacctccgcctcccgggttcaaacaattcttctgccttagcctcccgagtagttaggatt

SEQ ID NO: 59783 - DNA, 2435 bp, Homo sapiens
tataaccaaactgcatctgcacctgcattcatttgtatttatacaaataaatgaataagataaaaataaaaaataaaaattatgctatagaaggatacttaaatctgaaagtaacatttgtgtataaaatgtaggttacaaatgaattaagttataccactattaaaaacacaacaaagaacttatactaatgactgaaaaaagtactatataccaaaatattaacagtgattatcattagatactagaattacaggtaatgatttttattttctttatatttttctgctctttccaaactgtctacaacagatatatatattatttttgtattcagataaaaagttgttgaaaaaatgcacacagtactaccttcagatagtctgtaatgaaggcctggaataacaaaactaattttgtattatgtatgtttcactgtgaaattacacagtgaaatacagtcttctctgccataacatcttaccacatttattttaaaagtcagcaatatttccttcatatcctctcatctttaagaagaatgagaaggccagaaggaatgcaagaataaaaggagaagcagctaacacagatattgatactagcctctgcagaatttccaacaaactataaatgaaacttaatttacagtgaagagccacaataatcaacaggcaatccaatcagcttaagaacaatatcatgggggttctcgctgtccaaagttttctgtctttagacacatgtattttccttttttttttttttttgagacaagagtctcactctgtcaccaggctggaatgcagtggtgcgatctaggctcaccgcaacctccgcctcctgggttcaagcgactctcctgcctcaggctccccagtagctgggactacaggcacacgccaccatgcccagctaatttttgtattactagtagagacggggtttcaccaggttggccaggatggtcctgaactcctgacctcaggtgatccacccacctcagcctcccaaagtgctaggattacaggcgtgagccactgtgcccagccaacaaaagtattttcaaaagtgcctcagagagtatcctaggaagaaaacctcatctcacacttgtaataaaagcagaatgaataaaaattgtcaaaaacatgtaaaagttcatgttatcttctcaaagatagacacaattatcctttaagttcttttcaaactctagcaaaattagcatagaatacttcccagtaactctcacaaactgtcagcataaaaatcgatgcattttaacccaaaaaacaaaaacagaaaaacacaataaactacagtagaaatggtttgcaagaaagaccttgtgactatgcaaatcccaggctcaacttctgactctgctggcctggccttttctcaaaggcagtattttgtggttaaaaaaaaccactggattaggacacattaaactagattctgttccctgctctgctgatactattaaagctatcacccgagaaaagtcacgtgctaagaccagctcggtcacggagaccttaacacagcagcactagaggaattaaagacacacacagaaatatagtgtggagtgggaaatcaggggtctcacggccttcagagctgagagcctcaaacagacattcacccacatatttactgacagcaagccagtgataagcattctttctatagatgatagattaactaaaagtattccttacgggaaacaaagggatgggccgaaataaagggatgggtctggctagttatcagcagcaggagcaagcccttaaggcacagatcgctcatgctattgtctgtggttcaggaacgcctttaagcggttttccaccctgggtgggccaggtgttccttgccctcattccggtaaacccacaaacttcagcatgggtgtcatggccatcacaaacaggtcacggtgctgcagggattttgtttatggccagtttgggggccagtttatggccagatttgggggcctgatcccaacagtcatgtactatctgcaactgaatgaccatttctgtatcataaaatgaatgtaataggtggaaaatgacagatctctgaggtttcttttctgttttttcttttttgctttttttcttttgagacagtctggctctgtcacccaagctggagtgcagtggcacaatcrcggctcactgcaacctctgcctcccaggttcaagcaattatcctgcctcagcctccccagcagctgggacaacaggcgcctaccaccacgcctggctaattttttttttttttttttttttttttgagacggagtttggctcctgtcacccaggctggagtacaatggcatgatctcagctcactgaaacctccgcctcccgggttcaaacaattcttctgccttagcctcccgagtagttaggatt

SEQ ID NO: 59784 - DNA, 2435 bp, Homo sapiens
tataaccaaactgcatctgcacctgcattcatttgtatttatacaaataaatgaataagataaaaataaaaaataaaaattatgctatagaaggatacttaaatctgaaagtaacatttgtgtataaaatgtaggttacaaatgaattaagttataccactattaaaaacacaacaaagaacttatactaatgactgaaaaaagtactatataccaaaatattaacagtgattatcattagatactagaattacaggtaatgatttttattttctttatatttttctgctctttccaaactgtctacaacagatatatatattatttttgtattcagataaaaagttgttgaaaaaatgcacacagtactaccttcagatagtctgtaatgaaggcctggaataacaaaactaattttgtattatgtatgtttcactgtgaaattacacagtgaaatacagtcttctctgccataacatcttaccacatttattttaaaagtcagcaatatttccttcatatcctctcatctttaagaagaatgagaaggccagaaggaatgcaagaataaaaggagaagcagctaacacagatattgatactagcctctgcagaatttccaacaaactataaatgaaacttaatttacagtgaagagccacaataatcaacaggcaatccaatcagcttaagaacaatatcatgggggttctcgctgtccaaagttttctgtctttagacacatgtattttccttttttttttttttttgagacaagagtctcactctgtcaccaggctggaatgcagtggtgcgatctaggctcaccgcaacctccgcctcctgggttcaagcgactctcctgcctcaggctccccagtagctgggactacaggcacacgccaccatgcccagctaatttttgtattactagtagagacggggtttcaccaggttggccaggatggtcctgaactcctgacctcaggtgatccacccacctcagcctcccaaagtgctaggattacaggcgtgagccactgtgcccagccaacaaaagtattttcaaaagtgcctcagagagtatcctaggaagaaaacctcatctcacacttgtaataaaagcagaatgaataaaaattgtcaaaaacatgtaaaagttcatgttatcttctcaaagatagacacaattatcctttaagttcttttcaaactctagcaaaattagcatagaatacttcccagtaactctcacaaactgtcagcataaaaatcgatgcattttaacccaaaaaacaaaaacagaaaaacacaataaactacagtagaaatggtttgcaagaaagaccttgtgactatgcaaatcccaggctcaacttctgactctgctggcctggccttttctcaaaggcagtattttgtggttaaaaaaaaccactggattaggacacattaaactagattctgttccctgctctgctgatactattaaagctatcacccgagaaaagtcacgtgctaagaccagctcggtcacggagaccttaacacagcagcactagaggaattaaagacacacacagaaatatagtgtggagtgggaaatcaggggtctcacggccttcagagctgagagcctcaaacagacattcacccacatatttactgacagcaagccagtgataagcattctttctatagatgatagattaactaaaagtattccttacgggaaacaaagggatgggccgaaataaagggatgggtctggctagttatcagcagcaggagcaagcccttaaggcacagatcgctcatgctattgtctgtggttcaggaacgcctttaagcggttttccaccctgggtgggccaggtgttccttgccctcattccggtaaacccacaaacttcagcatgggtgtcatggccatcacaaacaggtcacggtgctgcagggattttgtttatggccagtttgggggccagtttatggccagatttgggggcctgatcccaacagtcatgtactatctgcaactgaatgaccatttctgtatcataaaatgaatgtaataggtggaaaatgacagatctctgaggtttcttttctgttttttcttttttgctttttttcttttgagacagtctggctctgtcacccaagctggagtgcagtggcacaatcacggctcactgcaacctctgcctcccaggttcaagcaattatcctgcctcagcctccccagcagctgggacaacaggcgsctaccaccacgcctggctaattttttttttttttttttttttttttgagacggagtttggctcctgtcacccaggctggagtacaatggcatgatctcagctcactgaaacctccgcctcccgggttcaaacaattcttctgccttagcctcccgagtagttaggatt

SEQ ID NO: 59785 - DNA, 2435 bp, Homo sapiens
tataaccaaactgcatctgcacctgcattcatttgtatttatacaaataaatgaataagataaaaataaaaaataaaaattatgctatagaaggatacttaaatctgaaagtaacatttgtgtataaaatgtaggttacaaatgaattaagttataccactattaaaaacacaacaaagaacttatactaatgactgaaaaaagtactatataccaaaatattaacagtgattatcattagatactagaattacaggtaatgatttttattttctttatatttttctgctctttccaaactgtctacaacagatatatatattatttttgtattcagataaaaagttgttgaaaaaatgcacacagtactaccttcagatagtctgtaatgaaggcctggaataacaaaactaattttgtattatgtatgtttcactgtgaaattacacagtgaaatacagtcttctctgccataacatcttaccacatttattttaaaagtcagcaatatttccttcatatcctctcatctttaagaagaatgagaaggccagaaggaatgcaagaataaaaggagaagcagctaacacagatattgatactagcctctgcagaatttccaacaaactataaatgaaacttaatttacagtgaagagccacaataatcaacaggcaatccaatcagcttaagaacaatatcatgggggttctcgctgtccaaagttttctgtctttagacacatgtattttccttttttttttttttttgagacaagagtctcactctgtcaccaggctggaatgcagtggtgcgatctaggctcaccgcaacctccgcctcctgggttcaagcgactctcctgcctcaggctccccagtagctgggactacaggcacacgccaccatgcccagctaatttttgtattactagtagagacggggtttcaccaggttggccaggatggtcctgaactcctgacctcaggtgatccacccacctcagcctcccaaagtgctaggattacaggcgtgagccactgtgcccagccaacaaaagtattttcaaaagtgcctcagagagtatcctaggaagaaaacctcatctcacacttgtaataaaagcagaatgaataaaaattgtcaaaaacatgtaaaagttcatgttatcttctcaaagatagacacaattatcctttaagttcttttcaaactctagcaaaattagcatagaatacttcccagtaactctcacaaactgtcagcataaaaatcgatgcattttaacccaaaaaacaaaaacagaaaaacacaataaactacagtagaaatggtttgcaagaaagaccttgtgactatgcaaatcccaggctcaacttctgactctgctggcctggccttttctcaaaggcagtattttgtggttaaaaaaaaccactggattaggacacattaaactagattctgttccctgctctgctgatactattaaagctatcacccgagaaaagtcacgtgctaagaccagctcggtcacggagaccttaacacagcagcactagaggaattaaagacacacacagaaatatagtgtggagtgggaaatcaggggtctcacggccttcagagctgagagcctcaaacagacattcacccacatatttactgacagcaagccagtgataagcattctttctatagatgatagattaactaaaagtattccttacgggaaacaaagggatgggccgaaataaagggatgggtctggctagttatcagcagcaggagcaagcccttaaggcacagatcgctcatgctattgtctgtggttcaggaacgcctttaagcggttttccaccctgggtgggccaggtgttccttgccctcattccggtaaacccacaaacttcagcatgggtgtcatggccatcacaaacaggtcacggtgctgcagggattttgtttatggccagtttgggggccagtttatggccagatttgggggcctgatcccaacagtcatgtactatctgcaactgaatgaccatttctgtatcataaaatgaatgtaataggtggaaaatgacagatctctgaggtttcttttctgttttttcttttttgctttttttcttttgagacagtctggctctgtcacccaagctggagtgcagtggcacaatcacggctcactgcaacctctgcctcccaggttcaagcaattatcctgcctcagcctccccagcagctgggacaacaggcgcctaccaccacgcctggctaattttttttttttttttttttttttttgagacggagtttggctcctgtcacccaggctggagtrcaatggcatgatctcagctcactgaaacctccgcctcccgggttcaaacaattcttctgccttagcctcccgagtagttaggatt

SEQ ID NO: 59786 - DNA, 2435 bp, Homo sapiens
tataaccaaactgcatctgcacctgcattcatttgtatttatacaaataaatgaataagataaaaataaaaaataaaaattatgctatagaaggatacttaaatctgaaagtaacatttgtgtataaaatgtaggttacaaatgaattaagttataccactattaaaaacacaacaaagaacttatactaatgactgaaaaaagtactatataccaaaatattaacagtgattatcattagatactagaattacaggtaatgatttttattttctttatatttttctgctctttccaaactgtctacaacagatatatatattatttttgtattcagataaaaagttgttgaaaaaatgcacacagtactaccttcagatagtctgtaatgaaggcctggaataacaaaactaattttgtattatgtatgtttcactgtgaaattacacagtgaaatacagtcttctctgccataacatcttaccacatttattttaaaagtcagcaatatttccttcatatcctctcatctttaagaagaatgagaaggccagaaggaatgcaagaataaaaggagaagcagctaacacagatattgatactagcctctgcagaatttccaacaaactataaatgaaacttaatttacagtgaagagccacaataatcaacaggcaatccaatcagcttaagaacaatatcatgggggttctcgctgtccaaagttttctgtctttagacacatgtattttccttttttttttttttttgagacaagagtctcactctgtcaccaggctggaatgcagtggtgcgatctaggctcaccgcaacctccgcctcctgggttcaagcgactctcctgcctcaggctccccagtagctgggactacaggcacacgccaccatgcccagctaatttttgtattactagtagagacggggtttcaccaggttggccaggatggtcctgaactcctgacctcaggtgatccacccacctcagcctcccaaagtgctaggattacaggcgtgagccactgtgcccagccaacaaaagtattttcaaaagtgcctcagagagtatcctaggaagaaaacctcatctcacacttgtaataaaagcagaatgaataaaaattgtcaaaaacatgtaaaagttcatgttatcttctcaaagatagacacaattatcctttaagttcttttcaaactctagcaaaattagcatagaatacttcccagtaactctcacaaactgtcagcataaaaatcgatgcattttaacccaaaaaacaaaaacagaaaaacacaataaactacagtagaaatggtttgcaagaaagaccttgtgactatgcaaatcccaggctcaacttctgactctgctggcctggccttttctcaaaggcagtattttgtggttaaaaaaaaccactggattaggacacattaaactagattctgttccctgctctgctgatactattaaagctatcacccgagaaaagtcacgtgctaagaccagctcggtcacggagaccttaacacagcagcactagaggaattaaagacacacacagaaatatagtgtggagtgggaaatcaggggtctcacggccttcagagctgagagcctcaaacagacattcacccacatatttactgacagcaagccagtgataagcattctttctatagatgatagattaactaaaagtattccttacgggaaacaaagggatgggccgaaataaagggatgggtctggctagttatcagcagcaggagcaagcccttaaggcacagatcgctcatgctattgtctgtggttcaggaacgcctttaagcggttttccaccctgggtgggccaggtgttccttgccctcattccggtaaacccacaaacttcagcatgggtgtcatggccatcacaaacaggtcacggtgctgcagggattttgtttatggccagtttgggggccagtttatggccagatttgggggcctgatcccaacagtcatgtactatctgcaactgaatgaccatttctgtatcataaaatgaatgtaataggtggaaaatgacagatctctgaggtttcttttctgttttttcttttttgctttttttcttttgagacagtctggctctgtcacccaagctggagtgcagtggcacaatcacggctcactgcaacctctgcctcccaggttcaagcaattatcctgcctcagcctccccagcagctgggacaacaggcgcctaccaccacgcctggctaattttttttttttttttttttttttttgagacggagtttggctcctgtcacccaggctggagtacaatggcatgatctcrgctcactgaaacctccgcctcccgggttcaaacaattcttctgccttagcctcccgagtagttaggatt

SEQ ID NO: 59787 - DNA, 728 bp, Homo sapiens
ttggtttaaattacatttaaaatatgtttttcacttagtggggaaaataccccctctctcacttcttccctaccttcccaagtcaaaaacaaagcaaaacaaaagactttttcagaaagatcttttactgaggtgattcataaaagttacactgctataggtttctagggaaacttagccaataatctatgtgccaagtactttgtacaaattaatttttaaaattacaaaatgctttgaaaattgttataagtgccctaaaagttgaaaagttatcatcatcagttcagggaaaaggcatgaactttttgaggtttaagcaacatcattttgygaatttcctttctttgctgctcccttttcttatgaaaaataaaaagataattcaaggactgaaagggaagcctaagaatgtccttgtatttaatcagaagagcttaagcaaacaactgtgcctgagagagagtcacatggaatagaccttccctagggagggtattctgtcaggatgacccactgttcaaaggtctcaagagcataacgggtgataaaagcccttgatacgacagtataaaatccacttcatctccattttcctgaggggcacaacaaggcttagggaagctaagtaacaagtcaccaacatggtaaatgactggactatggattaagttcagatatatctgactaaaaagcctgtaattcttctatttctcatcagacaggat

SEQ ID NO: 59788 - DNA, 706 bp, Homo sapiens
cctgacctcaggtgatccacctgcctcagcctcccaaagtgctgggattacaggtgtgagccactgcgccaggctgtgacatgatgtattaatctgcatgcattctttatgctgcgtatcctcactctaggctgtcagctgcaaagtcagggatcttgtctgctttgctcactgctgtactcccagcacctggcacagtacctgcacacagtaggacctcaaaacctggaaggcatttccattgttaattggcatcttcctcgggtgcctggcccagggatctgcaaccagataggggaactcagactgttccacactggtgtgtccctactcagggctgaaagagcttgtcctctgccctctcctctgttagaatcacaagggctacagactagccttgtgccctgccaactggacaggccccaatagctggagaaatcgaggcacggagctatggctattgatatgaaaggggcggggttgaagaggtggagaggttggactggcagcccagccccaggaaataaggtccctgggcacctaccatgttccagccaatcagacaaaaacttcccctgcatctctggggcagcctcactctgmtgcctgatttatcattttaattgagtgtgtgcagattgatttcttccctggtgatggggcttcctccacagtaggccggaggaggtgagttaagagaaaaccc

SEQ ID NO: 59789 - DNA, 647 bp, Homo sapiens
gaatacgtctttttcagggaacaggattcaacctataacagtgcataagtaaggaaatgttggagagaggcccaggcccaaatgtgctagaggtcatgcatgtcccccggtgttcctggccctctctgtgttccaggaccctggcccttccctaaacctcagcacacactgctgcttgtcccacacccaaacccttgtccacctctcccaccgggtctgcattcctgcctctgtttccccagctctctaggcttggggggtgggaaaataccctcaggtcccctgagaccagactagaaatgttcagaaggcacttcatgagttcagagctaaagaggagaaaacacaagcaaaagagcacaaatgtgccgggtgtggtggctcacgcctggaatcccaggactttgggaggctgaggygggcggatcacttgaggtcacgagttccagaccagcctggttaacatggcgaaaccccatctctactaaaaatacaaaaaaattagccgggcgtggtggtgcacacacttgtattcccagctactcgggagtctgaggcaggagaatcgcttgaaccaaggaggcagaggttgtgccactgtactctccagcctcggtgacacagcgagactccatctcaaaaaaaaa

SEQ ID NO: 59790 - DNA, 1540 bp, Homo sapiens
ctggccaaaagcagacacccttggaaccacctcccagaacaagaagtggaacatttcaagtaaaaaaaattacacctgccctatgacccagcaaccccacttccggaaatacaagcaaaatcatgcccaggggtcttcgtggcagcttgctctgcaatggcaaacaccacaccaaaccaggaggagctagcctgtgccgacacctgcacacacggctgccccaaagtcccacacccaggggtgggatgctggagatgaaggtcctgccagtgtcacgtgctgcttagtgacagggttgaggggccttagtcggcttgactcaaggtggcctcactgtggccttttgtataaaaaaatcttcaagtgctcattgttcyctgagtgactcacttgaggtaacagcctacatacatgaccataaatgtggccaaacatcccactcagaaatattcatcataagccaggcgtggtggcatacacctgtaatcccagctactcaggaggctgaggtaggagaatcccatgagcccatgaccgcacccctgcacaccagcctgggtgacagatggagatcctgtctcaaaaaaaacacatcaatgtttgtatagctaaaaagaaagaaatttaaatgtccaataatggataaataaacttgatagtcattagaatgactacagcaatcagtgaaaattttcaatcatgtgaaaaatgcttatgttaagtcaggaaacttcagaaaacactgtaatctgagctactctggaggctgaggtgggaggatcctttgagctcaggagctcgaggctgcagtgagccatgattgtgccactgtactccagcctgagtgacagagcaagaccatctcctaaaaacacaaaaatgtttaaatgcagaaaacaaaattgtttgtagaatacaattataaggatgcacaaaataaaaagactacaagacaggacggacgtctctccaaatgttacaaaaaattaaagagagctgcaggcggggaggagggaggaatctgtctccccctgggactactctggctcaccgcccctccctgactgctcctttggcccttatcatctccagaggcaagttcaggtagatctgaattttgtcacacacgctgtcctgtaagcccagaagtcccctgggcactgctctcgcctcccaggcccagacagtacctagaactgggttctctctggggcaagggcatcccatttatccccctcctagactgtgtccccttcaaaaaggctgcaacagtgaactctgcgtttatgctcacctcccccaacctcccatctctttctgagttaacagagaggccaacagctggtcctccagtccccaagctgaagctgggcagctcttgggcacataggcatggtggcagctatgccagggctccatcccatgccttcttcagctgagcacctcttcctggggccccagagggaacacagcccctggctgatggcacagggtcagggtcctaccctcgaggagccagaagacgggggtgaggggctgg

SEQ ID NO: 59791 - DNA, 1728 bp, Homo sapiens
gtactacaggtgagtgggcccatctgcccctacgacaggggacgcctggtgcccctgggggcaggtcacccgtttcgggggacatgcaggtcctggctaaacctgaattcccccaacagcccaggccgtccccaggacaagtgatgttttaagttctgggtgacatttgttcccatgtgaactaaatactcatttcagagtcctgcactgagtgctgggggaacagcagtgaccagaggctgtgccgctgccctggcgcacctgagtcgccctctcctactccccatggctagagtgtgctgatggctgtgggccagagctggctcaaactggctcaccaggagtagactctcaaatattcaggaatcttcagcctggccaacctggtgaaaccccgtctctactgaaaatacaaaaattagccggctgtggtggcaggtgcctttaatctcagctactcgggaggctgaggcaggagaatcgcttgaacccgggaggcagaggttgcagtgagctgagattgcgccactcactggcctctagcctgggtaacagagcgagactccatctcaaaaaaaaaaaaaaaaattcaggaatcttacaccaatcaatttcatgtcagtggcttcgaatcagccacagtggaaatatttacactacgggaattggcagacactacccaggaggcctttcccctctgagagccagttgttaaatatttagcactgacaggtgctgaggagattataaagccacatcgaagccatgccatgtggatcagtgtgtccctttggaagggggacaccaggtggaaatcttcctcatatcctcacccctactggaagtcattgtcacttatcacctgtcctctccagtaggatgaaagttcaccccctgaaaaaaaaacacgtggaggtcctgccttctctagaggccccagactaggaggatcagctccggggtggcagcaggtggaaggcactgggtagggtgaggatgtccaccggagagaggagacatgtgtgggactctcccgtgccacaggtgctccctgcatcacgtgacctgcactgtccccctccctgccgtggattctgcgacacccctgaacctttcctgccctgacctagcctccactgtcacccaccacttcctagttgttgatggaccatttagttaatttgccccttccgccctctctagccagagcctgggcattgggggagaatagggatcctggtgacagctgccagagggcatggagaggatggctgactcagaacccataaaagtcggcctggcacaatagcttacgcctgtaatcccaacactttgggaggccaggacaggtggatcacttgaagtcaggagttcgagacaagcctggccaacatggagaagctccgtctctactaaaaattagccaggtgtgatggtgggcgcctgtaatcccagctactcgggaggctgaggcaggagaatcgcttgaacccgggaggcagagattgtagtgggccgagattgcaccactgcactccagcctgggtaayagagccagattccaccgtttcaaaaaacaaacaaaacaaaacaaaacaaaaacccataaaagtcaaagtgggccaggtgcagtggctcacacctgtaatcccagcattttgggaggcagaggcgggcggatcacttgaggtcaggagttcgagaccagcctggccgaggtgaaacccc

SEQ ID NO: 59792 - DNA, 701 bp, Homo sapiens
tcccaataaaactttaaggggagagtaaaacccattttgtagatgaggaaactgaggttcagagagctgatgtgatttttctcattgtcctaccagcaagtggtcaaggcagaacctggagctgggccccctgggttccctctggtactcttctggaacattccaggcaggctcaagtggctggagtaggccccgcctgcctcccctctgccctctgtggctgttttgtatcctgccagattcctgaagtgtcaggcctcattacagccccgtgccccagtgagcgtggagaggcagttgacaggtatacaatctgaccrcggctcccttcaaatcatcaagttgtcttcaggcaggaacgtgccgggaagctgggcagaggcccctggcttggctgcataatctgatgcacattaaaaacatctttcggatgccttttcttgttgcacgctcattctcactctctgttttgttttgatttttgtcctccatccaacaaaagctgatgaggtagtcagctctgtaggctctctggtccaagcagggtctcaccaaccagacaggtatccaggaactactgaccttctccgtgtttggctggcatctgggtgacagcgcctgtgcacagggccacatcctagcaaggttggacaagaacctgtactctgcctccctctccaattccagggagtgagttcaat

SEQ ID NO: 59793 - DNA, 910 bp, Homo sapiens
tgcatcacctgcacatgacctactgacctttgctttgtaaacaaatcctctcagggagagaaggggagggtctctaggtttacaaccttcagaaggaaaacaaattatcttggggagaagtctctgaatctctccacaggtctttaacttccaaggcttgtttgccattcaaacattctttaggccgggcgcgayggctcacgcctgtaatcccagcactttgggaggctgaggtgggcagatcacgaggtcaggagatcaagaccatcctggctaacacggtgaaacctcatctctactaaaaatacaaaaaattagccaggcgtggtggcaggcacctgtagtcccagttactcgggaggctgaggcaggagaatggcgtgaacccaggaggcggaggttgcagtgagccgagatcgcgccactgaactgcagcctgggcgacagagcgagactccttctcaaacaaacaaacaaacaaacaaacaaaattctttaatccggtgccagaaatctttgctcagaaagtcctgatcatgcagaaacatgaaaacattcatgaagcattgcttcccgaacaattttcttcatagcaatatcactacatgacattacaatactcatttccttcttttcctgctttcttttggattaactgtattccattttacgttccctgtttgtgtgttatattctaccttcccttctcctcctccttttttttttttttttttttttggtagagacaaatctcagtaagttgcccagggctggtcttgaactcctggcctaaagtgagcctcctaccttggcctctcaaagtgttgggattacaggcataagtcaccatgcctggctgattttttcccctagtattttaaaagtggttgatctagggtttacaatatgc

SEQ ID NO: 59794 - DNA, 668 bp, Homo sapiens
ccagaatgttctctcaggtgccgaggataccctggggtctgagctgccaggcccaggagagtcatttcaggtgaggcgtcgtgtcttggaacgaagtcttgggaatttgaggggtttataaaagcacatgtatagaaagcagggaggctcttctgtggtgaccctgaacgagcacagtggggctcccgtggctctgaggcgcctaggtctcggggaaggctcggcgtgtgatttctattaactgggaaggttttatcagggtgcttggagtccctgtaactgactttgcccaactttataaatcctttctctaaatacttctctgaggtttggcttggcttggagtgtgtgggaattaaaaacaatccgtttctccscgtctagagtgggttccattttcctcagcagccttccaaagtacccaaggaaagggggtgtgggtttgtagggacttaattggctcacctgacccttctgggctacagttagactcgcatggctgtgaggcggcctggtctgcacacactggctgacaccgacctctcaaatggaaaacccactcaggcagagagaccgtctctttccaaatctgaaaacaagcctctgctatttctgtttaggattccccaggttctccgccctcacttcagaaagatttcacttttctc

SEQ ID NO: 59795 - DNA, 668 bp, Homo sapiens
ccagaatgttctctcaggtgccgaggataccctggggtctgagctgccaggcccaggagagtcatttcaggtgaggcgtcgtgtcttggaacgaagtcttgggaatttgaggggtttataaaagcacatgtatagaaagcagggaggctcttctgtggtgaccctgaacgagcacagtggggctcccgtggctctgaggcgcctaggtctcggggaaggctcggcgtgtgatttctattaactgggaaggttttatcagggtgcttggagtccctgtaactgactttgcccaactttataaatcctttctctaaatacttctctgaggtttggcttggcttggagtgtgtgggaattaaaaacaatccgtttctccccstctagagtgggttccattttcctcagcagccttccaaagtacccaaggaaagggggtgtgggtttgtagggacttaattggctcacctgacccttctgggctacagttagactcgcatggctgtgaggcggcctggtctgcacacactggctgacaccgacctctcaaatggaaaacccactcaggcagagagaccgtctctttccaaatctgaaaacaagcctctgctatttctgtttaggattccccaggttctccgccctcacttcagaaagatttcacttttctc

SEQ ID NO: 59796 - DNA, 668 bp, Homo sapiens
ccagaatgttctctcaggtgccgaggataccctggggtctgagctgccaggcccaggagagtcatttcaggtgaggcgtcgtgtcttggaacgaagtcttgggaatttgaggggtttataaaagcacatgtatagaaagcagggaggctcttctgtggtgaccctgaacgagcacagtggggctcccgtggctctgaggcgcctaggtctcggggaaggctcggcgtgtgatttctattaactgggaaggttttatcagggtgcttggagtccctgtaactgactttgcccaactttataaatcctttctctaaatacttctctgaggtttggcttggcttggagtgtgtgggaattaaaaacaatccgtttctccccgtctagagtgggttccattttcctcagcagccttccaaagtacccaaggaaagggggtgtgggtttgtagggacttaattggctcacctgacccttctgggctacarttagactcgcatggctgtgaggcggcctggtctgcacacactggctgacaccgacctctcaaatggaaaacccactcaggcagagagaccgtctctttccaaatctgaaaacaagcctctgctatttctgtttaggattccccaggttctccgccctcacttcagaaagatttcacttttctc

SEQ ID NO: 59797 - DNA, 668 bp, Homo sapiens
ccagaatgttctctcaggtgccgaggataccctggggtctgagctgccaggcccaggagagtcatttcaggtgaggcgtcgtgtcttggaacgaagtcttgggaatttgaggggtttataaaagcacatgtatagaaagcagggaggctcttctgtggtgaccctgaacgagcacagtggggctcccgtggctctgaggcgcctaggtctcggggaaggctcggcgtgtgatttctattaactgggaaggttttatcagggtgcttggagtccctgtaactgactttgcccaactttataaatcctttctctaaatacttctctgaggtttggcttggcttggagtgtgtgggaattaaaaacaatccgtttctccccgtctagagtgggttccattttcctcagcagccttccaaagtacccaaggaaagggggtgtgggtttgtagggacttaattggctcacctgacccttctgggctacagttagactcgcatggctgtgaggcggcctggtctgcacacactggctgacaccgacctctcaaatggaaaacccactcaggcagagagaccgtctctttccaaatctgaaaacaagcctcygctatttctgtttaggattccccaggttctccgccctcacttcagaaagatttcacttttctc

SEQ ID NO: 59798 - DNA, 1455 bp, Homo sapiens
tcaaggcaacgtatccgattaatatcttgaacctttaagctataatcgtttatcgcccccatcctaacaggttcatttttaccttttaatctgaagtcattctgtaagaaaatgctattattaaaaacaaaagcacttaccaattacggtgtcacctctaaagggcattttggaaagtgacaacttttctattaaaacacacactggaaaaaaaaaaaaaaaggatagacgcaatgttacttttctaaaagcgcctgccacagcggcttgcctttgccacattctgagttgtgtgcggccagctcctgcccctcacccgcccaacctaccctgctgccagggctggaaacatcccagaaccatttcagaaccaccatgagaagcccaagacgcctcctccgctgagcagcctgaagaaagtgctgcagacccagccacgtggcagaaggcccatgtgtgagcccacgtgcacttcagagaagccgggccggcctgtcagggagctgcagacgtccctgtgacaggctgtacgggaagcatagcggcttctgctcctagacctgtcactcaggacccaagcgacagacagccatcacctgcaatgctccagaccacaggtcatgcctgtcacttccccacatagctcgtcactcacactctccatgaccagaaacgtggccctgaccagccacgagggggccaggacgcacgagacagagacgactggacagcatcagcagctcccacggccacacactgctctagctcccaccgtctctacctaacaacggaacccactcgcagacgcctgctgcacacttgttcatggtatttgctatttctcctgagggactaaactctccttccattttttgtcaccgtgaacaaggaggcctgaccgtgctacagatgcggaggccgtcggtccacctggcgtccctgcacacaggacagggaccacacacacacttcccatcgtcacagatactgccactcatcaaactgaacagaccagacaactcctgttccacgagagaccctgctctgtgtctgtcagcaccaagattcttcagtgccaaccrcagccgactggaaagaggaaaacggtcctctcgatgtgaagtaacctggtacttccatgcctccgaggtgaggccggcaccctcaccgtccacggccacgtgagtctgctcctcttctgcatgaaatgcccacacgtctgctctgccccatttcatactggatcctttacctcgtcacaggcagttttacaatttagtctttgtacactaattaactttttaccttttcgactgtagaacagacgtttattctcaatctccgttttccctaccaacctacacatggtctattcttcaatataaggcccaacataattatctccttttgtttctaccttgtggaattattatgataaaatctgttagctgggga

SEQ ID NO: 59799 - DNA, 1455 bp, Homo sapiens
tcaaggcaacgtatccgattaatatcttgaacctttaagctataatcgtttatcgcccccatcctaacaggttcatttttaccttttaatctgaagtcattctgtaagaaaatgctattattaaaaacaaaagcacttaccaattacggtgtcacctctaaagggcattttggaaagtgacaacttttctattaaaacacacactggaaaaaaaaaaaaaaaggatagacgcaatgttacttttctaaaagcgcctgccacagcggcttgcctttgccacattctgagttgtgtgcggccagctcctgcccctcacccgcccaacctaccctgctgccagggctggaaacatcccagaaccatttcagaaccaccatgagaagcccaagacgcctcctccgctgagcagcctgaagaaagtgctgcagacccagccacgtggcagaaggcccatgtgtgagcccacgtgcacttcagagaagccgggccggcctgtcagggagctgcagacgtccctgtgacaggctgtacgggaagcatagcggcttctgctcctagacctgtcactcaggacccaagcgacagacagccatcacctgcaatgctccagaccacaggtcatgcctgtcacttccccacatagctcgtcactcacactctccatgaccagaaacgtggccctgaccagccacgagggggccaggacgcacgagacagagacgactggacagcatcagcagctcccacggccacacactgctctagctcccaccgtctctacctaacaacggaacccactcgcagacgcctgctgcacacttgttcatggtatttgctatttctcctgagggactaaactctccttccattttttgtcaccgtgaacaaggaggcctgaccgtgctacagatgcggaggccgtcggtccacctggcgtccctgcacacaggacagggaccacacacacacttcccatcgtcacagatactgccactcatcaaactgaacagaccagacaactcctgttccacgagagaccctgctctgtgtctgtcagcaccaagattcttcagtgccaaccgcagccgactggaaagaggaaaacggtcctctcgatgtgaagtaacctggtacttccatgcctccgaggtgaggccggcaccctcaccgtccacggccacgtgagtctgctcctcttctgcwtgaaatgcccacacgtctgctctgccccatttcatactggatcctttacctcgtcacaggcagttttacaatttagtctttgtacactaattaactttttaccttttcgactgtagaacagacgtttattctcaatctccgttttccctaccaacctacacatggtctattcttcaatataaggcccaacataattatctccttttgtttctaccttgtggaattattatgataaaatctgttagctgggga

SEQ ID NO: 59800 - DNA, 583 bp, Homo sapiens
aaaagccagacaaaatgaaaacacacaggaagtgcctgcagttaccagagagctcacgaagacctgagagggacagagcggcgggggccaactctccccggctcacggctgactccagggggcgccacaagaaccagaaacccccaacagtgcatccaggagcatctccagctagcaggagaacgggagtccaggatgaccaaagggagaagcggtagasccctcaccacaggctctgaacccagaggaccacacctagaaataggtgtaaaacgtgggccagcccagcacggacccctcctacgtcccaaaacccaatggaggtgaccccgacagcaagcacccgcctcccgtcaagagccaacatcaagtctctctgggagaggagaacattgcagacctcaaagcatttctgtcatgtcttgttcctgcagcttggtggagatgcttttcatgtatgatataccgtccttcagaaacagccacagaggctccagatgatgacattaaacaaagattttaaaccatgcttaatatgttccaggatgtgaaaaaaatgaaaactataaaaaataagttctga

SEQ ID NO: 59801 - DNA, 517 bp, Homo sapiens
ccaccacctgtgggaacctccagccaagccccagggcaggaggagcttgggaaacggaaaacaggagtgcacatcggtcgggatggagcggaaatgctgggcaccaaaccccggtgatgagaagacagaaaccgcaggaagtactagagcgtacgtttccatgctcgtgtgtgacatgggcagcgtgaaaacgaggctgttctgaggcctcgttccacccccctcggtcccagactggaatcagccggcttctcctctcgggcgtcaccrtcctgccctgcgtccagtgcctgaacacctccatttcacagattctgtgtgattttctagttgtctgaggagggagagtggtccagctctttcacggtgaccagaagtgggagtcaccagcggtgggtttcgattgcgacgccagaggccccggagagcctgaggattgggggttgctcgctccccactgtagctgcgttccagatgcccatgagtgcttttaaacaaagaaaagtttttttttgtt

SEQ ID NO: 59802 - DNA, 887 bp, Homo sapiens
tgcatcaatgtggtcatcatggaaaaatgtccgatctttgtggggtttatttacacttccttcctagtttactttgggtgacgcagggtggatcataggccttaaccttctaaagcacagcctctttcccctggcggcttcctagactctgatgaagaaataaggcctactttctgattccggtctgcccctgaccagtggtgtgacactgagcagaacacttcacttctctggaccagaggtctcaagtataaaggatgagcttgggcaacctccccatcctcccccaaggactcctcactattcctgttctttgggacctccttacctttgctgacacctgcagggaatgcctttctttttccacagaactcttttttcttttttggagacagagtctcactcttgttgcccaggctggagtgcagtagcaggatctcggctcaccacaacctccgcctcccaggttcaagcgatgctcctgcctcagcctcctgagtagctgggattataggcacctgccaccactcctggctaatttttgtatttttcgtagagacagggtttcaccatgttgtccaggctggtctcaaactcctgacctcaggtgatccgcctgcctcagcctcccaaagtgctgggattacaggcatgagccactgctcccagccttccacagacttattctttttaggagggttggggatggggaatagggtttcgctctgagtagctgggactatagatgcacaccatcacacccagctaatgtttttttaaaattttttttgtagagacaaagatctccctatgttgcccagacaggtctcaatctcctggcctcaagtgatcctcccacctcrgcctcccaaagtgccgagattata

SEQ ID NO: 59803 - DNA, 794 bp, Homo sapiens
tcatcagatccactctccaggcagccacctcctgggacctgcactgatgagcatcacaattaatgtcacaattgttaaaaaatgttaaataccttctgactccccttttctctcaatataggtctgtgggtgtctcttctgagctacaccagtttccaggttacctgggaccatggataactctcagatcagcaacttgtcagttgatttccaagctgctgttggctggactcagactcagcagggagcacctgggcgagccctgtgctgcgggctggactccggcccatctcgctgattactcttgcttttgctccccagtgtgtcctcaagaggtcagagcctgcttgttgtttcttcatgaccacgggaggaggggcaccaacatgagggtgctagcatctccccagtggtggcttcccagggctggggaaaccctgggggaggggttgggacagggacctctgtcgcttgctgycactgcctgggtcaactgcctggcagggctggccgctcgtgctcagaaggctgaggccttacctgccttctcctctcacccagcgcccatgtaaggacacatctgagttggcattctgtgtctgctcttgagctactcgcatgataagtctttgttgtcctgtgggatgtcaccggttcatgctgaagagaaattgtaaaggactcctttgcctgctcaggccccatggcctctgtcatgttttgtccccgtccctttgggagcacagcagcagtgggctggctggactgtgcaggcgaggttcaaggatgaggta

SEQ ID NO: 59804 - DNA, 561 bp, Homo sapiens
acgggtggatcccaaaggtcattcggaggcatcccagcttccacagcaaggcgtcgcagggtctcccttctgacttcctaacccagtggagaggggtgaggggctccacactcattctctcctctccttactgagcgaccccagcactttgcaggcagcgttgtgcacagatgcttttaacctgagtctccccttcccctgcagctggtgtggcctctgtgatgcagctacatccaggggcggaacggaggactaacagggacttctggaaacttctgactttcccartttgggtgctgtgtttctttcttctctttctcctcctcctccttcttttctttccttttcctgtttctcattcttcttcttcctcttctggagaaagtggacgtgaggcaggaggtggagcaaccattttgtggccatgaggcatttgtgaggacaagaggaatagaaaaataggactcagagtgcgaggccaccacacaggtgctgctctagccccggctgccactgcctggtgagtgtgcctggtggcccagccactgcagtgaggtacct

SEQ ID NO: 59805 - DNA, 561 bp, Homo sapiens
acgggtggatcccaaaggtcattcggaggcatcccagcttccacagcaaggcgtcgcagggtctcccttctgacttcctaacccagtggagaggggtgaggggctccacactcattctctcctctccttactgagcgaccccagcactttgcaggcagcgttgtgcacagatgcttttaacctgagtctccccttcccctgcagctggtgtggcctctgtgatgcagctacatccaggggcggaacggaggactaacagggacttctggaaacttctgactttcccagtttgggtgctgtgtttctttcttctctttctcctcctcctccttcttttctttccttttcctrtttctcattcttcttcttcctcttctggagaaagtggacgtgaggcaggaggtggagcaaccattttgtggccatgaggcatttgtgaggacaagaggaatagaaaaataggactcagagtgcgaggccaccacacaggtgctgctctagccccggctgccactgcctggtgagtgtgcctggtggcccagccactgcagtgaggtacct

SEQ ID NO: 59806 - DNA, 1289 bp, Homo sapiens
tctatacttaattatgtaattttctaatacccagaaggtatgcacaagcctagatgagtaaatggcattgcatggcattcatttcatgaggtcactggccattaaagtttaatcatgtcccattaaaaaataaagacttctgttttcactctttcccaatacttactaatacgtgcgtgtggtaaggtatgaagtcatatcgattttttaaagagagagaggtttcatatcaggcttagccaactctctccacccattccccataagcacctgccaggccatcacaaatgccagaggcggggtccccgtcttccctggctggtgctccggctgggcagtgaagaccagcctatgtgaaggatggtgacggacaggcgctgcacaatgccctgtcgggctgcagagcccgtctttcagagctgggatcgggaagcagcagtagcagcctcgtgaggtcggggatttgattcctgtcctgtgcccagagcctcaacgctggtatgtagggagcgccccacaggcatttttggacacacagctgagtgactgcatgaatgaggccccgctgaaccgaggaacgctcccggaggaaagggccctgggagcccctgcaggagggctgagctggccagggagggcccccgtcaccaggagcaaggcccagagggagtcagcgtggtgcggccagggaagaaaaccggtttggctgcttcacacagagccagggagacgctggtgaatcacagagggaggcccacccagcggccttgcaagcctggctgttcttagctccaacgcctctaagagtccttttgcccaaatttcagacccaagaaagaacaaaactgcatagatccgccatctcaccatatcttctccttccacggcttctggccaccgcagtgcacacagataccaggtgtcgggcctagaaaacaacaagtgcttccaaatggagcccatggggcctgcaggacccccartggcagccgcagcgaccacgggcggacccaccgtgagacaaacagccccagccagcaaaacaaccagaggaggcctccctgggcactgcaatgatcacaggctttctgggtttctcaggaggaccactgggtgcagctgagggtacccgacgtcccgtagctagccagtgaattcaacaggtggtgagcccgaccgtctggagtcagactctgagtctgaccctcacccaccggggacctgggacaaatcatgaaatgggtgaggcctctaaagcaccagcttcatctacccaatggcctcctgca

SEQ ID NO: 59807 - DNA, 621 bp, Homo sapiens
cagccttttgaggaggcaaattcctgtctgtggctgggaagtttggaaggtggctcatcttcactcacttccaggtggggcggatgaagggctgagaaacactggagtccagatgaacaaagtctcgctctggataacgggcgcagcggtcgttactcaccctcgatgtttacctgcagcaagcagttctgtttcactcaaggatctgggctctctgaaagatctgataaaccgactctacgattgtggtagggacagtgccaaacatcagggtgaaaatcatgagattttcctacagacaattttaactgtttccatgctcccaccttccagcagaaaaatataaacatccacatgtgtgcaattcacagaaagaaggctttgggcaaaatatcattgttcagctaatacctgcagaaccctgtctgtgcagagcccttggataaggctttccygggggggggggattaattcttctcaaataattacggtgagaccagtggccatccctgaagccacctgacacctccacctctggcttgtgccctccttgtgttcaaagttcccaacgtgtgagccgagaagaggccacaactgcctctcagactttcttaaggatcc

SEQ ID NO: 59808 - DNA, 1137 bp, Homo sapiens
  misc_feature (1)...(1137): n = A,T,C or G
aagaagatgaagcaggggttattaaagtccttgtggagaatgtaaagctcaaaatgacagagtagctacttgggatcaaacatctagctacctacaaaagggcactcaaattgagcatccctggcttgccaccatatctcctcttatttcaggaaattgtacacttctacttggtcttctcctgaatgctcggtggggtgaattaagcacaactcttgattgagtaggccttcttccaatattcatttattgattgaatagaacaactaagaagtgggtattgcagaaagtaatatttggctaacattcyttgatatagtatcacaaacatttaagcattttatagaacttttccccccagagtaaccaaatgtttgctattattactccttcagttagatgggataaagacaattggtgttaagccattattatgccaaattcaataactaagtgtgaacaggtccacatgcctgatgatataacacaaaagtcatattaccgatgatgtagtcattgaaaatgaaacatttacacaaccgaaagtatgattaatcatacaagagatctatttccatatcttttgtccacaacatggctatcactacttttaatcaaaacactgaagcctgaatcactctggtagggcttgaacaacagcaactatgacagggaacaaaacctaggaagaaaccccttcatttcgtttatgtgtctactggaagctccaggagtgggagacggggagcagctaatgtcgatgcatgtggaagagagataggtggtgaaattgaccgtaacattggggagcaaagctgagaaaaaaggctaccggggcaaagtgcttgttagtaatagacaaacgttgctataaggaagtttgttatatttctctcaagttttaaaaaatatttctaagccaatttcacataatatataactgagagaaaccttaggacttatgtgccgtattgtttcacgttttttggtgaagtaggcaaaggaaactcagggaggtcgagttattcttccaatgtcacacagcaagctaacaagcttggtaattgctangtcaacagtaggttaccaagctagcttgataattcgcaagtcataagtagggcttttgactctttt

SEQ ID NO: 59809 - DNA, 672 bp, Homo sapiens
ttcaaacatctcttgaatggacattgcttggggattccctgataatagcaataatggtgatggtgatggccttgctttcgtgccaggcctcaaatcctcctcaccacatggaggaggaggtaggtacaaatgtttggtagtgaggctgccacgactccttctttagcaaagctcaatgacttttctggaatcagttaaattttttctttctgggccctgcatccctgcttgggtgctgtttcttgagcttcctgaatagcaagctccttccttgatcctccttggcagcctgtttcatgaattagttttccttcatttagctgygttcttcagaccccagaggacagttgaaaggttaattttataacacttaatactagtacgaatcctcagggtcaggatctttttaccaaaataccacttcttttatatttcctttccagccttcattgttcagtagttctgcagaagtgatttctgcttgaacactgctggtagggaaaagcacagaatatttcctacatagttgttttttgctttaataacatttggcttaagaatgtctttttgcctcttaaaagtaggatatttttcattttgttctgtggatttggtttatggctactggtcaaattttgtctaaaagttactattactgaatgtatttccaga

SEQ ID NO: 59810 - DNA, 3427 bp, Homo sapiens
tttttagttgtagctagtgggaggaatagggaaaagtacgtctacttcattttcccagatagttcattttatttttatgcgtaggtaatgtccttggcttttatacttggagcataggccaagtttaaccttatcatttgctgtgttaaaggacaatgtttggaagtatggatgtgaaaagagaagatacttgaactttttcttttggaaaatagccttttgtgatggcttttcattcttgtcaagatgggtgttcagaaagaagtaattattgggagtggacaactcatagaatgtaaagcaggggtgcctaatatagtggaaagtaagcagatctaaggctttccctgcacttctgctaggtggctgctgccgtggggactgccccaatcagcagacttcttaattagatggagagggagcagtggggtaagaaaccttgctgtcagcttcccttctccctatcccttcccctcattccttgtcaggaaaaaggaaaagtataattttttcattagagataacaggaatcatgtttggtttgatagtatttataaatatgcttcaataaacattcaattgtgctcacttacagttttacgtaagctgtgggtcagtttcatactgcaacagttcattctcatcatttggttgtcctttatcattctgatgtgaaaatcatgttgaaggggaaattattcgtgcattataatgagtataacttgcatcctaggggccttgaaatgcagtttgctaaactaaatacaaaagactacagtctaaacatagaattcgccatagtcaagctcttcctgtgaaggcttaaagaaaaaaaaacaacctagggaattgtcacacttcccattgttattcacacgcttgtttgggatctgataatggcagctgccagagccctgacatttcagcagagaggggaagcagggcaaaagttagaagactctggatctgaggagaactctcaaattcactgtaagcctcagctgtcttgaaaatgtgataatggttgtagaatttggatagatgatttctctagaaaaacaaattttattagataacagcatgcatgaacactacaaaacacaggattaaaataccactgaatcctacaaagtactttaaattctccttcttaactggtttgccattcaagtcaataaatatttaccaaaaaatgaccacgtttctggtccactgggggcagttggggtacgaagatgaacaagtcctgatccctgtctttaaggagctaataatgcagagggaaaacagaagtgtatacaaataactgctataaaatgtgcctaaatgaggctttatgaagaattgccatttgaactgaaccttgaaggattatttagtggctgcaagaagcagatatgaactctggctaattgaagagaaaacaaaattccaacaacacacccaccaccaagggggacatctgttgggattgtggagatagctcctgaattgaagtaaaagctgtacctttaagaaacatgttatagattgatgtactagcgattgatgccaatgtgtttttcagagtatggtctataaggatgagtcaactccagtgcttttgggttgggtcacttctcttaaggtacaaatttcaagggaagagggactgagaggtcttacctgggtcatatacccatctcttggccaatgcaatgccaggggagtcattccttaaaggaagagcataagctctaattaaaagcccaatagctctgacgttgggcagcacaaaccatggacaggtggaaggaatatctgagcagagatgcagaggcagagaaataagaatgtttgggaacagcaaagcatctggtccagttgtgcataaggtgaaggaaaggcgaagttgggagagatgaggaagaagaggcaggttgcaagtgggtgatggaagaccttagctgctatgtttggaattgaagatagagtcattggcagggctggggggagcagatctggtaagatctatgctttgagaacagttctctggaaacagacttgggttataaaaggaattatggggcaagaaggcaaaggatgttgcctaggtgaaaaggggtaatgaaggcttttaatgatattatacttaactctgaaatgaccacagtgaacactttatacattttacttttacccagtagagaagacaaggcatgcattttccccccttttaacagatacaataccagaggctccagatgcttaagtgtcatgctctagatatcatgatgagtaaggaggagccagggcttgcccttggccgtcttcctaggggctctttctaacatgtgagaccttgcagctggatccagctgactttgctttgctgcaccacaggctgtgacccatttcttcaccaccaggatgatattcttttgaggttgcgcccttgagcaaatagctccagtacatctgaatcttggcttgtgcctgatgtgcttatgtggcytgaatgcaggttttctttttccctcatgagagaggattttccaaaaggagtttcaaaaataatctgtggtggatactgaacatgtgctcagcagctaagtgaaaggacaatgatagtgtagcaggaaatggcagtggagtgttaggaatgttgagctttggagtcaggttgcctgagctaaaatctctgctctgcctcttactagcggtgtgaccttggccaagatacttgactttctaaatctgtttgtctgcaaaatggcgataataatgaagtcaccccatagagttgtgaggattcaatgtgataatgcaaatagagaccttggaagagtacctagcttatcataagtatttaataatgttgctgttctggttattgttgctattgtcttacctaaaacatggcgggacgtgtttcgtatagttctgtgacatttgagcttcagtgccatctagtggccaggacatttcagagggtgctattagcccaggtgttgcacccacaggtgatgcgagggctcttattctgtagcttaatgactcgctgctaactgatttcaaaggtgagtgctgggtatgcaggccaggactaggaatattgtgtgatctgacctcattactggttaagttgcatgaagagagtaactttgtttttacagacagaaaaggaaatcatcatggccacgggatctcggatgccttctcttccttggcctggccacacaagggaactctgtgtttccaaaaggtgtagctcccccttggagcacgacaggatacaggccgacttgccagtgtagtggttaggaatgtgattatctggtcccgtggtttgtgagtcaccagctgaatgactgtagcaagttacttaacttctgtgaagagtaaaaatctgtacctcacaggattttaatgagaatgcacatatatg

SEQ ID NO: 59811 - DNA, 3427 bp, Homo sapiens
tttttagttgtagctagtgggaggaatagggaaaagtacgtctacttcattttcccagatagttcattttatttttatgcgtaggtaatgtccttggcttttatacttggagcataggccaagtttaaccttatcatttgctgtgttaaaggacaatgtttggaagtatggatgtgaaaagagaagatacttgaactttttcttttggaaaatagccttttgtgatggcttttcattcttgtcaagatgggtgttcagaaagaagtaattattgggagtggacaactcatagaatgtaaagcaggggtgcctaatatagtggaaagtaagcagatctaaggctttccctgcacttctgctaggtggctgctgccgtggggactgccccaatcagcagacttcttaattagatggagagggagcagtggggtaagaaaccttgctgtcagcttcccttctccctatcccttcccctcattccttgtcaggaaaaaggaaaagtataattttttcattagagataacaggaatcatgtttggtttgatagtatttataaatatgcttcaataaacattcaattgtgctcacttacagttttacgtaagctgtgggtcagtttcatactgcaacagttcattctcatcatttggttgtcctttatcattctgatgtgaaaatcatgttgaaggggaaattattcgtgcattataatgagtataacttgcatcctaggggccttgaaatgcagtttgctaaactaaatacaaaagactacagtctaaacatagaattcgccatagtcaagctcttcctgtgaaggcttaaagaaaaaaaaacaacctagggaattgtcacacttcccattgttattcacacgcttgtttgggatctgataatggcagctgccagagccctgacatttcagcagagaggggaagcagggcaaaagttagaagactctggatctgaggagaactctcaaattcactgtaagcctcagctgtcttgaaaatgtgataatggttgtagaatttggatagatgatttctctagaaaaacaaattttattagataacagcatgcatgaacactacaaaacacaggattaaaataccactgaatcctacaaagtactttaaattctccttcttaactggtttgccattcaagtcaataaatatttaccaaaaaatgaccacgtttctggtccactgggggcagttggggtacgaagatgaacaagtcctgatccctgtctttaaggagctaataatgcagagggaaaacagaagtgtatacaaataactgctataaaatgtgcctaaatgaggctttatgaagaattgccatttgaactgaaccttgaaggattatttagtggctgcaagaagcagatatgaactctggctaattgaagagaaaacaaaattccaacaacacacccaccaccaagggggacatctgttgggattgtggagatagctcctgaattgaagtaaaagctgtacctttaagaaacatgttatagattgatgtactagcgattgatgccaatgtgtttttcagagtatggtctataaggatgagtcaactccagtgcttttgggttgggtcacttctcttaaggtacaaatttcaagggaagagggactgagaggtcttacctgggtcatatacccatctcttggccaatgcaatgccaggggagtcattccttaaaggaagagcataagctctaattaaaagcccaatagctctgacgttgggcagcacaaaccatggacaggtggaaggaatatctgagcagagatgcagaggcagagaaataagaatgtttgggaacagcaaagcatctggtccagttgtgcataaggtgaaggaaaggcgaagttgggagagatgaggaagaagaggcaggttgcaagtgggtgatggaagaccttagctgctatgtttggaattgaagatagagtcattggcagggctggggggagcagatctggtaagatctatgctttgagaacagttctctggaaacagacttgggttataaaaggaattatggggcaagaaggcaaaggatgttgcctaggtgaaaaggggtaatgaaggcttttaatgatattatacttaactctgaaatgaccacagtgaacactttatacattttacttttacccagtagagaagacaaggcatgcattttccccccttttaacagatacaataccagaggctccagatgcttaagtgtcatgctctagatatcatgatgagtaaggaggagccagggcttgcccttggccgtcttcctaggggctctttctaacatgtgagaccttgcagctggatccagctgactttgctttgctgcaccacaggctgtgacccatttcttcaccaccaggatgatattcttttgaggttgcgcccttgagcaaatagctccagtacatctgaatcttggcttgtgcctgatgtgcttatgtggcctgaatgcaggttttctttttcyctcatgagagaggattttccaaaaggagtttcaaaaataatctgtggtggatactgaacatgtgctcagcagctaagtgaaaggacaatgatagtgtagcaggaaatggcagtggagtgttaggaatgttgagctttggagtcaggttgcctgagctaaaatctctgctctgcctcttactagcggtgtgaccttggccaagatacttgactttctaaatctgtttgtctgcaaaatggcgataataatgaagtcaccccatagagttgtgaggattcaatgtgataatgcaaatagagaccttggaagagtacctagcttatcataagtatttaataatgttgctgttctggttattgttgctattgtcttacctaaaacatggcgggacgtgtttcgtatagttctgtgacatttgagcttcagtgccatctagtggccaggacatttcagagggtgctattagcccaggtgttgcacccacaggtgatgcgagggctcttattctgtagcttaatgactcgctgctaactgatttcaaaggtgagtgctgggtatgcaggccaggactaggaatattgtgtgatctgacctcattactggttaagttgcatgaagagagtaactttgtttttacagacagaaaaggaaatcatcatggccacgggatctcggatgccttctcttccttggcctggccacacaagggaactctgtgtttccaaaaggtgtagctcccccttggagcacgacaggatacaggccgacttgccagtgtagtggttaggaatgtgattatctggtcccgtggtttgtgagtcaccagctgaatgactgtagcaagttacttaacttctgtgaagagtaaaaatctgtacctcacaggattttaatgagaatgcacatatatg

SEQ ID NO: 59812 - DNA, 695 bp, Homo sapiens
caattttacacatatgtgcaaattaatatacttttctgtctactgtaattcattagcattaccctttttttaaaaagtatatgaatattttcgtgaaaaattttcccagtttcacacatacatgcaaactaatgtacttttctctctattgtaattcattagcattacccttttttaaaaacgtatataaatttttttaagtgcaatgctaatgaattacaattgggagatctgaacttattcatcaaagccctgaactcatcctgacatcaagcttcagacataagaaacttgtctttacctataagggataagaaccagaaaagtaccatggcatagattcctcaccatgggtcactctacagcaagataactgaattctctgtcaactaaatgtgaagagctatgaggtgttgaaaaagcatgagagaaagaaaaattgtccactatgctagggtcttaataaatatcaagacctagaaaataccagctttaaaaaagtaattgatgttgggcaggcwcccaagctttctaagtcatatcaactaagaaaaaatgactccctaggcctaaactggcattgaccttgctgggcaaataagagagtatgaacaaataggacgaagtatgagacggaataaatagagagagtataagtaaatacccagtgcaaacatccagtgcattgaatctga

SEQ ID NO: 59813 - DNA, 721 bp, Homo sapiens
tttttaagaacgttgcttcaaatttccttgcatccttggagtttatgtaatcctgagtttatgtaatcctcaggcttatagcaagatgatgctagcagttgtaagcaaacaacattcagagcaacataataattagcaagagtcatatggtgcttactatgtgagtttatatacattgcatacattaactcatttgttttctccctcaaaactcattttacaaatgaaaaaagctgaggcattgaaagactaagtaatttactgaagggtacataatttgtaagtggtagattcaaacccaggcaatctagcataagaacacgtgcactgaatctctaggctgtactctatgcctgtttttccttgttgcttcccctccccactttcacctgcccctctttcctgtcttttcttgtagttctttctaaggagtaaggaaagttttcccagagcccttccagcagacacctctacaactgtcattggcacatttggttcagtcctgaacagatcagcctaaacagatcacccctggagttgagagtggggtcagcttcccctagggacattgytgggtggagaggcatacatacatgaaccaaatctgtgttctctttggaaggaagaaaatggaaaagtgaagggaaattaatactaaggagataacctacagtatccaataaaggtaatttctactagtcctttgtagctcaatgactta

SEQ ID NO: 59814 - DNA, 837 bp, Homo sapiens
ctatcagccttatttacagttcatgacacttcctcttccatgtctcatttaagaagatagtgtctcctctgaatgcaaaccagaacctgcaggcccgtggtaatagccccctttagaagtcttggaggaaatgatgcgtctttgatggccgcaagaccagaatttggcagagtctcaatgaaatcagtytaccacattccctcccacacagcacttagaagtgccttaggttcacaaaaaaaatggcaaagtctgttaaaaaaaaaaaagatagaaaagaaagaaagaaaggctgttccatgtgcagcaccctctcgttatctggcattgcaaaggagtgacttttgtgagttaacccaacagtaaggcacctagcaaagtgccccaaatgtgttgagtgttccatagatgctattcagatgccacagcagagtagtagctaagtgcacagactctggattttattcccagatctaccgcttatgatctgtgtgatctttaccaacttacaagtaacttatctatgaaacacaaaaaaaattataatagtaccttcttcatagggttcttacaagaattaaaggagttactgcatgtaaggcacttggagtaggccccaacacagctagtaaagatcttggacatagaaagcaccagatacacattaagaaacattctgcaaaggttgcttatactacaatgcatgggcttcttcatgctgctgagatctaaactgctaagcaggctcattcattcaacagtttttgagcacctactatatgctaggcattgaaccaggaactggggttacgatggtgaaaataatgtcaagatgag

SEQ ID NO: 59815 - DNA, 837 bp, Homo sapiens
ctatcagccttatttacagttcatgacacttcctcttccatgtctcatttaagaagatagtgtctcctctgaatgcaaaccagaacctgcaggcccgtggtaatagccccctttagaagtcttggaggaaatgatgcgtctttgatggccgcaagaccagaatttggcagagtctcaatgaaatcagtctaccacattccctcccacacagcacttagaagtgccttaggttcacaaaaaaaatggcaaagtctgttaaaaaaaaaaaagatagaaaagaaagaaagaaaggctgttccatgtgcagcaccctctcgttatctggcattgcaaaggagtgacttttgtgagttaacccaacagtaaggcacctagcaaagtgccccaaatgtgttgagtgttccatagatgctattcagatgccacagcagagtagtagctaagtgcacagactctggattttattcccagatctaccgcttaygatctgtgtgatctttaccaacttacaagtaacttatctatgaaacacaaaaaaaattataatagtaccttcttcatagggttcttacaagaattaaaggagttactgcatgtaaggcacttggagtaggccccaacacagctagtaaagatcttggacatagaaagcaccagatacacattaagaaacattctgcaaaggttgcttatactacaatgcatgggcttcttcatgctgctgagatctaaactgctaagcaggctcattcattcaacagtttttgagcacctactatatgctaggcattgaaccaggaactggggttacgatggtgaaaataatgtcaagatgag

SEQ ID NO: 59816 - DNA, 837 bp, Homo sapiens
ctatcagccttatttacagttcatgacacttcctcttccatgtctcatttaagaagatagtgtctcctctgaatgcaaaccagaacctgcaggcccgtggtaatagccccctttagaagtcttggaggaaatgatgcgtctttgatggccgcaagaccagaatttggcagagtctcaatgaaatcagtctaccacattccctcccacacagcacttagaagtgccttaggttcacaaaaaaaatggcaaagtctgttaaaaaaaaaaaagatagaaaagaaagaaagaaaggctgttccatgtgcagcaccctctcgttatctggcattgcaaaggagtgacttttgtgagttaacccaacagtaaggcacctagcaaagtgccccaaatgtgttgagtgttccatagatgctattcagatgccacagcagagtagtagctaagtgcacagactctggattttattcccagatctaccgcttatgatctgtgtgatcttwaccaacttacaagtaacttatctatgaaacacaaaaaaaattataatagtaccttcttcatagggttcttacaagaattaaaggagttactgcatgtaaggcacttggagtaggccccaacacagctagtaaagatcttggacatagaaagcaccagatacacattaagaaacattctgcaaaggttgcttatactacaatgcatgggcttcttcatgctgctgagatctaaactgctaagcaggctcattcattcaacagtttttgagcacctactatatgctaggcattgaaccaggaactggggttacgatggtgaaaataatgtcaagatgag

SEQ ID NO: 59817 - DNA, 837 bp, Homo sapiens
ctatcagccttatttacagttcatgacacttcctcttccatgtctcatttaagaagatagtgtctcctctgaatgcaaaccagaacctgcaggcccgtggtaatagccccctttagaagtcttggaggaaatgatgcgtctttgatggccgcaagaccagaatttggcagagtctcaatgaaatcagtctaccacattccctcccacacagcacttagaagtgccttaggttcacaaaaaaaatggcaaagtctgttaaaaaaaaaaaagatagaaaagaaagaaagaaaggctgttccatgtgcagcaccctctcgttatctggcattgcaaaggagtgacttttgtgagttaacccaacagtaaggcacctagcaaagtgccccaaatgtgttgagtgttccatagatgctattcagatgccacagcagagtagtagctaagtgcacagactctggattttattcccagatctaccgcttatgatctgtgtgatctttaccaacttacaagtaacttatctatgaaacacaaaaaaawttataatagtaccttcttcatagggttcttacaagaattaaaggagttactgcatgtaaggcacttggagtaggccccaacacagctagtaaagatcttggacatagaaagcaccagatacacattaagaaacattctgcaaaggttgcttatactacaatgcatgggcttcttcatgctgctgagatctaaactgctaagcaggctcattcattcaacagtttttgagcacctactatatgctaggcattgaaccaggaactggggttacgatggtgaaaataatgtcaagatgag

SEQ ID NO: 59818 - DNA, 837 bp, Homo sapiens
ctatcagccttatttacagttcatgacacttcctcttccatgtctcatttaagaagatagtgtctcctctgaatgcaaaccagaacctgcaggcccgtggtaatagccccctttagaagtcttggaggaaatgatgcgtctttgatggccgcaagaccagaatttggcagagtctcaatgaaatcagtctaccacattccctcccacacagcacttagaagtgccttaggttcacaaaaaaaatggcaaagtctgttaaaaaaaaaaaagatagaaaagaaagaaagaaaggctgttccatgtgcagcaccctctcgttatctggcattgcaaaggagtgacttttgtgagttaacccaacagtaaggcacctagcaaagtgccccaaatgtgttgagtgttccatagatgctattcagatgccacagcagagtagtagctaagtgcacagactctggattttattcccagatctaccgcttatgatctgtgtgatctttaccaacttacaagtaacttatctatgaaacacaaaaaaaattataatagtaccttcttcatagggttcttacaagaattaaaggagtkactgcatgtaaggcacttggagtaggccccaacacagctagtaaagatcttggacatagaaagcaccagatacacattaagaaacattctgcaaaggttgcttatactacaatgcatgggcttcttcatgctgctgagatctaaactgctaagcaggctcattcattcaacagtttttgagcacctactatatgctaggcattgaaccaggaactggggttacgatggtgaaaataatgtcaagatgag

SEQ ID NO: 59819 - DNA, 740 bp, Homo sapiens
gaagctaactaggcagggctatatatgaggacagttcctgcaggagggatttgcagccagaggtggtttttctgcagagctaatgcagagcaagcttccaggccactcttttgccccagtttcttccgaggctgtggtaggaccccaagcaatctcgtactgtttctcttcaagagagcacctgacttatgtaagttttaggacttgcaaaacctgttttcaagcctgtaaaccagtttaccaccaaaacaaaacttagtatacgcataaggtgtttaaagatttttttgtagcatttaattttagacatgcccacatacccggattgtaatcagttaaattaatattgtctttgaaaacaaaacatactctaggaccagattcttttccatatcaaggcyctgctttggcatcgaatctggggaccctgtattgattttaaatacttgatatttttgtctacttgacttatttgataaaagcagacccttagtctagatcagtaggaggtagaagaaaggctttataaacgatttaaatcttaattacctattaatgtggtaaacgtgtgtattatataaggttaaacctgttctgcctcaagcaactgcattgcttccctctgagaagtgattccacctgctcagcatcagcggcaaacagaacacagaagcaccctaaagagctgggtgtgatggtacgcgcctgtaatcccagctactcaggagactgaagcggga

SEQ ID NO: 59820 - DNA, 1214 bp, Homo sapiens
tggagtttgacggacctgggatcaaatcctggcctcaccattggagagacctctgtctgctcacaaagcctcagtattaccttatctgtaaaacagggataagaagccctgccttacacagttgctgcaggacatgccacctcagaacctgtgtgtctttatagctgtgtagtgrggtgataagactgtggtcctgcctgcagcaggctatctgcctccttttaaatctgtaccaccctttgtagttttcctcagcagcaggctttgttttagaataccaggcctcaaaatacatttaagatattttcttagtcatctccaacatctcagacacaaagagagagcacattttctgatctcttatcgccatggggaaaacccagggaagagacaaagaaaccatgaagtatgaggttgaaattgagactatggagttcgtgtcaaacatctactggaggcagacagcagaatggacctggatctttggttgagaagcctgaggctgtacagttctgtccaccaccttactttcatctggtatttcatattctgcatagtgctttcacacatttttatattagttctgtaaagtagagaaagtggagattttttcccatagtttgcagagaaagaaattgagtataaaaaagtaaagtggtgtgtgtaaacttacacactttgcaaagccagagccaggactcaaactctagcctagtgcttcctactaagttatgctgcccctctgcactgggccagcttatctccatttgggcttttcttctccttggtttagaattctgcccctcctgcacaataagccagagaggccgggtgaccagggcgctcctgacagcaaggctggtctgcagagatagacttcctgcagagggagcagcccacgtatgggacagtgggcacagctgcactaagatcctttctctcccatggggtggaacatcacctatggagcccattgacccaccaatcactgtcttctggggaatggaaggaagaaagagacaggatgtggaagggcttgaaattgagggcctttgagtttatctgaacacaaagaaccaggacatggtcatgtcctccaactccttctaggatattatagaaccaggtcactgggaggctgttttgagaccctgccatctgggcaataggctgtgctgggcctgcccccaacagaggaagtggggaggtggccc

SEQ ID NO: 59821 - DNA, 1214 bp, Homo sapiens
tggagtttgacggacctgggatcaaatcctggcctcaccattggagagacctctgtctgctcacaaagcctcagtattaccttatctgtaaaacagggataagaagccctgccttacacagttgctgcaggacatgccacctcagaacctgtgtgtctttatagctgtgtagtgaggtgataagactgtggtcctgcctgcagcaggctatctgcctccttttaaatctgtaccaccctttgtagttttcctcagcagcaggctttgttttagaataccaggcctcaaaatacatttaagatattttcttagtcatctccaacatctcagacacaaagagagagcacattttctgatctcttatcgccatggggaaaacccagggaagagacaaagaaaccatgaagtatgaggttgaaattgagaytatggagttcgtgtcaaacatctactggaggcagacagcagaatggacctggatctttggttgagaagcctgaggctgtacagttctgtccaccaccttactttcatctggtatttcatattctgcatagtgctttcacacatttttatattagttctgtaaagtagagaaagtggagattttttcccatagtttgcagagaaagaaattgagtataaaaaagtaaagtggtgtgtgtaaacttacacactttgcaaagccagagccaggactcaaactctagcctagtgcttcctactaagttatgctgcccctctgcactgggccagcttatctccatttgggcttttcttctccttggtttagaattctgcccctcctgcacaataagccagagaggccgggtgaccagggcgctcctgacagcaaggctggtctgcagagatagacttcctgcagagggagcagcccacgtatgggacagtgggcacagctgcactaagatcctttctctcccatggggtggaacatcacctatggagcccattgacccaccaatcactgtcttctggggaatggaaggaagaaagagacaggatgtggaagggcttgaaattgagggcctttgagtttatctgaacacaaagaaccaggacatggtcatgtcctccaactccttctaggatattatagaaccaggtcactgggaggctgttttgagaccctgccatctgggcaataggctgtgctgggcctgcccccaacagaggaagtggggaggtggccc

SEQ ID NO: 59822 - DNA, 743 bp, Homo sapiens
cagtagcactttcttggcatcaacaaatgttaaaagcagtgaattgggccaggtgcggtggctcacgcctgtaatcccagcactttgggaggctgagggaggcagatcatgaggtcaggaaatcaagaccatcctgaccaacatggggaaacccgtctctactaacaatacaaaaattagctgggtgtggtggcaggcgcttgtagtcccaggtactctggacttctgctgaggcagaagaattgcttgaacccgggaactggaggttgcagtgagccgagattgcgccactgcactccagcctgggtgacagagtgggactttgtctcaaaaaagagcaatgaattgttaacttagccgattaaagatgataaggataaaatgaagccttgccatccactgtggaacacagatttgacatagcccctaggggccaggaagcctgcttttccagactttgggaagagctgrgcacttttttttttttttttttttttttgaaacaaggtcgtctcgctctctcactcaggctggagtgcaatggcatgaccatggctcactgcagcctcgacctcccaggctcaagcgatccttccacctcagcttcctgagtaggatcataggcatgagccaccacacccagctaatttttttaaattttttgtggagacagggctctcacaaggttgcccaggctggtgtcgaactcctgggctcaggcaatccaaggcctaccccagcct

SEQ ID NO: 59823 - DNA, 743 bp, Homo sapiens
cagtagcactttcttggcatcaacaaatgttaaaagcagtgaattgggccaggtgcggtggctcacgcctgtaatcccagcactttgggaggctgagggaggcagatcatgaggtcaggaaatcaagaccatcctgaccaacatggggaaacccgtctctactaacaatacaaaaattagctgggtgtggtggcaggcgcttgtagtcccaggtactctggacttctgctgaggcagaagaattgcttgaacccgggaactggaggttgcagtgagccgagattgcgccactgcactccagcctgggtgacagagtgggactttgtctcaaaaaagagcaatgaattgttaacttagccgattaaagatgataaggataaaatgaagccttgccatccactgtggaacacagatttgacatagcccctaggggccaggaagcctgcttttccagactttgggaagagctgagcrcttttttttttttttttttttttttgaaacaaggtcgtctcgctctctcactcaggctggagtgcaatggcatgaccatggctcactgcagcctcgacctcccaggctcaagcgatccttccacctcagcttcctgagtaggatcataggcatgagccaccacacccagctaatttttttaaattttttgtggagacagggctctcacaaggttgcccaggctggtgtcgaactcctgggctcaggcaatccaaggcctaccccagcct

SEQ ID NO: 59824 - DNA, 743 bp, Homo sapiens
cagtagcactttcttggcatcaacaaatgttaaaagcagtgaattgggccaggtgcggtggctcacgcctgtaatcccagcactttgggaggctgagggaggcagatcatgaggtcaggaaatcaagaccatcctgaccaacatggggaaacccgtctctactaacaatacaaaaattagctgggtgtggtggcaggcgcttgtagtcccaggtactctggacttctgctgaggcagaagaattgcttgaacccgggaactggaggttgcagtgagccgagattgcgccactgcactccagcctgggtgacagagtgggactttgtctcaaaaaagagcaatgaattgttaacttagccgattaaagatgataaggataaaatgaagccttgccatccactgtggaacacagatttgacatagcccctaggggccaggaagcctgcttttccagactttgggaagagctgagcacttttttttttttttttttttttttgaaacaaggtcgtctcgctctctcacycaggctggagtgcaatggcatgaccatggctcactgcagcctcgacctcccaggctcaagcgatccttccacctcagcttcctgagtaggatcataggcatgagccaccacacccagctaatttttttaaattttttgtggagacagggctctcacaaggttgcccaggctggtgtcgaactcctgggctcaggcaatccaaggcctaccccagcct

SEQ ID NO: 59825 - DNA, 729 bp, Homo sapiens
ggtaatgcagccacaaaccaaggcttacctgagccaccaaaagctaggcgaggcagggaacagaatctctcctaggaccctcaaaggaagtgtggctgtgcctgcagctcggttttcgactttcagcctctagagctgtgacagaataaattttctattgtttgatgccattcagtttgtggtagtttattatagcagtggtatggtttggctgtgtccccgcccaaatctcatcttgaattgtagctctcctaattcccacatgttatgggaggggcccagtgggagataattgaatcctgggtgcagtttcccctgtactgttctcatggtagtgaataagtctcaccagatctgatggttttttaagaggtttccccttttgcttggttctcattctgtcattcttcctgcggccgcgtaagacgtgcctttcactttccaccatgattgtgaggcctccccagccacgtggarctgtgagtctattaaacctctttttcattataaattacccagtctcgggtatgtctttatcagcagcgtgaaaatggactaatacaagcagtcacagtaaacctgttaaagacacatactcaagcacacacccacgtgtaaacacacacacatacatacctatataagttttgctaccctatagttaataacatgccaagtttcttaaaaaaaaaaaaacgtagaagttataagtataaaacccccttctct

SEQ ID NO: 59826 - DNA, 684 bp, Homo sapiens
ataaaaaggaacaaaataatggcatttgcagtgacctggcgggaattggaggccattattctaagtgaagtaactcaagaatggaaaaccaaacattgttctcaatcataagtgggagctaagctatgaggatacaaaggcataagaatgatacaatggactttggggacccaatggaaagggtgggaggggggtgagggattaaaaactatcagttgggtacagtgtatactgcttgggtgaggggtgcactaaaatctcacaaatcatcactaaagaacttattcatgtaacaaaacaccacttgttcctcaaaacctatggaaatagaaaattgaaaaaaaagttttaagtgcattattggaacacagaggtggagatataaaaggtttgatcctaccatatttcaatttgataggtttttagaccttattgttttaaaatataaatattttgacttcaaatttataaatttattttttcaaagccacattaacataaatatttctacttttgataaagagtctcattttgtcactcatgttggagtgcagtgttgcacacacggctcacygcagctttgacctcctgggctcaagtgatcctcctgcctcaaccttccatgtagctggtaccataagtgtggaccaccatgccccccatgtttgattttttgtagagatg

SEQ ID NO: 59827 - DNA, 684 bp, Homo sapiens
ataaaaaggaacaaaataatggcatttgcagtgacctggcgggaattggaggccattattctaagtgaagtaactcaagaatggaaaaccaaacattgttctcaatcataagtgggagctaagctatgaggatacaaaggcataagaatgatacaatggactttggggacccaatggaaagggtgggaggggggtgagggattaaaaactatcagttgggtacagtgtatactgcttgggtgaggggtgcactaaaatctcacaaatcatcactaaagaacttattcatgtaacaaaacaccacttgttcctcaaaacctatggaaatagaaaattgaaaaaaaagttttaagtgcattattggaacacagaggtggagatataaaaggtttgatcctaccatatttcaatttgataggtttttagaccttattgttttaaaatataaatattttgacttcaaatttataaatttattttttcaaagccacattaacataaatatttctacttttgataaagagtctcattttgtcactcatgttggagtgcagtgttgcacacacggctcactgcagctttgacctcctgggctcaagtgwtcctcctgcctcaaccttccatgtagctggtaccataagtgtggaccaccatgccccccatgtttgattttttgtagagatg

SEQ ID NO: 59828 - DNA, 611 bp, Homo sapiens
ggcctcccaaagtgctgggattacaggcatgaaccaccgcggcaggcccttccttccttcctttctttctttctttcctctttctttctctctctttgcatatacctatatatagatataaatatatatagatagatcaaatacatccattttatacatatatatatatataacatcctattggtttatttctctggaaaactctaatacaacctccaaaacatttcttaaatyggtacacttctccccatctccatgacaatgtctctggatctctgggtctggactaagttcccagtacctgctttcacgtttgcctcttcttcaatggtgttcaatgagagaagaaaaccacagggataagccaggcgcagtggctcacacctgtaatcccagcactttgggaggccgaggcgggtggattacctgaggtcaggagttcgagatcagcctgggcaacacagtgaaaccccgactctactaaaaatacaaaattagccgggcatggtgacacgtgtctgtaatcccagctactctggaggctgaagcaggagaaacatatacatacatatgtaacaaaacaaatatataaaaatcacatgttttatgca

SEQ ID NO: 59829 - DNA, 611 bp, Homo sapiens
ggcctcccaaagtgctgggattacaggcatgaaccaccgcggcaggcccttccttccttcctttctttctttctttcctctttctttctctctctttgcatatacctatatatagatataaatatatatagatagatcaaatacatccattttatacatatatatatatataacatcctattggtttatttctctggaaaactctaatacaacctccaaaacatttcttaaattggtacacttctccccatctccatgacaatgtctctggatctctgggtctggactaagttcccagtacctgctttcacgtttgcctcttcttcaatgrtgttcaatgagagaagaaaaccacagggataagccaggcgcagtggctcacacctgtaatcccagcactttgggaggccgaggcgggtggattacctgaggtcaggagttcgagatcagcctgggcaacacagtgaaaccccgactctactaaaaatacaaaattagccgggcatggtgacacgtgtctgtaatcccagctactctggaggctgaagcaggagaaacatatacatacatatgtaacaaaacaaatatataaaaatcacatgttttatgca

SEQ ID NO: 59830 - DNA, 542 bp, Homo sapiens
ttggctactataccatcatgcctgtggctctggtttgtcagggcaccaattctgggccccagtctgcagaacatttcagaactgcctctcagttcaaatttcagagcaaatatgcctgctcacagcacagcaaatacattgcttcttctctgatctttgttcaaatattggcccacmcccatttagaatacatgactttgaccatgatacttgaactctgagttcttgtgtaaaacagaaatacaagccgggcgcggtggctcacgcctgtaatcccagcactttgggaggccaaggcgggcggatcatgaggtcaggagattgagaccatcctggctaacaaggtgaaactactaaaatacaaaaaataccatctctactaaaaatacaaaaaattagccaggcgtggtggcgggcgcctgtagtcccagctactcgggaggctaaggcaggagaatggcgtgaacctgggaggcggagcttgcagtgagccaagatcatgccaccgcactccagcctgggggacagagtgagactccgtc

SEQ ID NO: 59831 - DNA, 2325 bp, Homo sapiens
acaccttatgttggtctgcagaaccccagctctcttctatctcataccttggttcactaagcttctatttctggaaaatacyatgccaatgctggcatcagagcctttgaacatgcttccgtctctgcctgataggttcttatccttcattctctgtacagctcatttctttttcttctaggtgtctcagctttctcttttcagagatgcttttcctgaccacccgagggacctttctttttttgtttttccttatgccaatccttatgtattttccttcttagcacttatcacagtctgtaattttgttcaatttttctttacttgtttttattttacccattattacattatattataaattccttgaagacagtgaccataactgtcttgttaacctctttttaagaaaaagcacaatatgtagtttatgagggaattgatcgttaattttgtggatcctgtgtccaagcctatgttctaaccttccttgtacttatggatcagtagtataagagtccagcaggatcgtagctgaaatgatacctcatcatccattcatgagcagatttctattatgtgctcagtatgtgctaagcagagtgccagaggctaaatattcaaaggtacaagaaacaccatttctcatgtctccaggaagcttatatgctagttcaaaagaacaggtttcctcaataatcaaataattagtacaaattggaaattgtaataaatgctacaagtgagacgtaacaggtatcgtgagggcatgttttccaaaggaaaaaaaggaacatccagaaaagaaataacatggacatatgggccataacaaatatgagaaaatagggaaagtcagagatctggattgctgagtgggaggggctctggggtgagggcagaaggaggtgtttgtatagaccagaggcgaggatcataaaacatcaccagttaagtgttttgtcaaggctgggagaaggaggacagaagatagtaagaattgacacaatcagattgatgttttcaaggaatcaatctgtttgccaaagtgaacattagacagttcagtcagggggaggtcatcaatagctttagggtgagttttagtgacgtgatggagatagatatttgaatgcatgaagtcaaggaggaaattaatagtgaataaaagaacacagcaaatggaggaaggtaattaagaatttattaaatataaatctattatttattagtcaattccaggagtagtaaactgtgaaataatttgtgtatgtgtaaacaattgactgagtaattataaatggagaaaattaattctgatgtgtttaggcttgaatgttttgctcattgcatatacttcaatctaaaattgtcaaggtgcccccactaccagtatttataaataggtcaaataatagtcactaaagtagtcttagattgtgcaccaaatacagttgaatcatactctaactgatctggcttttaacacaggtcctagttcctaaatggaatacgcttcctctcatgggggaaatcttgcaaaagggccactgtgaccacacatatgaatcttatagtttatatctcttttatagactaacactccaaatctatagcttaagatatttacatatattcctaaagagaagcatatatttatatctgtaatttgaattagatgtgaaggtaaggaattttctccaatagactctttcaaaattttcctttaaccccaccacagtctccggttactttaaatgcactgctatcgaagcatgtagattttaaccctatccaaaatgggcaaaagtataaagcatcttcaaagcctctccatctctttttttgttacatcaaatgtatcagatctaaatgcttttgccatcacttgccacagatgatagcatgttctcatgctgaagtcagtataaaagtttatgatgttattgacttcgcacagtttcatcagacctcagtattgttgatttaatgactctttcctcttcctttttttttttttaattcaactccacagttaacccatggtttattggcgtgccagagctcaaggtttttactacatataaacaaacttatttccaaggaagcccacccataaataactcaccaaccatccaaatgcagagccagaatatgatgaatatcaagaaattggagaaaacaagcctacgtataactgaaaactcttcttgctctttgcctgttgagtatacttcctagtaaataaaaaaaaagtaatttaaaggaaaatgtcacctggcatgtagtgtatctgtgcctcacagcagatggcatggttctgca

SEQ ID NO: 59832 - DNA, 2325 bp, Homo sapiens
acaccttatgttggtctgcagaaccccagctctcttctatctcataccttggttcactaagcttctatttctggaaaataccatgccaatgctggcatcagagcctttgaacatgcttccgtctctgcctgataggttcttatccttcattctctgtacagctcatttctttttcttctaggtgtctcagctttctcttttcagagatgcttttcctgaccacccgagggacctttctttttttgtttttccttatgccaatccttatgtattttccttcttagcacttatcacagtctgtaattttgttcaatttttctttacttgtttttattttacccattattacattatattataaattccttgaagacagtgaccataactgtcttgttaacctctttttaagaaaaagcacaatatgtagtttatgagggaattgatcgttaattttgtggatcctgtgtccaagcctatgttctaaccttccttgtacttatggatcagtagtataagagtccagcaggatcgtagctgaaatgatacctcatcatccattcatgagcagatttctattatgtgctcagtatgtgctaagcagagtgccagaggctaaatattcaaaggtacaagaaacaccatttctcatgtctccaggaagcttatatgctagttcaaaagaacaggtttcctcaataatcaaataattagtacaaattggaaattgtaataaatgctacaagtgagacgtaacaggtatcgtgagggcatgttttccaaaggaaaaaaaggaacatccagaaaagaaataacatggacatatgggccatracaaatatgagaaaatagggaaagtcagagatctggattgctgagtgggaggggctctggggtgagggcagaaggaggtgtttgtatagaccagaggcgaggatcataaaacatcaccagttaagtgttttgtcaaggctgggagaaggaggacagaagatagtaagaattgacacaatcagattgatgttttcaaggaatcaatctgtttgccaaagtgaacattagacagttcagtcagggggaggtcatcaatagctttagggtgagttttagtgacgtgatggagatagatatttgaatgcatgaagtcaaggaggaaattaatagtgaataaaagaacacagcaaatggaggaaggtaattaagaatttattaaatataaatctattatttattagtcaattccaggagtagtaaactgtgaaataatttgtgtatgtgtaaacaattgactgagtaattataaatggagaaaattaattctgatgtgtttaggcttgaatgttttgctcattgcatatacttcaatctaaaattgtcaaggtgcccccactaccagtatttataaataggtcaaataatagtcactaaagtagtcttagattgtgcaccaaatacagttgaatcatactctaactgatctggcttttaacacaggtcctagttcctaaatggaatacgcttcctctcatgggggaaatcttgcaaaagggccactgtgaccacacatatgaatcttatagtttatatctcttttatagactaacactccaaatctatagcttaagatatttacatatattcctaaagagaagcatatatttatatctgtaatttgaattagatgtgaaggtaaggaattttctccaatagactctttcaaaattttcctttaaccccaccacagtctccggttactttaaatgcactgctatcgaagcatgtagattttaaccctatccaaaatgggcaaaagtataaagcatcttcaaagcctctccatctctttttttgttacatcaaatgtatcagatctaaatgcttttgccatcacttgccacagatgatagcatgttctcatgctgaagtcagtataaaagtttatgatgttattgacttcgcacagtttcatcagacctcagtattgttgatttaatgactctttcctcttcctttttttttttttaattcaactccacagttaacccatggtttattggcgtgccagagctcaaggtttttactacatataaacaaacttatttccaaggaagcccacccataaataactcaccaaccatccaaatgcagagccagaatatgatgaatatcaagaaattggagaaaacaagcctacgtataactgaaaactcttcttgctctttgcctgttgagtatacttcctagtaaataaaaaaaaagtaatttaaaggaaaatgtcacctggcatgtagtgtatctgtgcctcacagcagatggcatggttctgca

SEQ ID NO: 59833 - DNA, 1033 bp, Homo sapiens
gtgtgcaaatacacacacactgatgcctcagatcacctcaaggagatgaaaccagaactctggggataaaacttatgttctagaattttacaatttgtctagcatttttagatagtttcaatgtgtagctagcattgtgaattgctgaactaagattacagtcaactttggaggaagatatagatgggaagagaggtagttactttttttctgtttctactgatgtttcatacatttcragaaatccattgagaaaactctttaaacactttctgctctctctacttcccctaggaataggagtggcagagaattggctctcagtcaccaaatctcagtatcctacatacagaataaagtgccttgctttagagcaaagacttggtcaattagcattagataaattttctgtgtttccaaaggtagaaatattctcaccatcctcccactttaatcaagccaccaattgccattttacctatttaattacaggcttccttttgaaaggttggctgctgaggaattagtttccagggtcactgaacccctgtgagcagcctcgcctctgaatgccacagagggtgctcattctcaattcaaaggcttgtctacttagatctctgcttcaagctctggatgtagtcagcctacaaaacattgctcagaaagaaagttacaagtgcttgatcagcccctgtgaggatattgaattcagttcttatttttaatcatgtttaaaggtgggatctcttcatttgttatgataaaacccatctttcattctgaaaagtaaatcaaagcaagaacaaaacagtgtaatcagtgcctctgatggtttatacaggatatggagatatttcagaattgtaaatatgaatgtgaatttttgtatcagtgtaaactgatactgatactaagaaaaatttcccccttccattgtcaaagagaagagagttaaagttgtttctctctatcattgttcttttcttctgacataagcagttgttttagcctctgaagactctggtagata

SEQ ID NO: 59834 - DNA, 656 bp, Homo sapiens
agagggcagacggggcggcgccgggggctgtagtgggcccggctcgggggactcacgcgtctgggcgggggtggcccttccacgccggctgccgcggcggctcggggtcgacgccggggacgacatagtgctcggagtacctgcgcgacaaggacaagctcgggccgggcccgcctcccggcttccctgccctgctccgcagcgcggacgttcccgtcggctccgcgccacgccctccccgccggcgcgcggttaccgtggaaaggcggccgcttgccgacgacgctcgcggactccgagtccacctggcgagtagcgctcccaaaccgcgagacccagagttcccgccggcggcaaggtcgtctccgcccctggcggggcctcaccaatcacagcggcgctcgtacgtggctccgcctccgggaggcgccactgcgcatcggcagggggggacagtgccgcttctttcagcgcccgtgcgtaaaccagaagtaggcctcgctcggccccccttggtccagatggtctgaccccctgcgcggcagcgttttcgcgggaaaactgggtcckacagcaccagctctcggggtgtgttcctctagcgttggctagggagcgtgtgcttctttatcccttaggcgtttttggttaataag

SEQ ID NO: 59835 - DNA, 438 bp, Homo sapiens
  misc_feature (1)...(438): n = A,T,C or G
ttttttttttttttttwatcaaatccgaggactgttctgatagttcccacattggcaacaatatcctggagaacacaagacccctaagaagtaaaattgttctttctctacctgtttttgctctaccttccactcacattttctcaattttccaaatgccagcatacaaattttttttcaggaatgccaccaacaggaatcaacagaagttaacaatagctgagccagtcggagagtggtgaagatgactgcctttcagtgagtgccaaatcttatcatcagtggtcacgcagaggcataactacccaacaggttcatcttgcctgctgtgcagatannnnnnnnnnnnnnnnnnnnnnnnnnnnnnnnnnnnnnnnnnnnnnnnnnnnnnnnnnnnnnnnnnnnnnnnnnnnnnnnnnnnnnnnnnnnnnnnnnnnc

SEQ ID NO: 59836 - DNA, 574 bp, Homo sapiens
tttttttgtttttttagttggctgacagaatgttggccaaacaacactcacattgttaggggccatgttaggacttccaatcatgcatttgcagaagtctcatctcagaatcatgagtggctttgaacccaaagggctttatttagcttgaccacaatgcctttatttaccagcctgattctgaaagtatagtagttactgtgtcattgtgattgttgctattactgattgaggtcgatgtggttttttgcaatgggtttggtttcagttttttgttgttttttgctgtttctaaaaatcaattccatcttcggtggacggagatttcctgtcactacggcttttcaaaagcatgtactcccgattcttagggtagttcccagcaggcgattacagctggattaagcagtaacacattattatagcaaacaggtagctttgcattatgactgctgtaagctacactgatatgaatctagaaattctattgtttatagagaaaaaaaatcacattacctacagtcacagytcctgtttgcagtgctatatttccttaaattggctgtgccagagt

SEQ ID NO: 59837 - DNA, 517 bp, Homo sapiens
tttaatattatcacatattcagacagtattcacatttcaccagttgcatctkaaatgtttttatatagttgatttgttcaaatcaggatctaaaatatgattcataccttgcaagtggttgctatatcttcagtctcttttaatctataggctccacctctctctctctctctctctctttttttaacttaactcccacctttttcgtttgccctgaaagaattttgacctttagaatttttcaatggattttgctgatggcatcaccatattttgttcctctgaatcttgtcaagtgaaaattaaatccaatttcattctgattggataggaagagggagtacaggattaacttcataggtggttttgtatatttctgtcaggaagctttttatgattttagttgatctttgcctacatttattatttcagtgaaagttttaaattatgataatataatcctgtcattcatttttcatgtatttgctggaatgtctcttcatcaacctattcaatt

SEQ ID NO: 59838 - DNA, 741 bp, Homo sapiens
tcaaagttatgctgtctaataaaatatcacaggacagaaactgcatagcagtacagatctaaggactccaatgttggatcaatagtttttgacactaacttctttacttgagtaatgtagtctgatgttaaggtggactagaggctgggcayagtggctcacgcctgtgatcccaacactttgggaggctgaggcaggaggaacacttgaggccatgagtttaagaccagcttgggcaatgcagcaagaccttctctcaacaaacaattaaaacaaatagccaggcgtggtggcacacatctgtaatcccagctacttgggaggctgaggtgggaggatcgctggagtccaaaaatttgaggctacagtgagttatgatgctgctactgcactccagtctgggtgacagaaccagaccctgtctcaaaaaaacccaaaaacacaaaaaagcaaacgatagactggaagtactagtggtaacaaggaaaacagtataaggaatagcttcagcttgtttgtgattttgttagcaggggagccctgatgaattaactggaaaagttatttttcttactgtttttctttagtcactttatttgtaggcataattacttaaagaaactaggtgccccggcatggcaccagaacttcttgaccccgatcagataccagagggagataagaccccgcaaaccagagcaacaggaaaaggttccccaagttgccttcagtgctaaaatt

SEQ ID NO: 59839 - DNA, 630 bp, Homo sapiens
acccctagtatgacttcaccctaacttaattacatctgcaaagaccctattccaaattaggtgacagtcacaggtaggaggtgggcagagattaggacttcaacctatctttttggggcacacagttcaacccacaacaggctctaaaaggcatttgatttttctgcttggcctcttgtacttgtgccattaccaggaaaagagctcctctgggggaactgttgatcttcagcccaggcccaaggacgaagacccacggagcaggaacttcctcagccagatgggcctgcagcttaaagcaggcctccatgtgacccacaggcmatgagaatacaagattgttgttataatccactatgctttggggtggtttgttgtgaggcatttttgcagcaatacctaatcaatgcagtaagtattcctacaagaggctgggcgcggtgtttcacacttgtagtaccagcactttgggaggccaaggtggatggattgcttgagctcagaagttcaagaccagcctgggcaacatggcaaaccctgtctctactaaaaatacaaaaactagctgggcatggcgtcacacacctttagtcccagctacttgagagccggaagtgggaggatcacctg

SEQ ID NO: 59840 - DNA, 630 bp, Homo sapiens
acccctagtatgacttcaccctaacttaattacatctgcaaagaccctattccaaattaggtgacagtcacaggtaggaggtgggcagagattaggacttcaacctatctttttggggcacacagttcaacccacaacaggctctaaaaggcatttgatttttctgcttggcctcttgtacttgtgccattaccaggaaaagagctcctctgggggaactgttgatcttcagcccaggcccaaggacgaagacccacggagcaggaacttcctcagccagatgggcctgcagcttaaagcaggcctccatgtgacccacaggccwtgagaatacaagattgttgttataatccactatgctttggggtggtttgttgtgaggcatttttgcagcaatacctaatcaatgcagtaagtattcctacaagaggctgggcgcggtgtttcacacttgtagtaccagcactttgggaggccaaggtggatggattgcttgagctcagaagttcaagaccagcctgggcaacatggcaaaccctgtctctactaaaaatacaaaaactagctgggcatggcgtcacacacctttagtcccagctacttgagagccggaagtgggaggatcacctg

SEQ ID NO: 59841 - DNA, 1084 bp, Homo sapiens
agatgggcaaatagggaatatccaacaattagtgagaattaaactcaaggtggacaggggaaactgagcacatttacatgcccagcccaatgggatgttaaacaagcagcagsctgagccctcaagaaaatcctaattggcaggaatagataaaccatgtgtgggctgagttgtcatcagcatctgtgggtctgatttaaaagagtgaagaaaagtttcagagagacagtgacttttggtgtcaggtgaagggataatttagtattagggagttctaacagagtcaatgcaaagaacactaaagcaagcacttgctagtcacttaagtccacgccagatttcattatcctctcctcagagaaaattagtatctccctttatcgtgtacttattgcactttgtttttttgtgtgtttttattattattattattattataagttctgggttacatgtgcagaacgtgcaggtttgttacacaggtatacacttgccatggtgatttgctgcacccgtcaacctgtcatctacattaggtatttcttctaatactatccctcccctagctccccacatcttgataggccccagtgtgtgatattcccctccctgtgaccatgtcctcattgttcaattctcacttatgagtgagaacgtgtggtttctggttttctgttcctgtgttagtttgctgagaatgatggcttccagcttcatccatgcccctgcaaaggacatgaacttatccttttttatagctgcatagtattccatggtgtatatgtgccacattttctatatccagtctataattgatgggcatctgcgttgattacaagtctttgctattgtgaacagtgcttcaataaacatacatgtgcatatgtctttatagtagaataatttataatcctttgggtatatacccagtaatgggattactgggtcaaatggtatttctggttctagatccttgacgatctagatcgccacactgtctttaagtttaaattgcttggacattttttattttccattttaaagtaatagattaccacaaagaaaataaacaaaggcagaaaga

SEQ ID NO: 59842 - DNA, 807 bp, Homo sapiens
ggtttggaaattatgccatattgataaaggataaaggactggcaatctatagtgaaggatggctaagaatcagtggcacacagttaaagtaattaaactgagtgtatgtgtttgaatcaatgatattcagcacttattgttgattttttttttttttttttttttagacggagtctcgctcagtcgcccaggctggagtgcagtggcgcgatctcagctcactgcaagctccacctcctggggtcacgccattctcctgcctcagcctccmgagtagctgggactacaggcgcccgccgctaagcccatctaattttttttgtatttttagtagagacgggggtttcaccgtgttagccagtatggtctcgatctcctgacctcgtgatccaccagtcttggcctcccaaagtgctgggattacaggcatgagccaccgcgcccggcctattgttgattttaatgtcagaaacctaggagaggacttcagcttccagtgctgacatactggcttctattatagcccaatcttctcactgagaaaaaaaaattttaaacaatataacatatataaggaggcagtggtttacccgcaatgggaagcaactaaggtagccaatacttgagagaccgaggtcccagataattgaaacacattcaattaagctagccacctctgttcctttattctcaaaaggcatttgtagattctcaatgtggaacataaagacaaagcagcaacctagatatttcgacagtaatgtcctaaggtaagggagataaaaacagaagttcagggtaacaagg

SEQ ID NO: 59843 - DNA, 807 bp, Homo sapiens
ggtttggaaattatgccatattgataaaggataaaggactggcaatctatagtgaaggatggctaagaatcagtggcacacagttaaagtaattaaactgagtgtatgtgtttgaatcaatgatattcagcacttattgttgattttttttttttttttttttttagacggagtctcgctcagtcgcccaggctggagtgcagtggcgcgatctcagctcactgcaagctccacctcctggggtcacgccattctcctgcctcagcctccagagtagctgggactacaggcgcccgccgctaagcccatctaattttttttgtatttttagtagagacgggggtttcaccgtgttagccagtatggtctcgatctcctgacctcgtgatccrccagtcttggcctcccaaagtgctgggattacaggcatgagccaccgcgcccggcctattgttgattttaatgtcagaaacctaggagaggacttcagcttccagtgctgacatactggcttctattatagcccaatcttctcactgagaaaaaaaaattttaaacaatataacatatataaggaggcagtggtttacccgcaatgggaagcaactaaggtagccaatacttgagagaccgaggtcccagataattgaaacacattcaattaagctagccacctctgttcctttattctcaaaaggcatttgtagattctcaatgtggaacataaagacaaagcagcaacctagatatttcgacagtaatgtcctaaggtaagggagataaaaacagaagttcagggtaacaagg

SEQ ID NO: 59844 - DNA, 807 bp, Homo sapiens
ggtttggaaattatgccatattgataaaggataaaggactggcaatctatagtgaaggatggctaagaatcagtggcacacagttaaagtaattaaactgagtgtatgtgtttgaatcaatgatattcagcacttattgttgattttttttttttttttttttttagacggagtctcgctcagtcgcccaggctggagtgcagtggcgcgatctcagctcactgcaagctccacctcctggggtcacgccattctcctgcctcagcctccagagtagctgggactacaggcgcccgccgctaagcccatctaattttttttgtatttttagtagagacgggggtttcaccgtgttagccagtatggtctcgatctcctgacctcgtgatccaccagtcttggcctcccaaagtgctgggattacaggcatgagccaccgcgcccggcctattgttgattttaatgtcagaaacctaggagaggacttcagcttccagtgctgacatactggcttctattatagcccaatcttctcactgagaaaaaaaaattttaaacaatrtaacatatataaggaggcagtggtttacccgcaatgggaagcaactaaggtagccaatacttgagagaccgaggtcccagataattgaaacacattcaattaagctagccacctctgttcctttattctcaaaaggcatttgtagattctcaatgtggaacataaagacaaagcagcaacctagatatttcgacagtaatgtcctaaggtaagggagataaaaacagaagttcagggtaacaagg

SEQ ID NO: 59845 - DNA, 807 bp, Homo sapiens
ggtttggaaattatgccatattgataaaggataaaggactggcaatctatagtgaaggatggctaagaatcagtggcacacagttaaagtaattaaactgagtgtatgtgtttgaatcaatgatattcagcacttattgttgattttttttttttttttttttttagacggagtctcgctcagtcgcccaggctggagtgcagtggcgcgatctcagctcactgcaagctccacctcctggggtcacgccattctcctgcctcagcctccagagtagctgggactacaggcgcccgccgctaagcccatctaattttttttgtatttttagtagagacgggggtttcaccgtgttagccagtatggtctcgatctcctgacctcgtgatccaccagtcttggcctcccaaagtgctgggattacaggcatgagccaccgcgcccggcctattgttgattttaatgtcagaaacctaggagaggacttcagcttccagtgctgacatactggcttctattatagcccaatcttctcactgagaaaaaaaaattttaaacaatataacatatayaaggaggcagtggtttacccgcaatgggaagcaactaaggtagccaatacttgagagaccgaggtcccagataattgaaacacattcaattaagctagccacctctgttcctttattctcaaaaggcatttgtagattctcaatgtggaacataaagacaaagcagcaacctagatatttcgacagtaatgtcctaaggtaagggagataaaaacagaagttcagggtaacaagg

SEQ ID NO: 59846 - DNA, 690 bp, Homo sapiens
ctagacatatttgatatttttatactaaacgattaaacaataaaagaagaacaatacataggtgcgtaatacttcatattggagtggtgaaggcctttattgtctaagtaacaaaggcagaaaccaaaaggagatatatttgatagatttgatatcatagaaatcagaaacatctatatcaaaagcaccacgcacatttataaaaccaaaggcaaattgattaaaaaaattgtgacatatataacacaaaagactgaattttaaacatgtttataaccctcacaaatgaaaaagaaaaaataaatgacagaaaaagtggacaagcatgtgaacaggtagttgacacaagcaaaaaaggcaaatggtgaacaaatgaatactcataatatcagcttgcaaatttaggcaggtttgctgcttttggtggggtggtgggggtgtggttccatcacaytggtgaagatggaaaggagtaacagtggccacttgctgggcaagacaagaaaacacgtgttcatttgttgttgtaaatgagtaccacttttctgaaaggcaatttggctgtacttgtcaaaaccttggaaaaaggcatactcttcggtggtgtctaaatattgatcaaggtcattcatcacagtactttttaatgtcatgagaaaatgttcaagtttaaaatgtcccaaagcagta

SEQ ID NO: 59847 - DNA, 918 bp, Homo sapiens
tgtggaaatactccttcctacgctcagtctgcttctttgtcaagttcaatagcaaggttcactgaatggcctcattttctataagcaactccatagccccttaaaactcaccagtcagactgggagaatcagaagacatttgaccttttatcacaggatggatccatagactgacatgccaattaagctgggtagagtaggagaattgagtaacttgaacaaatctcacctgttaatgatataccagttttcaaaggttctatagcttctgaaatatcacaggctgaggaaacctttttgagcatctgtttcacaagtggagtcaagtagcctcaaataggatgcaaaccgcttctggggcatggcagggagcagtttacctcctgctttttcatatactttgtcaaagcagttaatcaaaccaccagcctctgtacctcaggggacagtcaaagctcttccggggatacttgaaaagtcaaaattagaaacaatgatagagttaaaatgtggggaaatccttatcccctgccttagacagtcgccacaacatctaaacagtaattttcatcaggcttgagtcagttgagaggattcataacctgggaagattatttataactaaatgccatttggaatggctcatatagattgctgaatattaaagattcacaggtccctaatttaaagttttttgttggtgtcatgaacagtgctttctttcatgaaatgaaaacaaacagaagaatacttccraaatgttttctcagtctctgcctttttctttgcaattttaccatgctccttttcaagtggacagtgtaaataccacatctctcttgtgccaatgagctgccctcctaccagaattctgtgaaaagacagtctctcatgactctagattcttactagcatgca

SEQ ID NO: 59848 - DNA, 734 bp, Homo sapiens
gaaggctaaaggaaagggaaggtaaaactccacatgtcagagagtgaggaaaaatttcccctccccttaaaatttttgttttctcttttttccccagccatgttgtgaggatagccctggtagcagaactattcygagacttctgaggcatcacaggcacctgaagccctaagaaaagatgctcctctctgttaagaagactgagaaaaagagagtccctgatttttttctccatttcttctttcccaccactttgccctaaatgtagttccagtctcatggaattccccaaccgtctaggcggggataaaatccagaaagaaccttatcttttcattcagagagactagaaaagtggcctttgggaactattgtcaaggaaaatctagagaggagaggttgaagaaggctcttccccactttctgtgcatgaacttgcataagtctaagacttccctctgggttgtgcctgggtggagcagagccagcaaagcacagcaaaggctttaggaactggactgtaaaataaaccatagcctaaatcccagtctaacccctcagtggtatatacatatgcaggcagattcaaacagcacagcaaaggctttgaaaactgaactgttgttagaaacaccaatcacaggcagtaaggtggaacttgcactctcagcctaactggattgattgcctattagaacaaaacaaaaatcgacattttctagaagattttagca

SEQ ID NO: 59849 - DNA, 1127 bp, Homo sapiens
cattgttgacatttcccttcattagtaactgaaagctgacattttcaacctatcarctctagtttggtctaatgataagaacacagtatggggagcaaggcaatctgtttcctttcctgctcttattatgaactcactatgaaacattaattgacaaaactacttcacttagcgggtgcctaagtttctcttacaaggagagtaaaagaaaattattgattaaccctaggattcaaagtctgaatgaatgaaagaaggcattaacttgagtcctatgagaccattgattaaagctaagatttgaaatctgaatgaatgaatgaaggcattgatttgagtcctgattttgtctcttattcatcacgatagtcccttcatttctttggttctcactctatttgcaaaattagaaaaccacagtatctactttaacccatttgaagggattattacatagagttaattagataatatagtgagggctttacatacggtgaagtgctaaacagatgttagttttcgtattacatactacataggtttcatgaaatagattctttggccagtttaattgaggggcttctggaataatgagaagttccggcaagatctgtggttgtggttgtggagagctgaagacctagttaactctcctggaacttgtctttagactaaactgatgaacatagattctaatctaatccctcaaatgtttgaaacttcagttttgaaacctcaatcatagagaattatgtggttggaggctgaggtcaaggagcacatcttttggtatttttatgcatcaatttgattttttgaggagaaaaggaggaagatttgtagcaattgcatggagatcatgcaaaatttgtgagaatattgacttgacttgagaagcagggaatgaacaaagttctcccactctaccaaatggatattccaggctctggagttgtcctaatagggatgggagagaataaaagggagaatgaacagtatctaattaaacttagaggtgaaagtggagaaaacccccaaagttatccttctaagcttatattctatattaaattctcagtttgaccagtccatttttctgtgggaaatcaatttcatgctttactgat

SEQ ID NO: 59850 - DNA, 1127 bp, Homo sapiens
cattgttgacatttcccttcattagtaactgaaagctgacattttcaacctatcagctctagtttggtctaatgataagaacacagtatggggagcaaggcaatctgtttcctttcctgctcttattatgaactcactatgaaacattaattgacaaaactacttcacttagcgggtgcctaagtttctcttacaaggagagtaaaagaaaattattgattaaccctaggattcaaagtctgaatgaatgaaagaaggcattaacttgagtcctatgagaccattgattaaagctaagatttgaaatctgaatgaatgaatgaaggcattgatttgagtcctgattttgtctcttattcatcacgatagtcccttcatttctttggttctcactctatttgcaaaattagaaaaccacagtatctactttaacccatttgaagggattattacatagrgttaattagataatatagtgagggctttacatacggtgaagtgctaaacagatgttagttttcgtattacatactacataggtttcatgaaatagattctttggccagtttaattgaggggcttctggaataatgagaagttccggcaagatctgtggttgtggttgtggagagctgaagacctagttaactctcctggaacttgtctttagactaaactgatgaacatagattctaatctaatccctcaaatgtttgaaacttcagttttgaaacctcaatcatagagaattatgtggttggaggctgaggtcaaggagcacatcttttggtatttttatgcatcaatttgattttttgaggagaaaaggaggaagatttgtagcaattgcatggagatcatgcaaaatttgtgagaatattgacttgacttgagaagcagggaatgaacaaagttctcccactctaccaaatggatattccaggctctggagttgtcctaatagggatgggagagaataaaagggagaatgaacagtatctaattaaacttagaggtgaaagtggagaaaacccccaaagttatccttctaagcttatattctatattaaattctcagtttgaccagtccatttttctgtgggaaatcaatttcatgctttactgat

SEQ ID NO: 59851 - DNA, 1127 bp, Homo sapiens
cattgttgacatttcccttcattagtaactgaaagctgacattttcaacctatcagctctagtttggtctaatgataagaacacagtatggggagcaaggcaatctgtttcctttcctgctcttattatgaactcactatgaaacattaattgacaaaactacttcacttagcgggtgcctaagtttctcttacaaggagagtaaaagaaaattattgattaaccctaggattcaaagtctgaatgaatgaaagaaggcattaacttgagtcctatgagaccattgattaaagctaagatttgaaatctgaatgaatgaatgaaggcattgatttgagtcctgattttgtctcttattcatcacgatagtcccttcatttctttggttctcactctatttgcaaaattagaaaaccacagtatctactttaacccatttgaagggattattacatagagttaattagataatatagtgagggctttacatacggtgaagtgctaaacagatgttagttttcgtattacatactacataggtttcatgaaatagattctttggccagtttaattgaggggcttctggaataatgagaagttccggcaagatctgtggttgtggttgtggagagctgaagacctagttaactctcctggaacttgtctttagactaaactgatgaacatagattctaatctaatccctcaaatgtttgaaacttcagttttgaaacctcaatcatagagaattatgtggttggaggctgaggtcaaggagcacatcttttggtatttttatgcatcaatttgattttttgaggagaaaaggaggaagatttgtagcaattgcatggagatcatgcaaaatttgtgagaatattgacttgacttgagaagcagggaatgaacaaagttctcccactctaccaaatggatattccaggctctggagktgtcctaatagggatgggagagaataaaagggagaatgaacagtatctaattaaacttagaggtgaaagtggagaaaacccccaaagttatccttctaagcttatattctatattaaattctcagtttgaccagtccatttttctgtgggaaatcaatttcatgctttactgat

SEQ ID NO: 59852 - DNA, 1478 bp, Homo sapiens
ggaagcatttctcagcttccccttcagaacaaaggagtgagaaccaaaacctctgagctggataaacccacttcccatctctgcattagccctgctttaaaacgccacagttcacagaacagcattgtctaaagtctctgaaatctagtgcatctcccatcacgattgcaagcaattccgccctgattgctgtaacctagatgaccatgcgttttcctgtacagggagaaactaatgagatggagagcttcctcggatgggaacctgctggcccactgcctaatgcaccatgccagggacctctgggagcccacctcacagattgcctatgtgcctggttgcagcagaacgtgctgatgtgtctattgattgcaataggatgcaagtggactgtaaaatagaacagcaggtgaaaggagagcctaccaaggagcgactaaacgttcctcccagcatgctagatattagccttatcaccggactggcctcttctcgatcacagggcatttatctacccagagcatcattaggaacacacagctatggaactgggaggggaaaaccccagtctggtatgcagcagctttctgttcacaaagtttcaggcctggaaatctgtgtcagggagcagagccttatgctttattatttgtaatggtgartccagcagcagctggtcagcattgctgctagtgttctaaggtgagtgtgcaggttggtggggagtgctggggacaggctcttcactgaacttgttcatttaagttaaaaggggagacgataaaatagacaggaaataagacactgatgatttgtttctctgtgagatccaaatgctgacccaaggaaaagtagaggaacaagggcttagacagaacaccatgaggtctccagaaaggactcgaagctttcagaagtgaacacccagctggcccttctatgcaccctgtcggcttccctgacagaggcaggcaggatgccagctttgacagagggtcgtccctgtgatagatgactcaatcacagccgctttccttcccgcctgattcggcatgctttctcatccagtctctcagctggaatcatcatgggctggccgcattaaatagaacaaacaggaaaaaagaaacgttctgctttgccctgaatcactaactctttcctaaggaagagccaccaacaccactttctgcattctgtttgctaatgtcccaggagactcatgtgaatcgcaagcctgacacatgtctttcccacatttctctctactgggttatgaggcaaatgaaatgctggagagagtaagcgttacagaatctgtggccgggttctatctgcaagaactgtcactttgacctggcaatagagtccacttggtatgtgggcttaactgactttccccagatcacagtgtctcctggagagacaagcctgtgtctccgctctcagctctgcatctttggtcactgctctggatc

SEQ ID NO: 59853 - DNA, 1295 bp, Homo sapiens
taaagcaaggagaaaaccatataacttttttctccaatcttattgaaggcttattcagtattttaaatactaagttctgcattttataacttagagtaatgaggtttcttatataaaacttcatatcatatgccaaccccaacctctgtaaactttattctgatagtattcctgcaaatacatacatacacaacatatttacacatgcacatttttgtttaaggctagctattcccccccccacacacacacacatttgcctgcgtgagtaaccagactagatctcttttacaattttcacattccccatatctgatcagaggttcttcccaaatgtatgcacatgacacgcacacacacacacacacacacacacatgcatacacttggacatgcacacacacacatccctatctccatttcagaaatgttctttgctttgttgggagcaggaagccactgtttgttctgagtgcagaccatggtctctcttgttctgaattctggtgagttgtcaccatgaatgaatgaatttcctgtggggaagacaggatcatcttcctatctgtttctcacgcctcctgtgtctctgctgttgccagtgttagaaaccttaaccccttggagtctgttcatctctcttgctggttctgctccctggtatgcgtgcagctagtgactgtgcaggcatcaggtgacctctccgcctactttaggcaaaagccagagaataaaagagaggatccttcaagacatgtacaacccaattatagaggtattacataaggttgtacacgagaaggaacaaaacaccttcagctgccatgttgccttccctgccagaccataggcttctgtgagcagaaccccgaaaggctggacacagagaaagtatgagtgactgtttcaggagaggtggaagaataattacaaaggaacatgtaagctgctgcaaaataactgagtgcatacgargggaatttctgtgtactgccctccttctgttgatttcttctacattggaagaagagacttgaatctgaagccatacaaatatgtataatatattcactaaggatgtgagtgaaggtcactacacctgtttgaaatgacagaaatgtgtctacatttagcctacccaattaatccttttgtattaaatacttggtaattcagcctaatccattatgtccctttaaaaagacaaaaaaagcaaaagtcgttttcactcaaatatcgatgaaatacaaatcaggcttcagagacaattctttatgtgctataagtcatctgac

SEQ ID NO: 59854 - DNA, 1182 bp, Homo sapiens
ctgctcgtgagaggcaaggagctgagtaaccctatacataatgcctttgattatatgtggaaaaccaaggaacataatgcagctggttgggtgctcctaagttcagtggacaaagtgatgaaagaaaatgatgaactcagggattctgtctcctagcttcagaagcagataccgaacctcaaatatgctaagactgccctgagagagagttttatctcctgtagagaaagtgctgaaattgtggaaaaacagacacaagctcttatcatgcgagtggctgacctgcaatgaaagatggctgcacagcctcaccaggtgtctactgttaaagtgagggcattgattggaaaagagtgagaccctgaaacttggaatgggggcgtgtgggaagaccctgatgaagctggggacactgagtttgtaaackctgatgaaccttttttttttgccagaaggaacagctttttttacttgtatctgattaaaacgtcattattttttggaaccaatatagaaaaactagaaaatatggatgataatatgtaaacatcacttataatcctactaagcagagataaatttgtctctgtgattccatgtttcacatctataattacagaattgtatgtaattattgtcttagtctctgagtggatgctatggtatgccacccagataccctcttcagccctgagacattcattcctcagctactgggagtgttggacctactagccctcagctgagtggttggttctttgggaattatcctcaattgaagggatttccttggctgaatcttcaacacttccctctgcccaatccttcttcttttattcccctaaaggtgttaattccaaaggcacatctcaaaagacttcctgtaagagaatctctgtctcagtctgttccccaggaaacttcatctaacacactcttcaagtgatttatttaatctgttttcctccacttgaaaatatttattattagcagagcagaatttcaaattatgtgtaaaatgttttcagtgactccatggtcttttattccatgagcacactattctatattattgaaaagttacgaaaggaatttagggttagaaatacaggagaactgtgggaaacaaagactgacgttaaggctggaacatgaaacagtcaactataggaaaggcatgca

SEQ ID NO: 59855 - DNA, 824 bp, Homo sapiens
agccagtcgaggcagcactaaactgcaacctctctttctcgctttccctaccctggtccacaacagctttcaaatctttccaaatcctcaccccaggacacgctaggcagccctttcctgcctgctacgaagctgctttcctaggaagggggcttttgaattcaagtgcagaaaaatcttcatattaaaaaaaaaaaaagccttcaaccggttgctagggttttgtgtatcctgctttagggagctttctccaatgaaagagactcgtcgctatagaaactgccacgtcacaggacttctgtacagcagcgtctgagacttaggctgcctcttccaggacaggttttatatcagagcccctctcacagaagtgtgtgcctgggactggggagggagaggaccctggaattgtcagtggctttaaatatccctccctccctttctttcctgctccccacttctctctccctcctgcccccctccatctcttctttctcctccctcttcattgcaaacagaatgcaaaagcaattgcagtaatacagagcatttmtctgtatgtccacacttcttcttagccatggaaagatgacgttgctaccacacccatgcacatacacatgcacacactcagttctggtaagataaatggcagcttggaagggactcatttgatgcaacactcaataattccatgtttatgaggactcaaggctaactcaaaccacttgagtcaagcccctgagtcaaagcccttgagtcaagccaagggaagttcacactgaggcagttggaggtgtgggggaccttcttcctctattaaa

SEQ ID NO: 59856 - DNA, 1407 bp, Homo sapiens
attttcttgccttttccagcttttagagaccacccacattccttggcccatggccctctccttccatcttcacatctctctctcaccactgcgtccatcatcacagctcatctgtgactctgacactccagtctccctattataaggacccttgtgattatactgggcccattcatgtaattcagagtcacctccccagctcaaaatccttaatcacatctgcaaagtcccttttgtcagctagagtaacatattcacatatctcagggattagaatgtgaacattgcagagggtgagggygtcattccatctaccactccacccgtctgctttcttcctatcagcctcaaaaagtgccctccagatcctccactctccaaggcacctggtgacagaatacactcactggctcctggaggcatcctccttctgagctttcctagtgctcccagctggatgaaactacttgtttgtccatactcctttgtgcaacctggactgttcagggcatccctttctgctgttggacactttatttgtacgcacatacgttactttcctgataacctgagccaagaaccaactttgtgccctcctagggcctagaatgatgtgaggcagattgctgctgctcaattattgctgttagtgcttagcaggacacacaagacccgtctccctgagcctggtgccatccagatgttcctgtcagagtccaaagacagtactcctcattgccaccccagagcacttctgctagtgagtgacatcttccattcctgtgagcggggaggactccacaactgctgcccatttagactacttcatccccagggactgctggtagcctgggaagggagcctgcatttacgtctgcagcttcccaccttctgcaagtaagcttgttattgttttgctgtttgctgtggcagtggctgctgttctgcagtgccagctgagaagcttttctccaagcagccttggttatttccactataattcttttcccctcaggatgccatcctctacatgtgtcggtatgactcacttggtacttgtacttggtaaaagccagagtttaatgaaaagacatcggtcgagaactttgcagtctcatttgcagccacatcctgggtaggacttgccttaactcaggtggaatctttcctccccagcagtcaagagatgcagaagtaacaactacctaactgccaagtactaggcaaaacttggggctggggttgaagtgcattaaagggcaggcatgtgagagaataaaaatatgaaatcaaagtttctgctcttacagatttcaaaatcaattgggaagaaatgtaagttactaagtaattgcaaaattttgtaaaatcttctagcagcaaaatgtagagctggggaaaaaatgt

SEQ ID NO: 59857 - DNA, 490 bp, Homo sapiens
ctaagccccaccaacatattatctaatcttaataaaatttggtcagcagagatgtaaaaaatgcagagaaaacaaaataaaagtaaaaaagaaaatgtgaaggcaaagatgatgaaaaaaatagaagataaaggcctgaaatatgcctgaaaagtgcaaaaagtgtgcatttctaattatcagcttctgtgtacttttgaactgcggaagttttgaactgaatgagttcaaaaggtggccaagactgatgaagtgtctctgttaatagaaaaatttaaactgagtcttctcaagagaggcatacttagaagctctaatgagctcctcagtggaagaaaaatccgaacctaatcttttggttcaataagttaattctcttagtgaaagatgagtcgagtgagccaatctttatgaacactgaaagcaaaacggcagagaattraagctctgagccactacacttcaggcctttcctctcttttttttttca

SEQ ID NO: 59858 - DNA, 344 bp, Homo sapiens
gattgtgtgtgtgtgtgtttgtgtattcttcagatatattgatgtatatatatatatatcatattctgattgaaccagtttaacattttactggtttccttattaatgaatgaactaaattacactagtgatgtgcattcatttcatatttgtggtagagtcataattttaacttttgaaaattatagtttaacagcatttagaataaaacctggacttcccatactttattcacrttccacaatttaaagccctataaaatctaggatttgttcccttcccgacctcatctactattccacctcaccttgctcactctgctcttgctccccttcccctctctc

SEQ ID NO: 59859 - DNA, 599 bp, Homo sapiens
tttagaggttggtaggttagctagtcctgggtacttgcaactaacaagattagaatgtgtgtttarttgtatttcccacgtctctgcagaaaaacttctttcaagggaaatgtgatgacctcaatcttaaagcaatcactttctttagaaaatattattatcgaattagtcaggcctcattcccatggcactcaataggagggcaggatctttcacacttgaatagtgtgtaatggggtctccacaggacaaaaggagtttattaccagaagaatgttaaagagaaggtatgctggataaagaaaacctgtaaatagcatatagtcctttacatgtattcctggtgagaaaggatgaaggtttgaaataagggataatataaacaggggaagaggtgctcaacatcttagtcactaggttaaagccaatcggtaaagtacaatgagatccatgccacacactcactagaatggttaaaataaaaaagctgcaaataacaagcattagctaggacgtagagaaactggaggctcatgcattgctggcaggaagaaatggtacagccattttagaaaagagtttgtcagtttcttaaaaaa

SEQ ID NO: 59860 - DNA, 629 bp, Homo sapiens
gtccccacccaatctccctttaatgttataatccccagggtcaagggtggggccagtggagataattgaataatggaggcagtttccccccatgtggttctgttcgtagtgaataagtttcaggagatctgatggttttataaatgagagttaccctgcacaagctctcttgcctgctgccatgtaagatgtgactttctcttcttttgccttctgccatgattgtgaggtctccctggccacgtggaactggcagtccattaaatctctttttctttataaattacccagtctcaagtctgtctttactagcagtgtgagaactgactaatacaacacccagtaatctcttttgccatttcaaatcatttacattttttttcctacagagcaatggaaaaacttttggagacttttaatcaggagagtaatatgacctgatttacattttgaaaacatcacctttactgtacagttgatctttgtatagcataggtttgaactgtgcaggttcayttatatgtggatttttttcaataaacctattggaaaaatttttggagatttttgacaattagagaaaacttgcagatgaactgcatggcctataaatatcaaaaaaataagaa

SEQ ID NO: 59861 - DNA, 721 bp, Homo sapiens
attaggaagatactagtggtagggggtctcttagcagaggggagtgcaacggtgagagtatgatgagggtagatacaaggaagggcagttgttcaccacagtagtggacatgtagctgaatccagagctgatgtgagaggccagggcttcaaagggccaaggagataaaagaagggaatgtggctccagtgcagaagacagggaggggtctgagagtgttgtgaggacaggctgtgtgcatgagaaaccatctgtataggacccccagcaaggtcacaaagaggacagttctatctcaaggactgagttctttcctggaagcatagctaggacttttgttatagaagcaagtcaaggaagagaaaaattttaaagagyagataaaggaaatggccctagaaaagtgactcccaggcccacatcaaatactacttccattaaaaaccttccttgattaatccagcgcagccacttacatggcatttagctttcactgtcttctattttgaataatttgtgttcagtacttatttggactactgaattatacactgaagttttctccaacaggatggttttgcccaattttgtgacatcaatggggaaaaaaaagctagactgattaaatcatgcctcaaatgcctttttgaatgattagaagttgatatacctttgactccttctgggcctcaaactgtaatttccttaaacagttcacaat

SEQ ID NO: 59862 - DNA, 653 bp, Homo sapiens
tgatatgcctagtttcaagaagttgggcaagctagaagttggattatgacttcatcacctatgactcacatggaatgcacaattttgatccaaaacttttgttctaataagatttcaacttccaaacattggtagcaatgagagccaagagcaggaatgtgacagtgtgccaggttgatcacagtgtttagggttttgtttttttttttttgtgaaatgaagtctcactccattgcccaggctggagtggagttgtgcaatctcgtctcactgcaacctccacctcctgggttcaagagattctcctgcctcagcctcttgagtagctgggactacaggcacgtgccaccacacccagctaattttttgtatttttagtagagaaggagtttcactgtgttagccaggatggtctcaatctcctgacctcgtgatccatccgcctcggccttccaaaatgttgggattacaggcatgagccactgcacctggcctatgctttctttttaacaaaagttgttttcaacaaaatttgactttgctcaagaatggcactagtttttagaaaaattttggagtggtgaagtcaaggaattttcaactgaagtagatcatgtgctcattgacagcagcaaaatggcatccrtggggga

SEQ ID NO: 59863 - DNA, 1430 bp, Homo sapiens
tcctacctcagcctcccaaaaagctgggattacaggcgtgcaccactatgcttggctaatttttgtatttttagtacagatggtgtttcaccatgttggccaggctggtctcgaactcctgacatcaggtgatctgcctgcctcagcctcccaaagtgctaggattacaggcgtcagccaccacgcccggcctctagccccttttctattctggcgacacatattagttgtgggttggatacccagaggcccaggagagccagtggtatagttctagtctgaaccagaaggcctgagaaccaggaaagctgatgatgtaagttccagcccaagcctaaaacatcaggtgaagactgatgtcccagctcaaagacagtcagatagagggtgcaaattctccctaactcaacctttttgttctattcaggttttcaatggattggacgacgcccatccaccgtggggagggaaaactgttctactccgtctgctgattcaaattttaagctcatctacaaacacttcaaagatactcccagaataatgtttaaccaaatatctgggtccaccatgacctagtcaagttgatacatgaattaaccatcacaggacaattttctgcctccaaatcattctgaagtttggaacgtttttcacagaactggtttgttctcttttttgagttctctgttcaaatgtcaacacctcagactgacctttccaaactgcactgactcagaaggcctcccccagagttaccacattctctcatatcttactgagtttcgtttataacacttatcccaatatgtaattatcttatttacatcttacttgtttttaatgtctctctctcctattagaacatattagggtggaaaacgtgtatgccttgtactttaatagaatccaccaaaaatatacttgcggtaaataaatattatttatttcttttttttttttttcagatggagtctcattctgtcgcccacgctggagtgcagtggtgtaatctctgctcactgcaacctccacgtcctgggttcaagcaattctcctgcctcagcctccccagtagctgggattacaggcacataacaccatgcccggatagttttttgtatttttttagtagagaccgggtttcaccatgctggccaggcaggtctcgaactcctgaccttgtgatcygcctgcctcggcctcccaaagtgctgggattacaggtgtgagccaccccgcctggccaacaaatattatttcaacatcagtggaaaaattgacacctgaatgatgtcagatttaaaagactgttataaacaaattttccttaccaaattccaaacactatatgtagataagccctcctgtaggaaggctaatctccccctttcctaatctccccctttttgctggtgggctagacatag

SEQ ID NO: 59864 - DNA, 666 bp, Homo sapiens
tcagcctgtgcttgggagtgagcatggccactcagaaccaggcagctgctttcgtgtgaacagttgattcgggggctatccagtgaggtgagggacgggatgtgtggcaagaaggtctaagcactgcacacgaggggacagccagcctcgctcttgcgtcctagaggtttccaggttcatgctcactccctgatggcagaggacaggttgccagcctggctctacatggcagaaagccacttccctgcaagcgttaagtccttctgtcttactctattgcttttctccaaaaataaagcatttttgagagctaaatccggggattgactttcagattaacaatctgcgyggcctttcctcctttccaatccttagtcatgtttatctttggggaacctagaatgtaccaggaaacacacaacacagcttagaaagagaaagtgggggctctctggaactccagacaaggagagagtcctgcggctctgggaaacagacaagcagacaaaatgcagagaaggattttgctttggaaaaaagagaaattcaacagacattagtaggacccaaaagggagagatgcagggaggaatgcaagggtctttcttgttagctgctggggcagaacggcctgtgtgcaaccccccatcgctccacattcaggga

SEQ ID NO: 59865 - DNA, 1061 bp, Homo sapiens
tctgagaatgtctggatctacatgtcaagggcatctaagttagtcctgagaacagctggagcccaaaggccagctcctctctgtgcaccaaatttacataagctttgaagatatttttagctttctgcactcctcttaatatgctcctgcttctctgtctcacaaagagggaatgctgcaagcttaggattctgatcttttggtcttcagaagttctgatgttgttttctttttcagatcttctagggataagcaaaagcagaaactgatgaagcagccataagcctgttgtacataaagcccctatacatgggtgccaggggagggtgggtcaactcctttctggggctgtctgctcacatgtggttgctcattttaaaatgagattagctgagaagatatacattcaagacgctggcatagtgctctgcatataggaccttaacaaatgtattgtttttttttctctctccttttacccctcccatgttaaaatggtctctgaatcaaggttatggtgaagaccacaggaattttgggaagacaaacatccactaacattcattattcatttattttattcaacaagcaattattgagcagcacagcatgccgggcattgagttaggtgaaatccaaaatgatttwaaaaaaaaaaaaaaaaagacctagtcactgtcaatagtctagaagtctaaactctgtgtgtggggggtgcatctgtgtctgctgggaggtacaggggccttgtgcaggctgctacctcattatggtgtgaacccagaaaatctgagccaggtctcagttaatttagaaagtttattttgccaaggttgaggatgcacctgtgacacagcctcaggaagtcctgacaacatgtgcccaaggtggtcagggcacagtttggttttatacattttagggggacatgagacatcaatcaatatatgtaataattacattggttctgtctggaaaggcaggactacttgaagcaagactggaagactcaagccggggagggagcttcccagtcacagataggtgagacggttgcatgc

SEQ ID NO: 59866 - DNA, 898 bp, Homo sapiens
attgctggtgagctagtatgatttttttggtggtgttaaagagtcttgttttgtcatattaccagagttggctttctggttccttctcatttgggtaggctctgtcagagggaaagtctagggctgaaggctattgttcagattcttttgtcccacagggtgttgcttgatgtagtactctccgccttttcctatggatatggcttcctgagagctgagctgtagtgattgttatttctcttctgggtctagccacctagcaagtctatcaggctctgggctggtactgggggttgtctgcacagagtcctgtgatgtgaaccatctatgggtctctcagccaytgataccagcacagtatctggggtgtctccccggtctggcaggagcagtctgcttccttcagagggtctgtgggtcctctcaggattcctgatttattcctgcagtcgttctggagctaaaattcaccatgcgggcctctgcacacttctctgtctgtccaagtcagagctgcaatctagtcctgcctcctgtctgccatgatatgcaattctggtggaagaaattctcctctggagaactgacgtcactaggtgttctcctgagagttgtgccagtctggggcctgggaagtccaagggcatggcttctgctcagcactggtgagggcctccttgacaatcacaaggttccacaataggccatctgcaagctgaggagcaaggaagccagtttgagtcccagagctgaagaacttggagtctgatgttcaagggcaggaagcatccagcacaggaggaagatgtaggctggatagctaagtgagtctactattcaagccttttgtctgaattttaaattggcttgtttgtcatttaatttttgagttgtgaaa

SEQ ID NO: 59867 - DNA, 898 bp, Homo sapiens
attgctggtgagctagtatgatttttttggtggtgttaaagagtcttgttttgtcatattaccagagttggctttctggttccttctcatttgggtaggctctgtcagagggaaagtctagggctgaaggctattgttcagattcttttgtcccacagggtgttgcttgatgtagtactctccgccttttcctatggatatggcttcctgagagctgagctgtagtgattgttatttctcttctgggtctagccacctagcaagtctatcaggctctgggctggtactgggggttgtctgcacagagtcctgtgatgtgaaccatctatgggtctctcagccattgataccagcacagtatctggggtgtctccccggtctggcaggagcagtctgcttccttcagagggtctgtgggtcctctcaggattcctgatttattcctgcagtcgttctggagctaaaattcaccatgcgggcctctgcacacttctctgtctgtccaagtcagagctgcaatctagtcctgcctcctgtctgccatgatatgcaattctggtggaagaaattctyctctggagaactgacgtcactaggtgttctcctgagagttgtgccagtctggggcctgggaagtccaagggcatggcttctgctcagcactggtgagggcctccttgacaatcacaaggttccacaataggccatctgcaagctgaggagcaaggaagccagtttgagtcccagagctgaagaacttggagtctgatgttcaagggcaggaagcatccagcacaggaggaagatgtaggctggatagctaagtgagtctactattcaagccttttgtctgaattttaaattggcttgtttgtcatttaatttttgagttgtgaaa

SEQ ID NO: 59868 - DNA, 413 bp, Homo sapiens
tagtccttgcttggtgtaaatttccacttggcagtgggttttgctcagagggtgtcctcttcagccttcgtgggccctgcctgaccccagcactctgaaggaggatgggatatgtatctctggctcctaaggattcttctttctgggcttcaggtcaattgcactgactttgaagagagctttgttctgagcagtctctaaaaacatctgaagacttgctgtgacgtattactttctttcctatccaaattgactaaagcatatataagaaaagcaatgatctctttttctttttcctttcttttcttttcttctycttcttcttctccttcttcttcttcttcttcttcttcttcttcttcttcttcttcttcttcttcttcttcttctttttttttgagtctccctctgcc

SEQ ID NO: 59869 - DNA, 1020 bp, Homo sapiens
tccatccaggccatcygggagggcaaacctcgctgccaggtcacctccttagcttttgtgtgacatatattttgaatggcttcagtgtcctctcactctagattaactcttagttgggtatgtaggggaagcatgataattctctgactatgagggggttatataattggatcataatgctctggggcatcagggggatcctagtaccttcccaggccgggcttccctggtagggattttagccctgggcacacggcaggcatcaaagcggaagacaatgcagagagtgaaaggttggcagctgctgttaggattttggctgcttaaggtaaccagaatcactgggttttgactgtcacagatctttggggtcacatatggttacagaatttcccccattttagaggaatgtgaaatgctgctctaagtagctaaatactgtttaaaaaactgaaaaccaaatggtgacaataattttaattactgacctctgaaatttcaagctcatttatactcaatctcaatttgtttttaatagattatttattaaatgtactttcaaattaaatacacagaaatataagctcgttagagcatgagcttagaacaaactagtatcaaattaatttccagttcaacaactcacttgaagtattgcttatgagggaggaggggggtggatttcagctctcataaactgttgcttaaagtaaacaatctcacttctctcagtcattagtagagttaacaactgatttccagctttaacaccacttttgtatcaccttcagacagttgactaacaagtccgttgttcattcctgacagtgattaacttcttagattactgaccataattatgagaactccaaattctagattttccaaggcaatgacaatttcgtgaaatttaatttttttcaatatgtctcattaagtgtttaaacaaatgtgattgagtttttataacataagtcaatacacagataatttcgcaactcagcaagacatggttgtcac

SEQ ID NO: 59870 - DNA, 1020 bp, Homo sapiens
tccatccaggccatctgggagggcaaacctcgctgccaggtcacctccttagcttttgtgtgacatatattttgaatggcttcagtgtcctctcactctagattaactcttagttgggtatgtaggggaagcatgataattctctgactatgagggggttatataattggatcataatgctctggggcatcagggggatcctagtaccttcccaggccgggcttccctggtagggattttagccctgggcacacggcaggcatcaaagcggaagacaatgcagagagtgaaaggttggcagctgctgttaggattttggctgcttaaggtaaccagaatcactgggttttgactgtcacagatctttggggtcacatatggttacagaatttcccccattttagaggaatgtgaaatgctgctctaagtagctaaatactgtttaaaaaactgaaaaccaaatggtgacaataattttaattactgacctctgaaatttcaagctcatttatactcaatctcaatttgtttttaatagattatttattaaatgtactttcaaattaaatacacagaaatataagctcgttagagcatgagcttagaacaaactagtatcaaattaatttccagttcaacaactcasttgaagtattgcttatgagggaggaggggggtggatttcagctctcataaactgttgcttaaagtaaacaatctcacttctctcagtcattagtagagttaacaactgatttccagctttaacaccacttttgtatcaccttcagacagttgactaacaagtccgttgttcattcctgacagtgattaacttcttagattactgaccataattatgagaactccaaattctagattttccaaggcaatgacaatttcgtgaaatttaatttttttcaatatgtctcattaagtgtttaaacaaatgtgattgagtttttataacataagtcaatacacagataatttcgcaactcagcaagacatggttgtcac

SEQ ID NO: 59871 - DNA, 1175 bp, Homo sapiens
taactatttaaactgtacatctgtaagaacaatggagcacgtacattccatttttcttttgttattctccatttactaaaagattcaaaatgatcaaaacaacttttgttttcccctggaataaaaaaagcttcctttgcccagctctttctcatttagtttcacaaactatattaaakaaaactgctgatacagcattttggaagctgtaggggacaacaaagtttcctgcaaaataacttcttaatatactgcttcactataagtcacaaatacacagaattttgggtccaatcatgtgacacactgagacatgctgttatgattgtcttttgggactgttcagatgagcctatctgttcatgagcgaagagttcacagacagccttttggactgctgcagactcagtggaggtctctataagaacaggagggctgacttgtcaactggctgaaatgtatgagcaggtggaaactgatgggtttccacctttgcagctctccagctggcatgagactcagtcttaaggctttgggcgttttctcccctttcaaatgactagatacagtttgcaagtcttggatgaggacttacataccatttcaggcaggtttctttttttttgttttttgttttttttgagacggagtctcgttttatcaccaggctggagtgcagtggcgcgagatctcggctcactgcaacctccacctcccggtttaagtgattctcctgccccagcctcccgcgtagctgagactacaggcatgtgccaccacacccaggtaatttttgtatttttagtagagatggggtttcaccatattggccaggatggtctccatctcttgaccttgtgatccgcccgcctcgacctcccaaaggcatgagccatcatgcccggcctcaggctgtttttaatgtgtcatgattgccttcctagtataagatctatcaagtttcagtagcacaattttaagaacaaaaaaatagggcctcagatacaggggaaaagttgtaaacctgataaacgattacttccactgacagtaaagccccacgcccacttctctcagactgaatcgcaagggtagatttagtaggtcagcttacgttgcattcttcaaacgtttctaccaacacaggtaaaacagtcatttctcttaaacttcaa

SEQ ID NO: 59872 - DNA, 1792 bp, Homo sapiens
atctatttcccacttattgccatgggtcaaaactgaaaggaacaacgaggaactgcataaatcaggattctgtttgcctctagtgtggagaataatcaccttagtcattttatgtgtatcagttcatactattccatgcgtaaaggtgcatgaaatattcaataatgcgagtgaacgatcaaacycatttatattcattagtgccacataccacccgcaaatagtctatagactagaagcaaagtgaacctcgaattcattttctaattgcccttcttgccctggactgcaagtggtatttattagccactgctcattaagcatccacatggtctatgatgtgggaggacatgtgacaactggtgagtctttaaatctttataatgacactatgagttggtatatggccattttatagatataggaattgaggctcagaagtgttaagaaatgtgttcaaggccacacactcttacagcggcaatgggcttgggttgtcacatgctaacatatcttacacccagcccttggccacatgcatgttggataggaaagcatacctttctcccttcctgtcccagaaaattcttggttgattattttaaggaatgtatttacctaactgattaactgaacctcatgtacaaaaatattcaagtggagagaggtgccttttcagctgggctaactgatggggtctttcttactcacttctgaggccagttcctggatccgaaagactttcagtcagtatctgcagaatgtctgggctgatacatttctcagtaataaaatgtggacaagaggaccaatctaccttcaaaatatatctccagcagtagtacagcaacagtggttaaaacaaatctcattctgccattttcttcttttatgactttgaacatgaaatccgacctcatgctggagtttcctcatataaaatgagaatgatagtgcctgcctcacagggacactatatgggaagttaatatatgctatagatgataaacatgccaaacccatattatgtactcagcaaatggaagcaattattattattaataagtccgctggcttccattcgtctcacctaccatttctccggtcccagccaccatttcccctcacctaaccttccataatagattagccagactcctgttttcactcttgaaacatttaggtctgtttttcatacaccagccagtgtgaagtttttaaaacgaaaacggatcatgtcacttctccacttaaaacactgcactgctccttacagaacccagagcagaattctaattccttagcgcacggccaggcgccggtggctcacacgggaatcctagcactttgggaggctgaggcgggcgggtcacttgaggtcaggagttcgagaccagcctggccaacatggtgaaactccatctctactaacaatacaaaaattagccgggtatggtggcacgtgcctgtaatcccagctactcaggaaactgaggcaggagatttgtgtgaatccgagaggcagagattgtagtgagccgagatcgcaccagtgcactccagcctgggccacagagtgggactccgtctcgaaaaaaaacccaaaaagcaaaaaacacattccttagtggggaccaggcccaccccctctacctgctcaattcatcccacttaggctctgtggcctcgctttggtttcccaagtccaccacccttcttatcttggtctggaacattcttcccactttctctgcctcgccaactcttagtaactcccatccaaaatgacagt

SEQ ID NO: 59873 - DNA, 1792 bp, Homo sapiens
atctatttcccacttattgccatgggtcaaaactgaaaggaacaacgaggaactgcataaatcaggattctgtttgcctctagtgtggagaataatcaccttagtcattttatgtgtatcagttcatactattccatgcgtaaaggtgcatgaaatattcaataatgcgagtgaacgatcaaacccatttatattcattagtgccacataccacccgcaaatagtctatagactagaagcaaagtgaacctcgaattcattttctaattgcccttcttgccctggactgcaagtggtatttattagccactgctcattaagcatccacatggtctatgatgtgggaggacaygtgacaactggtgagtctttaaatctttataatgacactatgagttggtatatggccattttatagatataggaattgaggctcagaagtgttaagaaatgtgttcaaggccacacactcttacagcggcaatgggcttgggttgtcacatgctaacatatcttacacccagcccttggccacatgcatgttggataggaaagcatacctttctcccttcctgtcccagaaaattcttggttgattattttaaggaatgtatttacctaactgattaactgaacctcatgtacaaaaatattcaagtggagagaggtgccttttcagctgggctaactgatggggtctttcttactcacttctgaggccagttcctggatccgaaagactttcagtcagtatctgcagaatgtctgggctgatacatttctcagtaataaaatgtggacaagaggaccaatctaccttcaaaatatatctccagcagtagtacagcaacagtggttaaaacaaatctcattctgccattttcttcttttatgactttgaacatgaaatccgacctcatgctggagtttcctcatataaaatgagaatgatagtgcctgcctcacagggacactatatgggaagttaatatatgctatagatgataaacatgccaaacccatattatgtactcagcaaatggaagcaattattattattaataagtccgctggcttccattcgtctcacctaccatttctccggtcccagccaccatttcccctcacctaaccttccataatagattagccagactcctgttttcactcttgaaacatttaggtctgtttttcatacaccagccagtgtgaagtttttaaaacgaaaacggatcatgtcacttctccacttaaaacactgcactgctccttacagaacccagagcagaattctaattccttagcgcacggccaggcgccggtggctcacacgggaatcctagcactttgggaggctgaggcgggcgggtcacttgaggtcaggagttcgagaccagcctggccaacatggtgaaactccatctctactaacaatacaaaaattagccgggtatggtggcacgtgcctgtaatcccagctactcaggaaactgaggcaggagatttgtgtgaatccgagaggcagagattgtagtgagccgagatcgcaccagtgcactccagcctgggccacagagtgggactccgtctcgaaaaaaaacccaaaaagcaaaaaacacattccttagtggggaccaggcccaccccctctacctgctcaattcatcccacttaggctctgtggcctcgctttggtttcccaagtccaccacccttcttatcttggtctggaacattcttcccactttctctgcctcgccaactcttagtaactcccatccaaaatgacagt

SEQ ID NO: 59874 - DNA, 1792 bp, Homo sapiens
atctatttcccacttattgccatgggtcaaaactgaaaggaacaacgaggaactgcataaatcaggattctgtttgcctctagtgtggagaataatcaccttagtcattttatgtgtatcagttcatactattccatgcgtaaaggtgcatgaaatattcaataatgcgagtgaacgatcaaacccatttatattcattagtgccacataccacccgcaaatagtctatagactagaagcaaagtgaacctcgaattcattttctaattgcccttcttgccctggactgcaagtggtatttattagccactgctcattaagcatccacatggtctatgatgtgggaggacatgtgacaactggtgagtctttaaatctttataatgacactatgagttggtatatggccattttatagatataggaattgaggctcagaagtgttaagaaatgtgttcaaggccacacactcttacagcggcaatgggcttgggttgtcacatgctaacatatcttacacccagcccttggycacatgcatgttggataggaaagcatacctttctcccttcctgtcccagaaaattcttggttgattattttaaggaatgtatttacctaactgattaactgaacctcatgtacaaaaatattcaagtggagagaggtgccttttcagctgggctaactgatggggtctttcttactcacttctgaggccagttcctggatccgaaagactttcagtcagtatctgcagaatgtctgggctgatacatttctcagtaataaaatgtggacaagaggaccaatctaccttcaaaatatatctccagcagtagtacagcaacagtggttaaaacaaatctcattctgccattttcttcttttatgactttgaacatgaaatccgacctcatgctggagtttcctcatataaaatgagaatgatagtgcctgcctcacagggacactatatgggaagttaatatatgctatagatgataaacatgccaaacccatattatgtactcagcaaatggaagcaattattattattaataagtccgctggcttccattcgtctcacctaccatttctccggtcccagccaccatttcccctcacctaaccttccataatagattagccagactcctgttttcactcttgaaacatttaggtctgtttttcatacaccagccagtgtgaagtttttaaaacgaaaacggatcatgtcacttctccacttaaaacactgcactgctccttacagaacccagagcagaattctaattccttagcgcacggccaggcgccggtggctcacacgggaatcctagcactttgggaggctgaggcgggcgggtcacttgaggtcaggagttcgagaccagcctggccaacatggtgaaactccatctctactaacaatacaaaaattagccgggtatggtggcacgtgcctgtaatcccagctactcaggaaactgaggcaggagatttgtgtgaatccgagaggcagagattgtagtgagccgagatcgcaccagtgcactccagcctgggccacagagtgggactccgtctcgaaaaaaaacccaaaaagcaaaaaacacattccttagtggggaccaggcccaccccctctacctgctcaattcatcccacttaggctctgtggcctcgctttggtttcccaagtccaccacccttcttatcttggtctggaacattcttcccactttctctgcctcgccaactcttagtaactcccatccaaaatgacagt

SEQ ID NO: 59875 - DNA, 689 bp, Homo sapiens
ccaccaacaccacccaatcccacaaaacactgactggtaaaagacacgttgatccttagaagttctaccacctaaaatatatctggtttttagttcataaggtagaatagaaaatatactttacaagatacatcttcaaatggcatttccttaacttccagaattaaaaaaaagttcagccgacttatttggaaccattgaaccaaatacctttgactccttggacacacagctttacactttaaaaataaaatgacctggtgtatgcatgtcccctcctcacaccagctggtatctcagagtcttctgatgtagattggcatcttccgcctagcccaaagcagggggtcctgcaagatatyggggctgatgacctcgtaagtggtttcacagaaagctgtatgcatttcagccctgtttcctttacccacccagctcggtgaagaacttgtattaattggtgctttgaggcagaaggggattttcttggccgtggcggaagccagccagccagccagctccctggcagacttgcagactggccagctgagctctcttaaaaattgacctacattgaaccaaacccgtagaatgtgtgttagatcaaatttgctcctctctgcttgctcagagagggtcatgctctgcaaatttccgtaccatcgtggccaggagacagacaccagcag

SEQ ID NO: 59876 - DNA, 689 bp, Homo sapiens
ccaccaacaccacccaatcccacaaaacactgactggtaaaagacacgttgatccttagaagttctaccacctaaaatatatctggtttttagttcataaggtagaatagaaaatatactttacaagatacatcttcaaatggcatttccttaacttccagaattaaaaaaaagttcagccgacttatttggaaccattgaaccaaatacctttgactccttggacacacagctttacactttaaaaataaaatgacctggtgtatgcatgtcccctcctcacaccagctggtatctcagagtcttctgatgtagattggcatcttccgcctagcccaaagcagggggtcctgcaagatatcggggctgatgacctygtaagtggtttcacagaaagctgtatgcatttcagccctgtttcctttacccacccagctcggtgaagaacttgtattaattggtgctttgaggcagaaggggattttcttggccgtggcggaagccagccagccagccagctccctggcagacttgcagactggccagctgagctctcttaaaaattgacctacattgaaccaaacccgtagaatgtgtgttagatcaaatttgctcctctctgcttgctcagagagggtcatgctctgcaaatttccgtaccatcgtggccaggagacagacaccagcag

SEQ ID NO: 59877 - DNA, 689 bp, Homo sapiens
ccaccaacaccacccaatcccacaaaacactgactggtaaaagacacgttgatccttagaagttctaccacctaaaatatatctggtttttagttcataaggtagaatagaaaatatactttacaagatacatcttcaaatggcatttccttaacttccagaattaaaaaaaagttcagccgacttatttggaaccattgaaccaaatacctttgactccttggacacacagctttacactttaaaaataaaatgacctggtgtatgcatgtcccctcctcacaccagctggtatctcagagtcttctgatgtagattggcatcttccgcctagcccaaagcagggggtcctgcaagatatcggggctgatgacctcgtaagtggtttcacagaaagctgkatgcatttcagccctgtttcctttacccacccagctcggtgaagaacttgtattaattggtgctttgaggcagaaggggattttcttggccgtggcggaagccagccagccagccagctccctggcagacttgcagactggccagctgagctctcttaaaaattgacctacattgaaccaaacccgtagaatgtgtgttagatcaaatttgctcctctctgcttgctcagagagggtcatgctctgcaaatttccgtaccatcgtggccaggagacagacaccagcag

SEQ ID NO: 59878 - DNA, 1020 bp, Homo sapiens
gcatgtatgccgttgttcccttcatttgatgtgagatatattttcagagtagagatagaaacatgtggatgaacattgggtgtgatggagagcgactaaggatgcctagggtttgatctgagctactagggcagatgatcagacaacctccttataactttagtggttcctgatggaccatgggataaaatccaacctccttagtatgcaagagctcatggtcttgtgctgcttcatctctcaaagctcttctccactttgtactcctgaccttcttgcagtttcttgaagactatgctgttaaatgtctctgtgctgttgcatatacctttttgtctgcttgaagttccctttttcatttgtctacttgwagattcagttcaagagtcatctttgtattgtcttccctgacttttctcccaggtgtggctgagcacatgctgctttgtgccacagtgtctggtagaatgcagcatttcttgctgttttgcagttttttttccttatccgtctcccttccaggctttggcttgattgaggatgccataggctagttcctttatatatggcactagaaatggacacagggagtcatacctaataggcatacataaataggcatagattaaattcatcaatgggatgaaaatggtgactctttactaccttttcaaacatctacaaattaaaaaaaaaacatagccagcactgactgtcattaaaaaccaaaaatacttaagtgccattactaataatagcaggtaacattacttcaccacttaccgagtgactctcagaaagtgactaaacctgtctatctgtctgttctttagcttcctcatctctaaaatagaccaaataaaagaacctacctcctagggttcttgtgagggctagctgaattaattaatgtgactggcttataacaagtgcccaatagatgttaactattttttactataatgattatcactgcttctgtggaaacatacaaggcagttactaaagctttccatgcat

SEQ ID NO: 59879 - DNA, 681 bp, Homo sapiens
ggacttggtgctgtgtcctttacacacctacactttcagccctacaaagtcaaatgcaccgaccgccaaagttatggacttttgtatcggaagcacacatgctaacaaagtattttcatcagaacatcttttttttttttctgactcattttcttggtgaaattgttgtttgtgtgtgtgtgtgtgtgtgtgtgtgtgtgtgtgtgttcttttttttactaggtctcatatgttttaggcccagcctgacatttcagcagtttcttgctaaagcgcttactgtgaatactgtgtagtatgtgtgcaaatgactcccgacttattagatttcttccrgtgtgtgcatcctagcagaagacaccccagcaggccttgagcactgctgctgcttcacttcacataatgaatattcagaggctgcagtcattgagaactcaggtggcaaaaatagtaaggtgattgaagcaaaccctaacatgaaagcaaatctgcatttcagtgactcagaaacactgattacagcacagattcctgaccctcagaccccatgagaggagagtcctggggaacctcctatgaatcaggcatctgttccatacaccaatatgctcacgtctttctgtatgatgtgttgtaatcagcatgttgtttttaaaagacaacaagcccttctgtagtcct

SEQ ID NO: 59880 - DNA, 681 bp, Homo sapiens
ggacttggtgctgtgtcctttacacacctacactttcagccctacaaagtcaaatgcaccgaccgccaaagttatggacttttgtatcggaagcacacatgctaacaaagtattttcatcagaacatcttttttttttttctgactcattttcttggtgaaattgttgtttgtgtgtgtgtgtgtgtgtgtgtgtgtgtgtgtgtgttcttttttttactaggtctcatatgttttaggcccagcctgacatttcagcagtttcttgctaaagcgcttactgtgaatactgtgtagtatgtgtgcaaatgactcccgacttattagatttcttccggtgtgtgcatcctagcagaagacaccccagcaggccttgagcactgctgctgcttcacttcacataatgaatattcagaggctgcagtcattgagaactcaggtggcaaaaatagtaaggtgattgaagcaaaccctaacatgaaagcaaatctgyatttcagtgactcagaaacactgattacagcacagattcctgaccctcagaccccatgagaggagagtcctggggaacctcctatgaatcaggcatctgttccatacaccaatatgctcacgtctttctgtatgatgtgttgtaatcagcatgttgtttttaaaagacaacaagcccttctgtagtcct

SEQ ID NO: 59881 - DNA, 1076 bp, Homo sapiens
aatattcttagctagatgaacttgactatgttcatttctgctgtcatgcataataagggcttggaggattttgaaaatgtaatgaactctgtggggtttgattagcagaagaacaagacctttaaagttgatgagcttacagttgtgcatttgacattgacacattactccaggggggtgwtctgaaactatgacaccaacacacatctctggagatgaataaggaggttggaataacttgcaataggtagttttgtctgcagtttgaaaattaatatactctgtttaaaatacttgtgattaaagaaaaaacagctgtagaaatataccaatccctttaaaaattatctatttaaagcatcagaaaaaacaaacaaaaacaaaggtaagaaacaaaggaataagagttacatatgcaaaatcaatcatcccagaatcaagcatttagcagttttataactggcattttatcaggcatatatcagtgaaatcaatttcttttcttttcttttttcttttttttttttttttgttttgagacaggatctcactctgttgcccaggctagagtgcagttgtgtgatcatagctcactgtaacctcaaactcttggactcaagtaatcttcctgcttcagcttcccaaatggctaggagtacagttatgtgccactatacccagctaattttttattttttgtagagatggggtctagctatgttgcccaggttggtctcaaactcctgatctcaagagatcctcctgcctcggcctcccagagtggtgggaatataggtttgagccactgtgccatactgcagttttttaaaaagtcatttcatgagcaaaacagatacacatgtgcacactcacccgcaggtttccaggaatcttcaataattatttgattctaattgcagtgcttttattccaagttttatttatggatgacagatcttcatccacaaataaaaggaacaaacttaaatcctatttccaagcactgcttttgtaataaacaaatactcacacgcatttattatatgaatgaaaagcactattattccagaaaattg

SEQ ID NO: 59882 - DNA, 570 bp, Homo sapiens
ggatccaatcatgagaaattaaagtaatatacactttgagatattcatatattttcatcttttatctgagtatgtctttttgataattkatttatatattctgccttaatatttcattttattataaagataagacttttaaatttggtggcagaaacctccagggaatagggataaaatgtttcacaaacttaaactaaggagataatttcatatcctgattttgtggctgtcacattttcctcttagaaatagatcatgaaacttttcacaaaataatatttctagattcttgctctccatcatcatttggccctctctcatttgaaattctcagaatagttaaaagggtaaaaacgcctgcagtctaatccttactgcattacatttgctatatttctgtcaccgttgaaacctttgtataaacttcaaatttcacctctgcagttttcagtgggttgaggtagtacagtctgtgtaccacatgctgaaatgccaaggcttcactggcatctttgttaactgaggaaatatggcatttcacccccagcctggctcacagtttctatt

SEQ ID NO: 59883 - DNA, 1342 bp, Homo sapiens
tgcattagttacttggaatatattggtttatgttttattgtgtcaaaaatcacttttagtttaaccaccaatcttactttaacacacctttaagtattgaaaagctgccaagcctacagtagaaggaacaagtttttcaaagtccacaggaaagcttaaattttatcattgggaaaaaatacgtatttcccttgaagtgacaacctctcacttcatttatttttgagaatgatagttgaactggttttttagaccgagtttcactctgtcacttggctggagtgcattggcatgatctcagctcaagcaatcctctcacctcaggctcctttgtagctgggaccacagatgtgtggcaccacgccaggctaattttcttatatgtttgacagtgacagggtttcgttatgttgcctaggctggtctcgaactcctgaaggagctcaagccatctgcctgctttggcctctcaaagtgctgggattttacaggcgtgagccactgcgctggcctagttgtacttttaaataaaaatgatgttctgtgaaaaaagtgatttttcagttgacagttaaatcacggattctttaaaaacaaaaaaaaaagcgcttctggttaactttccacttattcagaatattagagacatgtcaagatttaacaacattaatttttactgcttcatcaaagacgttcttaagaaattcaggctatgttttttacctgtacgggacagtgaagaatagaatgactactaatgtaattggtactactgccttgatttatgctgagaaaccagccattgtacccacttttgcttttatataatcatggcaagtgtcaatgaaaaagcaggcaatgactttgtattactttcacaaatttttaaaatttttcatcagctttctcaggtttaattagtatgattcagaacagtgttggccaggcacagtggctcaggcctgtaatcccagcactttgggaggccgaggcaagcggatcacctgaggttaggagttcaagaccagcctggccaacatggtgaaaccacatctctactaaaaatacaaaacttagccaggagtggtggcaggtgcctgtaatccctgctacttgggaggctggggtaggagaatcacttgaacctgggaggcgaaggttgccatgagccgagatcacaccattgcactccagcctgggcaayaagagtaaaacttggtctcaaaaaaaaaaaaaaaaaaagaacagttatgacctcttaggccttctggaaggggtcttcgggatcccgagaggtccacacagcacatttggagaaccactggtttatacacaggcacaa

SEQ ID NO: 59884 - DNA, 871 bp, Homo sapiens
ctgcaagtcaggatccaggagaagaattcgtaaaaactgctttggtaaagtaaacaccaaagcacacaggaggcagtattttactaaacaaatattatactaagatattaacagtttttgaagtaatgcgctttcttattttwtagagatgcagatagatctttgagcatacctgatgaacagttacactcatttgcagtaagtggcacttttattgaggttgtattttcatcgtacacttgtatctgtttcatgctgaagtcaaagccatctttttttaaatcttccccatttcatgttgcatttagtcatcttaagtgttgtaaaaagaatgtgctggagtaagaactgatctgcagctctgtttagttagtgagctagtatgagtaaatatactatccaaacaacagaaaatgtatctttttttttttttttttttgatggactctctttctgtagcccaggctggagtgcaattgcgcgatcttggctcactgcaggctctgcctcccaggtccctgttcaagcaattctcctgcctcagcctcccgagtaactggaattacaggcatgtgccaccatgcccagctaacttttttttcttttttcttttttttttgtaaagacagggtttcaccatgttggccaggatggtcttgaactcctgacctcgtgatccacccaccttggcctcccaaagtgctgtgattacaggtgtgagccaccatgcctggcccagaaaatgtatctttttaaaaggtaattgtgagctgtctataggaccctgcaagccactacccaatttttgaagccattcctccttctgttccacacaggtttccaccgtgcacattatgaagaacagaaatgg

SEQ ID NO: 59885 - DNA, 721 bp, Homo sapiens
tccagcagcagccctgattgtatggtatgaccttggtggtcagatcaggcatggacagcttgacccagactatgggatcagaatctctccccagcaacgtggccatggggtcatctgaacagaggatgagcaaccgcagacttcagggctactagcagccaagtacacagagaggcagaggtggggagargggagcaggtgcagagggagagaaggggcagagctgaggccgcatggcccagggagcagggaaacctgaaggagaccccaagcaggggtcctgtgggctttccaatgtctggtcctgctgaggcctggctgcccttgtgatcatgagctggcaacctacagtcactacagccctgtccttctggtctcctcttgggtcctgcctctgcacagcctgtagccaggctcaggctgggatctcccatatggaccctaagacgggctttcctatacttcccatggaaattctccagctgatagaagaagtgaacactgatagaagatgaacagctgatagaagaagtgtgggggttttctcaagtggtctgtaaaatttttgcaaggtttgtggttcatctcaaagattcgtaatttcgaaatggaagtcttaatagttagggaaatttttcacataccccgaagggctcctctttctccagggttgggtcaaagtcttgtgtccagaagccccctggtcggcagtcctcttggc

SEQ ID NO: 59886 - DNA, 726 bp, Homo sapiens
tggttctatttctctggctatccctggctaatacacactgcaagcacctgtgcaataccaagggcctggccatctgcttgaaatgtaaaatagaaaacacacccccccacacagagagagggagagagagagagagagagagaccctgtccagagccacccacccagtgcctgtccctagaccaaggcccagtccccttcacctgtctccatcataagcgtcaccagcctgtctgacaaactgcccagcaaagttattgacattggcctggccgcctggggatgcaaggccctgaacattgtagagaatgagatgccaggcctgatgcacatgtgggagctgtactcggcctccaagccactagagggcamccacagtgccagctgcctgcacatgaccatggagatggccatccacattgggtccctcatcaccctgggtgccccagcagcaacatcttcctcaccctggaccatgtgttggctgccattgccaaggctggcattccagtttacacctggaagggcaaaagaacgcagagtacccatggtgcatcgagcagtcactgtaattcagggatgggctctcaacattattctggaggatgggggtgaccttgccaacctcttccacaccaagtactcacagctcttgctgggcatctgaggcacctccaaggagaccatgacgggtccacaacccacacaggatgatggtcaatgggat

SEQ ID NO: 59887 - DNA, 726 bp, Homo sapiens
tggttctatttctctggctatccctggctaatacacactgcaagcacctgtgcaataccaagggcctggccatctgcttgaaatgtaaaatagaaaacacacccccccacacagagagagggagagagagagagagagagagaccctgtccagagccacccacccagtgcctgtccctagaccaaggcccagtccccttcacctgtctccatcataagcgtcaccagcctgtctgacaaactgcccagcaaagttattgacattggcctggccgcctggggatgcaaggccctgaacattgtagagaatgagatgccaggcctgatgcacatgtgggagctgtactcggcctccaagccactagagggcaaccacagtgccagctgcctgcacatgaccatggagatggccatccacattgggtccctcatcaccctgggtgccccagcagcaacatcttcctcaccctggaccatgtgttggctgccattgccaaggctggcattccagtttacacctggaagggcaaaagaacgcagagtacccatggtgcatcgagcagtcactgtaattcagggatgggctctcaacattattctggaggatgggggtgaccttgccaacctcttccacaccaagtactcacagctcttgctgggcatctgaggcacctccaaggagaccatgacgkgtccacaacccacacaggatgatggtcaatgggat

SEQ ID NO: 59888 - DNA, 1278 bp, Homo sapiens
cacatagccactgcccagagctgcccccagagctgggagccatcttgcacatggtgctgtgagatgccctccagagaggaagatggaagctgtctccgtgccccgggactgatgaagggcccattccaggcctttgggcacccgggctcgctacccttctgggagccctgtcctgtgggccaggacaaaggtgccctcactggtggcattctcagaagctcagccgctccccacacatgcacataggggcgtgcccacaccaagccacgtgtgggtgtctggggacaatgagtcttgggggagggggtgggtcccttccagaagggtctggccaaagtccagttatgaaggtgagctgagatgggctccctcaaaggagccatagtgtggggagccccgggcagagcccagagagaaatgccagccccgagaccgagacacgctccaaggagtgctgccaagagcagtagacacagccgctgaggcccacggggcacagtgaggctgtgggagagggtggcccctctgtggccatttccctgcctgtgctcacatcccctcctcaggcctgtctcaccagctcttgcagcccatgacccacattctgtgtgactctccttcctctcctggctacagggatccccagtgcccctcaccattccttctggtctctcctctgcctcccggaactgttccccaggactctctcctgggccagcccttcctgcccctccacatcagtsgttccgaaccccggatgcctttgggatcagctgggtgcactttaaatccttccagcccagagccctgaggcccaagtcacccccgcctgctcctgtgggaccccttggatcagccaaccattttatcatcatccatcatgtcccctgtcaccaagggcctctggcatgttgtgttgtccccatgcccaccctggcacccctcacccaccaacctgtgcccacgtcctgccttgagcctgtttcccctcctgagtggtatttcctcactccaggtgggcactggggcagctggcagacttggctgtgagcttctgtcccatccagagggaccctcccttccagattacccagtcaagcttgaccccatggtgtcaccgagacggaccaaaagagggtattgaagccacgcagtcccccgagccccactgagctgcaccagctttggagccggagagagcctgggagactgagcactgagtgctaggtcccttcctcccactcttgagggagaaatcattgtaaccttcccttcctc

SEQ ID NO: 59889 - DNA, 1278 bp, Homo sapiens
cacatagccactgcccagagctgcccccagagctgggagccatcttgcacatggtgctgtgagatgccctccagagaggaagatggaagctgtctccgtgccccgggactgatgaagggcccattccaggcctttgggcacccgggctcgctacccttctgggagccctgtcctgtgggccaggacaaaggtgccctcactggtggcattctcagaagctcagccgctccccacacatgcacataggggcgtgcccacaccaagccacgtgtgggtgtctggggacaatgagtcttgggggagggggtgggtcccttccagaagggtctggccaaagtccagttatgaaggtgagctgagatgggctccctcaaaggagccatagtgtggggagccccgggcagagcccagagagaaatgccagccccgagaccgagacacgctccaaggagtgctgccaagagcagtagacacagccgctgaggcccacggggcacagtgaggctgtgggagagggtggcccctctgtggccatttccctgcctgtgctcacatcccctcctcaggcctgtctcaccagctcttgcagcccatgacccacattctgtgtgactctccttcctctcctggctacagggatccccagtgcccctcaccattccttctggtctctcctctgcctcccggaactgttccccaggactctctcctgggccagcccttcctgcccctccacatcagtcgttccgaaccccggatgcctttgggatcagctgggtrcactttaaatccttccagcccagagccctgaggcccaagtcacccccgcctgctcctgtgggaccccttggatcagccaaccattttatcatcatccatcatgtcccctgtcaccaagggcctctggcatgttgtgttgtccccatgcccaccctggcacccctcacccaccaacctgtgcccacgtcctgccttgagcctgtttcccctcctgagtggtatttcctcactccaggtgggcactggggcagctggcagacttggctgtgagcttctgtcccatccagagggaccctcccttccagattacccagtcaagcttgaccccatggtgtcaccgagacggaccaaaagagggtattgaagccacgcagtcccccgagccccactgagctgcaccagctttggagccggagagagcctgggagactgagcactgagtgctaggtcccttcctcccactcttgagggagaaatcattgtaaccttcccttcctc

SEQ ID NO: 59890 - DNA, 1278 bp, Homo sapiens
cacatagccactgcccagagctgcccccagagctgggagccatcttgcacatggtgctgtgagatgccctccagagaggaagatggaagctgtctccgtgccccgggactgatgaagggcccattccaggcctttgggcacccgggctcgctacccttctgggagccctgtcctgtgggccaggacaaaggtgccctcactggtggcattctcagaagctcagccgctccccacacatgcacataggggcgtgcccacaccaagccacgtgtgggtgtctggggacaatgagtcttgggggagggggtgggtcccttccagaagggtctggccaaagtccagttatgaaggtgagctgagatgggctccctcaaaggagccatagtgtggggagccccgggcagagcccagagagaaatgccagccccgagaccgagacacgctccaaggagtgctgccaagagcagtagacacagccgctgaggcccacggggcacagtgaggctgtgggagagggtggcccctctgtggccatttccctgcctgtgctcacatcccctcctcaggcctgtctcaccagctcttgcagcccatgacccacattctgtgtgactctccttcctctcctggctacagggatccccagtgcccctcaccattccttctggtctctcctctgcctcccggaactgttccccaggactctctcctgggccagcccttcctgcccctccacatcagtcgttccgaaccccggatgcctttgggatcagctgggtgcactttaaatccttccagcccagagccctsaggcccaagtcacccccgcctgctcctgtgggaccccttggatcagccaaccattttatcatcatccatcatgtcccctgtcaccaagggcctctggcatgttgtgttgtccccatgcccaccctggcacccctcacccaccaacctgtgcccacgtcctgccttgagcctgtttcccctcctgagtggtatttcctcactccaggtgggcactggggcagctggcagacttggctgtgagcttctgtcccatccagagggaccctcccttccagattacccagtcaagcttgaccccatggtgtcaccgagacggaccaaaagagggtattgaagccacgcagtcccccgagccccactgagctgcaccagctttggagccggagagagcctgggagactgagcactgagtgctaggtcccttcctcccactcttgagggagaaatcattgtaaccttcccttcctc

SEQ ID NO: 59891 - DNA, 1278 bp, Homo sapiens
cacatagccactgcccagagctgcccccagagctgggagccatcttgcacatggtgctgtgagatgccctccagagaggaagatggaagctgtctccgtgccccgggactgatgaagggcccattccaggcctttgggcacccgggctcgctacccttctgggagccctgtcctgtgggccaggacaaaggtgccctcactggtggcattctcagaagctcagccgctccccacacatgcacataggggcgtgcccacaccaagccacgtgtgggtgtctggggacaatgagtcttgggggagggggtgggtcccttccagaagggtctggccaaagtccagttatgaaggtgagctgagatgggctccctcaaaggagccatagtgtggggagccccgggcagagcccagagagaaatgccagccccgagaccgagacacgctccaaggagtgctgccaagagcagtagacacagccgctgaggcccacggggcacagtgaggctgtgggagagggtggcccctctgtggccatttccctgcctgtgctcacatcccctcctcaggcctgtctcaccagctcttgcagcccatgacccacattctgtgtgactctccttcctctcctggctacagggatccccagtgcccctcaccattccttctggtctctcctctgcctcccggaactgttccccaggactctctcctgggccagcccttcctgcccctccacatcagtcgttccgaaccccggatgcctttgggatcagctgggtgcactttaaatccttccagcccagagccctgaggcccaagtcacccccgccwgctcctgtgggaccccttggatcagccaaccattttatcatcatccatcatgtcccctgtcaccaagggcctctggcatgttgtgttgtccccatgcccaccctggcacccctcacccaccaacctgtgcccacgtcctgccttgagcctgtttcccctcctgagtggtatttcctcactccaggtgggcactggggcagctggcagacttggctgtgagcttctgtcccatccagagggaccctcccttccagattacccagtcaagcttgaccccatggtgtcaccgagacggaccaaaagagggtattgaagccacgcagtcccccgagccccactgagctgcaccagctttggagccggagagagcctgggagactgagcactgagtgctaggtcccttcctcccactcttgagggagaaatcattgtaaccttcccttcctc

SEQ ID NO: 59892 - DNA, 1278 bp, Homo sapiens
cacatagccactgcccagagctgcccccagagctgggagccatcttgcacatggtgctgtgagatgccctccagagaggaagatggaagctgtctccgtgccccgggactgatgaagggcccattccaggcctttgggcacccgggctcgctacccttctgggagccctgtcctgtgggccaggacaaaggtgccctcactggtggcattctcagaagctcagccgctccccacacatgcacataggggcgtgcccacaccaagccacgtgtgggtgtctggggacaatgagtcttgggggagggggtgggtcccttccagaagggtctggccaaagtccagttatgaaggtgagctgagatgggctccctcaaaggagccatagtgtggggagccccgggcagagcccagagagaaatgccagccccgagaccgagacacgctccaaggagtgctgccaagagcagtagacacagccgctgaggcccacggggcacagtgaggctgtgggagagggtggcccctctgtggccatttccctgcctgtgctcacatcccctcctcaggcctgtctcaccagctcttgcagcccatgacccacattctgtgtgactctccttcctctcctggctacagggatccccagtgcccctcaccattccttctggtctctcctctgcctcccggaactgttccccaggactctctcctgggccagcccttcctgcccctccacatcagtcgttccgaaccccggatgcctttgggatcagctgggtgcactttaaatccttccagcccagagccctgaggcccaagtcacccccgcctgctcctgtgggaccccttggatcagccaaccattttatcatcatccatcatgtcccctgtcaccaagggcctctggcatgttstgttgtccccatgcccaccctggcacccctcacccaccaacctgtgcccacgtcctgccttgagcctgtttcccctcctgagtggtatttcctcactccaggtgggcactggggcagctggcagacttggctgtgagcttctgtcccatccagagggaccctcccttccagattacccagtcaagcttgaccccatggtgtcaccgagacggaccaaaagagggtattgaagccacgcagtcccccgagccccactgagctgcaccagctttggagccggagagagcctgggagactgagcactgagtgctaggtcccttcctcccactcttgagggagaaatcattgtaaccttcccttcctc

SEQ ID NO: 59893 - DNA, 1278 bp, Homo sapiens
cacatagccactgcccagagctgcccccagagctgggagccatcttgcacatggtgctgtgagatgccctccagagaggaagatggaagctgtctccgtgccccgggactgatgaagggcccattccaggcctttgggcacccgggctcgctacccttctgggagccctgtcctgtgggccaggacaaaggtgccctcactggtggcattctcagaagctcagccgctccccacacatgcacataggggcgtgcccacaccaagccacgtgtgggtgtctggggacaatgagtcttgggggagggggtgggtcccttccagaagggtctggccaaagtccagttatgaaggtgagctgagatgggctccctcaaaggagccatagtgtggggagccccgggcagagcccagagagaaatgccagccccgagaccgagacacgctccaaggagtgctgccaagagcagtagacacagccgctgaggcccacggggcacagtgaggctgtgggagagggtggcccctctgtggccatttccctgcctgtgctcacatcccctcctcaggcctgtctcaccagctcttgcagcccatgacccacattctgtgtgactctccttcctctcctggctacagggatccccagtgcccctcaccattccttctggtctctcctctgcctcccggaactgttccccaggactctctcctgggccagcccttcctgcccctccacatcagtcgttccgaaccccggatgcctttgggatcagctgggtgcactttaaatccttccagcccagagccctgaggcccaagtcacccccgcctgctcctgtgggaccccttggatcagccaaccattttatcatcatccatcatgtcccctgtcaccaagggcctctggcatgttgtgttgtccccatgcccaccctggcacccctcacccaccaacctgtgcccacgtcctgccttgagcctgtttcccctcctgagtggtatttcctcactccaggtgggcactggggcagctggcagacwtggctgtgagcttctgtcccatccagagggaccctcccttccagattacccagtcaagcttgaccccatggtgtcaccgagacggaccaaaagagggtattgaagccacgcagtcccccgagccccactgagctgcaccagctttggagccggagagagcctgggagactgagcactgagtgctaggtcccttcctcccactcttgagggagaaatcattgtaaccttcccttcctc

SEQ ID NO: 59894 - DNA, 519 bp, Homo sapiens
gcttggcggtggcggccgcgtctgcacctcctccctgcgcgccgcctgacagcctgggagagaagcgccctcaggtcggccaagaccaagaccgagagcaagcgggcgcgggcagcggggtccatctcatttccactgcctttccccacagtagcgctcttgagtcctgactttggctgttgggtccttcccttccctctgtcgccagcttcctcccgcattctcccaggtcctctctgagtcccattcctgttcctgtcccctgcctttctgcctcttgtytccttgtcccatcctgtttctttctcctctcatctctccctttttcttgtgtttgctttattggctatttctctgtcttgtctcttttccctctctctccccctcactgtctttttctctctccctatcctccgctcattttttgcaagcaagaattctccctttgatttatttttctcctagagagacatgttgggccgcggttctcttcatccacccatccctccgttcatgaca

SEQ ID NO: 59895 - DNA, 519 bp, Homo sapiens
gcttggcggtggcggccgcgtctgcacctcctccctgcgcgccgcctgacagcctgggagagaagcgccctcaggtcggccaagaccaagaccgagagcaagcgggcgcgggcagcggggtccatctcatttccactgcctttccccacagtagcgctcttgagtcctgactttggctgttgggtccttcccttccctctgtcgccagcttcctcccgcattctcccaggtcctctctgagtcccattcctgttcctgtcccctgcctttctgcctcttgtttccttgtcccatcctgtttctttctcctctcatctctccctttttyttgtgtttgctttattggctatttctctgtcttgtctcttttccctctctctccccctcactgtctttttctctctccctatcctccgctcattttttgcaagcaagaattctccctttgatttatttttctcctagagagacatgttgggccgcggttctcttcatccacccatccctccgttcatgaca

SEQ ID NO: 59896 - DNA, 519 bp, Homo sapiens
gcttggcggtggcggccgcgtctgcacctcctccctgcgcgccgcctgacagcctgggagagaagcgccctcaggtcggccaagaccaagaccgagagcaagcgggcgcgggcagcggggtccatctcatttccactgcctttccccacagtagcgctcttgagtcctgactttggctgttgggtccttcccttccctctgtcgccagcttcctcccgcattctcccaggtcctctctgagtcccattcctgttcctgtcccctgcctttctgcctcttgtttccttgtcccatcctgtttctttctcctctcatctctccctttttcktgtgtttgctttattggctatttctctgtcttgtctcttttccctctctctccccctcactgtctttttctctctccctatcctccgctcattttttgcaagcaagaattctccctttgatttatttttctcctagagagacatgttgggccgcggttctcttcatccacccatccctccgttcatgaca

SEQ ID NO: 59897 - DNA, 2178 bp, Homo sapiens
tgcattttcacagcagccctattcataatagcacatcagcctatacaggaatggatagagttctcaaaaaaagaaaaaaaaaagggtcagcacattggttcatgcctgtaatcctagcactttgggaggccaaggtgggtggatcacctgaggtcaggagttcaagaccagcctgaccaacttggtgaaaccccgtctctactaaaaatacaaaattagctgggtgtggtagcacatgcctgtaattccagctacttgggaggctgaggcaggaaaatcacttgaacccaggaggcggaggttgcagtgagctgagattgcaccattgcactccagcctgggcaacaagagcaaaactctgtctcaaaaaaaaaaaaaaaaaggatagagttactctcaaactaggaacttagatggttggtgccgtgctagagacaaaatgatgttgcagttgtagtctgtcaacagtgctcccatgctttaaaacaactctggaagtattgtgttcaggaagaagacattattctaagggagagctattgccttaaaaatcggtgtttggcctgagcagtgctgaaaatwttttcctggtcaacattgagaattgccctgaaggacaggaaggaattttcagtttttaaagtctgcccatcctggttgttatttgctaagaacacccaggttaaagttctccattatgaaatgtatcctagattctttgataacatcaggtagctagatcttgatttgagtgtatgtattacccaaaagagtaacttgagcagtaaccaaaccttgtggtgctttggctgagccatttctcagagttaagcgtacctgtggagagacaagcatctttgtgtggcacctcagtgtttggagttctttctgaatgtgtttagatctctgttttgctattgacaggaacttgcacaaagctataactctattgcttagttagagatcatatgggagcagaaccttggagaaagttaatattcctttttaaaattatttaagttgaaattcctagtgctagatattttctttttaattttcagagatggggtctcacattgttgtctaggctggaatgcagtgacaggatcacagcttactgcagcctcaacctcccgggctcaaacgattcttctgcttcagcctcctgagtagctgggaatagatgcatgccaccagaaaaaattagcctcattttttaaacttttttgtagagatgggttattgctatgttgcccagtcgggtctggaacttctgggctcattggatcctcccgcctcagcctcccaaagtgctgggattacagatataagccactgcacctagccaatatccttttttttttttaaagggatatttcaaatatatacaaagttagaataacataatgaacatctatgtacccaccatgcggcttcaacaattgtcaatattctgccagtcttgtttcattccacattttttgttggaatattttattttgtttatttttttgaattttatttatttatttatttatttaaatttattattatactttaagttttagggtacatgtgcacaatgtgcaggttagttacatatgtatacatgtgccatgctggtgtgctacacccactaactcatcatctagcattaggtatatctcccaatgctatccctccctgctccccccaccccacaacagtccccagagtgtaatgtaccccttcctgtgtccatgtgttctcattgttcaattcccacctatgagtgagaatatgcggtgtttggttttttgttcttgtgatagtttactgaaaatgatgatttccaatttcatccatgtccctacaaaggacatgaactcattattttttatggctgcatagtattccatggtgtatatgtgccacattttcttaatccagtctatcattgttggacatttgggttggttccaagtctttgctattgtgaataatgccacaataaacatatgtgtgcatgtgtctttatagcagcatgatttatagcatcacactacctgactttaaactatactacaaggctacagtaaccaaaacagcatggtactgataccaaaacagagatatagatcaatggaacagaacagagccctcagaaataacgccgcatatctacaactatctgatctt

SEQ ID NO: 59898 - DNA, 1016 bp, Homo sapiens
tcatgcattgtgtggacactagccatttaaaggacatcagtgtggttcagccaggcagcagcagcacacagctgtcagtgatgcagaaagaaggcaagggcaggagactctaaagcaaaagaactacaggaccagaggcagcaatgcaagaagtccctcccagctagaggcttctactgacaataatttaggaggattgtgscaggaaaagacctgactctgtgctgtaagtagagcactgacatttgagagacccatttgtacacctaaatagatgttgcgtgaggcacactagacagacctctctttgaaaagatatataccaggccaggtgcagtggctcacgcctgtaatcccagcactttgggaggccgaggcaggcggatcacaaggtcaggagatcgggaccatcctggctaacatggtgaaaccttgtctctactaaaaatacaacaaattagctgggcgtggtggcgggtgcctgtagtcccagctactcgggaggctgaggcaggagaacagcgtgaacctgggaggcggagcttgcagtgagcggagatcacgccactgcactccagcctgggtgacagagcgagactccgtctcaaaaaaaaaagaaaagatatatattaaaattttaatagttgtcacctcttggcagtttttgttttctcctttatctgtatgtcctaatttttcaccgggaaataaaaatcacaaatacaaagaataaagctgggccaggcatggtggctcacgccaataatcccaacactttgggaggccaaaacaggaggtttgcttgagaccaggagtttgagactagctgaggcaagatagtgagacccccaactccacacacacaaaaaatttttttttaattagctgggcatggtagtacgcacctatagtcccagttactcaggaggctgaggtaggagaattgcttgagcctgggaggtcgaggctgcagtgaaccatgatcatcacaccaatgtactccagcctgggcaaca

SEQ ID NO: 59899 - DNA, 1349 bp, Homo sapiens
tctggcatatatgtagtgatcagtaagtaatgattatgtttattatttggattgttattctttttttttttttttgagatggagtctcactctgtaccccaggctggagtacagtggtgtgatcctggctcactgcaacmtctgcctcctgggttcaagtgattctcctgcctcagcctcccaagtagctgggattaccagcgtgtgccaccacgcctggctaatttttgtatttttagcagagatggggttttgccatgttgaccaggctggtctcgaactcctgacctcaagtgatccacctgccgtggccttggattgttattcttattgtaaagtaaaggaagaaagcttttgtatttagacattttgcctaaggtcattatttgggatcagaccataggtctaattaggtaaaagataaggaaccacatggcaccaatcagaccagattttgattctagattttatgtttgatttactattttgattccagattttatgtttgttgtttagaaaatttttttttagggacgaggtctcactctgtcacctgagctgaagtgtagtggcgagatctcactctgtcacccaaactgaagtgtagtggcatgatcattgctcactgcagtctccaactcctgggctcaagggatcctcctgcctcagcctcccgagtagctgggaccataggcatggaccaaaacacccggctaatttttttattttttaattttttgtagagatgggttctcactttgttgcccaggctggtctcaaactcttggcttcaagccatcctcccaccttcacctccccaagtgttggggttacaggcatgagccaccttgcctggcctttatttgttttgttttgttttgttttttatagaaacatctttctgagctaccaggaatatgacttggcaagttagaatcctgaatggtagacttaacctgcacttcctcttttatttcctgttattactctatcccacacagaaccttagatattctagaatggtcctgttttccacagttttattggatgagagtcgtgatttctgatctgacatggcttcaaagaatactcactatctaatatgatttacctgctgcttttataaatcttatgggcacaccaagttctctgacaacatatatcttttggttgtttctggttctctttgacagtatcagcttggaagtcaaaggggaattgatacgtatgtcttgtgatagtctggccatggtctgaaaggaagaagagctagaaattagaagccacagaaatttgggtaagttttgggcacaggctcttgctagtttctgtggccatagagatgagtg

SEQ ID NO: 59900 - DNA, 587 bp, Homo sapiens
gttttgtttttgtttttgtttgagatggactttcactcttgttgcccaggctggaatgcaatggcgtgatcttggctcactgcaacctctgcctcctgggttcaagcgattctcctgcctcagcctcccgagtagctgggattacaggcatccaacaccacgcccagctaattttgtatttttagtagagatggggtttctccaygttggtcaggctggtcttgaactcccaacctcaggtgagccgcccaccttggcctcccatagtgctgggattacaggcgtgaggcatggtgcctagcctagtgttttgtttttaatcttttctgtgattttataaaagaaagttgcctccagtcttaggttcacgtagtttctctatggggcatacatcttgtacatacaggaaaggctacagactgggtaaaatattgtctcttggttaattggttagtcagctcaataataattgagatgtactttgtgcagggtccagtactgagagtaataaaggaattaggaaacaagctcttactagtagtacatcttgcaaagatacacatataaaataaatttaaacacaatta

SEQ ID NO: 59901 - DNA, 587 bp, Homo sapiens
gttttgtttttgtttttgtttgagatggactttcactcttgttgcccaggctggaatgcaatggcgtgatcttggctcactgcaacctctgcctcctgggttcaagcgattctcctgcctcagcctcccgagtagctgggattacaggcatccaacaccacgcccagctaattttgtatttttagtagagatggggtttctccatgttggtcaggctggtcttgaactcccaacctcaggtgakccgcccaccttggcctcccatagtgctgggattacaggcgtgaggcatggtgcctagcctagtgttttgtttttaatcttttctgtgattttataaaagaaagttgcctccagtcttaggttcacgtagtttctctatggggcatacatcttgtacatacaggaaaggctacagactgggtaaaatattgtctcttggttaattggttagtcagctcaataataattgagatgtactttgtgcagggtccagtactgagagtaataaaggaattaggaaacaagctcttactagtagtacatcttgcaaagatacacatataaaataaatttaaacacaatta

SEQ ID NO: 59902 - DNA, 587 bp, Homo sapiens
gttttgtttttgtttttgtttgagatggactttcactcttgttgcccaggctggaatgcaatggcgtgatcttggctcactgcaacctctgcctcctgggttcaagcgattctcctgcctcagcctcccgagtagctgggattacaggcatccaacaccacgcccagctaattttgtatttttagtagagatggggtttctccatgttggtcaggctggtcttgaactcccaacctcaggtgagccgcccaccttggcctcccatagtgctgggattacaggcgtgaggcatggtgcctagcctrgtgttttgtttttaatcttttctgtgattttataaaagaaagttgcctccagtcttaggttcacgtagtttctctatggggcatacatcttgtacatacaggaaaggctacagactgggtaaaatattgtctcttggttaattggttagtcagctcaataataattgagatgtactttgtgcagggtccagtactgagagtaataaaggaattaggaaacaagctcttactagtagtacatcttgcaaagatacacatataaaataaatttaaacacaatta

SEQ ID NO: 59903 - DNA, 587 bp, Homo sapiens
gttttgtttttgtttttgtttgagatggactttcactcttgttgcccaggctggaatgcaatggcgtgatcttggctcactgcaacctctgcctcctgggttcaagcgattctcctgcctcagcctcccgagtagctgggattacaggcatccaacaccacgcccagctaattttgtatttttagtagagatggggtttctccatgttggtcaggctggtcttgaactcccaacctcaggtgagccgcccaccttggcctcccatagtgctgggattacaggcgtgaggcatggtgcctagcctagtgttttgtttttaatcttttctgtgattttataaaagaaagttgcctccagtcttaggttcacgtagtttctctatggggcatacatcttgtacatacaggaaaggctacagactgggtaaaatattgtctcttggttaattggttagtcagctcaataataattgagatgtactttgtgcagggtccagtactgagagtaataaaggaattaggaaacaagctcttactagtagtacatcttgcraagatacacatataaaataaatttaaacacaatta

SEQ ID NO: 59904 - DNA, 986 bp, Homo sapiens
aatttgcaaggtatctacagaactgagagagccacagatagttcaccattaaagaggccatgattgctgaaggatcttttagtttaaaaagaaacaaagatgaaaatggggaaaaggtgaaacatcccattttatttatttatttatttatttatttatttattttgagacagagtctcactctgtcgcccaggctggagtgcagtggcgcaatctcggctcactgcaacctccacctccagggttcaagcgattctcctacctcagcctcccgaatagctgggacaacaggcgcccgccaccaagcccggctattttttttttttttgtatttttagtagagacggggtttcaccatattggccaggctggtcttgaactcctaaccttgtgatccgcccgcctcggyctcccaaattgctgggattacaggcgtgagccaccgcgaccgcccgaaacatcccattttaaacattaaatcatggaaacaaaaatacagtttttgaaatcactccctcaaaagtccaaatctcattggttgaagtaacctagattattaaaggtttttttttttttttttttttttgagacggagtcttgctctgtcgcccaggctggagtgcagtggtgtgatctcggctcactgcaagctccgcctcccgggttcacgccattctcctgcctcagcctcctgagtagctgggactacaggcgcccgccaccacgcccggctaattttttgtacttttagtagagacggggtttcaccatgttagccaggatggtctcgatctccttgacctcgtgatccgcccgcctcggcctcccgaagtgctgggattacaggcgtgagacactgcgcccggctattaaaggttttataacaaaactttcaaatcatcctttgaatttgctacttaacaggaactaaggccagagagcctcaagtcagggcttttcgctgacctggaggcagaatccagttt

SEQ ID NO: 59905 - DNA, 986 bp, Homo sapiens
aatttgcaaggtatctacagaactgagagagccacagatagttcaccattaaagaggccatgattgctgaaggatcttttagtttaaaaagaaacaaagatgaaaatggggaaaaggtgaaacatcccattttatttatttatttatttatttatttatttattttgagacagagtctcactctgtcgcccaggctggagtgcagtggcgcaatctcggctcactgcaacctccacctccagggttcaagcgattctcctacctcagcctcccgaatagctgggacaacaggcgcccgccaccaagcccggctattttttttttttttgtatttttagtagagacggggtttcaccatattggccaggctggtcttgaactcctaaccttgtgatccgcccgcctcggcctcccaaaktgctgggattacaggcgtgagccaccgcgaccgcccgaaacatcccattttaaacattaaatcatggaaacaaaaatacagtttttgaaatcactccctcaaaagtccaaatctcattggttgaagtaacctagattattaaaggtttttttttttttttttttttttgagacggagtcttgctctgtcgcccaggctggagtgcagtggtgtgatctcggctcactgcaagctccgcctcccgggttcacgccattctcctgcctcagcctcctgagtagctgggactacaggcgcccgccaccacgcccggctaattttttgtacttttagtagagacggggtttcaccatgttagccaggatggtctcgatctccttgacctcgtgatccgcccgcctcggcctcccgaagtgctgggattacaggcgtgagacactgcgcccggctattaaaggttttataacaaaactttcaaatcatcctttgaatttgctacttaacaggaactaaggccagagagcctcaagtcagggcttttcgctgacctggaggcagaatccagttt

SEQ ID NO: 59906 - DNA, 603 bp, Homo sapiens
tgaactaaaatagaccatatccagaaacctgccggtgcaggcttcccagggctaaagagtatgagcagtttgaattgctttttgtctctttgcctttttcttgaatcaatttaccaaaatagagatgttaccatcagattttttttmaaggcactagttcccaaaggctagtctccatgccaagacaatttttctaaagcatgtatatctgaaaatgaaaggatcttagatgcttaccttatggtttctctttagctctagcattatttgtttactggggacactatgacttttggttcagtcctatgaataagcaggtcacaagccaatttttagctccccttacactttttaagtatttattaatcttgactcctatgcaaactgtagggaggctggcagcagaagattcttatccttagttatttatgtggctaagactccaaggcaaattgctctctcaaactgtagggaggctggcagcagaagattcttatccttagttatttatgtggctaagactccaaggcaaattgctctcataaaatcacgccccatgagatgtgattctgccagattagtaggccttaatgtcttgggtct

SEQ ID NO: 59907 - DNA, 603 bp, Homo sapiens
tgaactaaaatagaccatatccagaaacctgccggtgcaggcttcccagggctaaagagtatgagcagtttgaattgctttttgtctctttgcctttttcttgaatcaatttaccaaaatagagatgttaccatcagattttttttaaaggcactagwtcccaaaggctagtctccatgccaagacaatttttctaaagcatgtatatctgaaaatgaaaggatcttagatgcttaccttatggtttctctttagctctagcattatttgtttactggggacactatgacttttggttcagtcctatgaataagcaggtcacaagccaatttttagctccccttacactttttaagtatttattaatcttgactcctatgcaaactgtagggaggctggcagcagaagattcttatccttagttatttatgtggctaagactccaaggcaaattgctctctcaaactgtagggaggctggcagcagaagattcttatccttagttatttatgtggctaagactccaaggcaaattgctctcataaaatcacgccccatgagatgtgattctgccagattagtaggccttaatgtcttgggtct

SEQ ID NO: 59908 - DNA, 603 bp, Homo sapiens
tgaactaaaatagaccatatccagaaacctgccggtgcaggcttcccagggctaaagagtatgagcagtttgaattgctttttgtctctttgcctttttcttgaatcaatttaccaaaatagagatgttaccatcagattttttttaaaggcactagttcccaaaggctagtctccrtgccaagacaatttttctaaagcatgtatatctgaaaatgaaaggatcttagatgcttaccttatggtttctctttagctctagcattatttgtttactggggacactatgacttttggttcagtcctatgaataagcaggtcacaagccaatttttagctccccttacactttttaagtatttattaatcttgactcctatgcaaactgtagggaggctggcagcagaagattcttatccttagttatttatgtggctaagactccaaggcaaattgctctctcaaactgtagggaggctggcagcagaagattcttatccttagttatttatgtggctaagactccaaggcaaattgctctcataaaatcacgccccatgagatgtgattctgccagattagtaggccttaatgtcttgggtct

SEQ ID NO: 59909 - DNA, 603 bp, Homo sapiens
tgaactaaaatagaccatatccagaaacctgccggtgcaggcttcccagggctaaagagtatgagcagtttgaattgctttttgtctctttgcctttttcttgaatcaatttaccaaaatagagatgttaccatcagattttttttaaaggcactagttcccaaaggctagtctccatgccaagacaatttttctaaagcatgtatatctgaaaatgaaaggatcttagatgcttaccttatggtttctctttagctctagcattatttgtttactggggacactatgacttttggttcagtcctatgaataagcaggtcacaagccaatttttagctccccttacactttttaagtatttattaatcttgactcctatgcaaactgtagggaggctggcagcagaagattcttatccttagttatttatgtggctaagactccaaggcaaattgctctctcaaactgtagggaggctggcagcagaagattcttatccttagttatttatgtgkctaagactccaaggcaaattgctctcataaaatcacgccccatgagatgtgattctgccagattagtaggccttaatgtcttgggtct

SEQ ID NO: 59910 - DNA, 1531 bp, Homo sapiens
attcaacatttttgtttgtgagagtagttttaaagaatgccagaacatttttatttttactgtatttaaggataaaacaaaatcaaacaactgctcatttgagtcaagataaatgttcacaatatttttgtaaggaaaataaaagggtaaattaaaatacctttttgtttacttactttttataaagtagcacataaatctgattggataacatacccagcccgygagtttatataatagatataattaatgtctatactttgctgctgcagagtgaccagacatgggcacagaaagatgagttccaaggactcctgagtgatgtctttcttgccttctccattcaaacactagctagatgtctgaggcttccaggagccaagtttgaacataagtatcttaaagccaagcttttttgctcttagctcttagttttccaaatggagatgttacatttaatgaaaatgaaaaccctctgtaaagaatcctttagcagacaaagccagttaggcctcataagggaccccaaacttgcttcatttgcaaacataagtgaaataactgaagctatttattgtaaatgcccatataatttaacttaaaaacataacatgctcaaccaatcagaagaaaccaacaaacttataattagattactaaatattttccaaaggatagaccaaacaaatctgtataactgtgcaactgtcagtgatcaaatatttgtctgtcttctctgttagtcccacaaaagccaatatcttatatttcctaagggaagcttctaaacaacttctggtttagagctgtccaaatcatgactattgtttgctcaaattaactcttcaaatttttagtgtggctcagtttattttttaacagagaaaaatctgcctgggacctcaagttttagatggaatgtttaccgtagaatctacatgtcctgccatctcttttagctcagaaagggagtgattgtgagaaaagttttgaaggcctgaaattctgtcctacgtttccatacctacctcattgagattacgtcttttttcaatttcttagtgctttaatctgtttgtcattttattttttcttttcatatggcatttccataatccattgccattttccctttaagttattcttttcaattagttataatttagtttgacacagaatcatctaatttatatttgcctgtaagtataatttatatcttaactatattatttatttaattaatagactactttctgagagcagttttatgttcatggcaaaattgtgtagaaagtacacagttccctcccgggtgcccctctccttcccacacacactgactatgttaatttttatttttgttgtcttaattatatttttcagtttaaatatcattagatattgtttttaaatttatgtctacagaagcaagaatattcataatgatcatagctataaggatcatctgtatctgtttgccgcaatctttattaaaaatgccaacttcagcagaatggacatacaaaagctt

SEQ ID NO: 59911 - DNA, 1531 bp, Homo sapiens
attcaacatttttgtttgtgagagtagttttaaagaatgccagaacatttttatttttactgtatttaaggataaaacaaaatcaaacaactgctcatttgagtcaagataaatgttcacaatatttttgtaaggaaaataaaagggtaaattaaaatacctttttgtttacttactttttataaagtagcacataaatctgattggataacatacccagcccgtgagtttatataatagatataattaatgtctatactttgctgctgcagagtgaccagacatgggcacagaaagatgagttccaaggactcctgagtgatgtctttcttgccttctccattcaaacactagctagatgtctgaggcttccaggagccaagtttgaacataagtatcttaaagccaagcttttttgctcttagctcttagttttccaaatggagatgttacatttaatgaaaatgaaaaccctctgtaaagaatcctttagcagacaaagccagttaggcctcataagggaccccaaacttgcttcatttgcaaacataagtgaaataactgaagctatttattgtaaatgccyatataatttaacttaaaaacataacatgctcaaccaatcagaagaaaccaacaaacttataattagattactaaatattttccaaaggatagaccaaacaaatctgtataactgtgcaactgtcagtgatcaaatatttgtctgtcttctctgttagtcccacaaaagccaatatcttatatttcctaagggaagcttctaaacaacttctggtttagagctgtccaaatcatgactattgtttgctcaaattaactcttcaaatttttagtgtggctcagtttattttttaacagagaaaaatctgcctgggacctcaagttttagatggaatgtttaccgtagaatctacatgtcctgccatctcttttagctcagaaagggagtgattgtgagaaaagttttgaaggcctgaaattctgtcctacgtttccatacctacctcattgagattacgtcttttttcaatttcttagtgctttaatctgtttgtcattttattttttcttttcatatggcatttccataatccattgccattttccctttaagttattcttttcaattagttataatttagtttgacacagaatcatctaatttatatttgcctgtaagtataatttatatcttaactatattatttatttaattaatagactactttctgagagcagttttatgttcatggcaaaattgtgtagaaagtacacagttccctcccgggtgcccctctccttcccacacacactgactatgttaatttttatttttgttgtcttaattatatttttcagtttaaatatcattagatattgtttttaaatttatgtctacagaagcaagaatattcataatgatcatagctataaggatcatctgtatctgtttgccgcaatctttattaaaaatgccaacttcagcagaatggacatacaaaagctt

SEQ ID NO: 59912 - DNA, 2405 bp, Homo sapiens
tgcatgagttcattgacctactacaaaaacaggaaaaaaaaagatttgtgaaggaggaaagctctttgttaacagaatatyagctaagatgtaggaagaaaatagacttagaaaattatcaagggttcttaaaatccacttatacaggttctaagcatcatcctacatattatttatatgataccaaaggaaaatttttcctttccaatagagggatctaacagatgacaccagataaaatgatcaaacttagcatcactaataaggaccagatggtatcgtatgcctcataatgtttttcaatgcaaaatcacccatgtagttttttgacagacacaaaaaatgtttaattcaattctacttgacaaagaaagaattggaaaaattcatattacactaccttgcacataatatttggtttgcagtcttataaaatatctcatgctctacatcccaccttgcttgaaggaccctctagcatttttgtgactatccattatggcttcaaaataattgtttactcattgtgagaaaaaatgctttgaagtttaggctatctgaatatttctctactatctatcttcgttttcagttacagagacttcacaacaactattgccattagcctgaatgtgtgaattatatgttatgtccagtagccccatactcttcacttcattcccagtgattcccctctcacctcactttggtactccattcttatcacagctccatcaacctcagcatagccagaagtactcaaacgacaaatgtaaacttcattatccagcctttaatgaaaatagacttattatttcttctggtttcttctttcatttaaaataactgttttagtatcattgagaccttcaggcccttggcctactttttccctcagtgtatgaacttcaaattccccattttcatgacttcttggtataggtcctagaactttcccttcaacttttcttttcctcaaaaacctcagcttctggtctctctgaactttccatatacatgttccattgtggattagtccatctcagtaaagccagcactactgtcagcatgctaatgctacaaataaatatacaatattgtaaggtcattagtatatataccatcaagaagaaaccaaaagtaataaacaaatatctagtaagttttttctagttaaaaatgtaatgtttactataaagggcagaaaattacttccttagtgaaataaaacatatttaatgagcctaggcaaatttattgaagacaaagagtaccatgcactcttctgcataagtaggaatttaaactggtactatatttggggaaaattttacaatatcaatatgcattgaaatttttatatattagactcaataactctacatatgtgaatatatgtgccaagaaaaaattccgaaatatcacaaaaatgctcggattgtttacagtagttcaatttacaactaaatatcaacattaagacatctttatataaattattttgctgaaatacgatggaatattataaaactatagcaactattttttacagtgtccttagagcctaatatgctagctctgttcaaaaagaattgtttcaagaaattttgataattttgccagagaccaagaggatatttttgacagaaactgagctaggggacatttttcagtccctaaggcgtaagaatgtgccactagagagaaaaacataatgaatacaatatcatgtttttcttaactgtggataagctgctgtctgaattcacagatttcaccgttcactgctgtgaaagcacagctttccccaatgacaccttctattctgtgttccagggaaatcctgggaagcctattaaaaagccatttgggttctacataaagctgcaatacttttatgaaccaaggtgggtcctaggaaaaaaatcagaagggtcatatttcttgcatcctgatgaccagagaggaggagagaggcaaattggctgtcctttcggtgatgatcacagttttctactcactcttttgagaatgtttcacagtgctgcttacgacaatacagggaaatctgcaatccactttcttctatagaaggaagatagaggcggctggtatgctacaaaataaggacaccttcatttcttcttttctagaacgatctacaatcagaaagtgattcaaaagactctcagctaagtgctacataatgagcaactcgtactcctcaaccaaacggtaatatgaacgaaagacattttctatttgcatagagatgcagattagaacccatccgtgacttctcactggtcactatgcaggttgaatcaatcatttgaggtgaagccaagggtggcaaaagttcgagtgtaaacgatggagtacaaccatcgcttctcttgccactg

SEQ ID NO: 59913 - DNA, 2405 bp, Homo sapiens
tgcatgagttcattgacctactacaaaaacaggaaaaaaaaagatttgtgaaggaggaaagctctttgttaacagaatatcagctaagatgtaggaagaaaatagacttagaaaattatcaagggttcttaaaatccacttatacaggttctaagcrtcatcctacatattatttatatgataccaaaggaaaatttttcctttccaatagagggatctaacagatgacaccagataaaatgatcaaacttagcatcactaataaggaccagatggtatcgtatgcctcataatgtttttcaatgcaaaatcacccatgtagttttttgacagacacaaaaaatgtttaattcaattctacttgacaaagaaagaattggaaaaattcatattacactaccttgcacataatatttggtttgcagtcttataaaatatctcatgctctacatcccaccttgcttgaaggaccctctagcatttttgtgactatccattatggcttcaaaataattgtttactcattgtgagaaaaaatgctttgaagtttaggctatctgaatatttctctactatctatcttcgttttcagttacagagacttcacaacaactattgccattagcctgaatgtgtgaattatatgttatgtccagtagccccatactcttcacttcattcccagtgattcccctctcacctcactttggtactccattcttatcacagctccatcaacctcagcatagccagaagtactcaaacgacaaatgtaaacttcattatccagcctttaatgaaaatagacttattatttcttctggtttcttctttcatttaaaataactgttttagtatcattgagaccttcaggcccttggcctactttttccctcagtgtatgaacttcaaattccccattttcatgacttcttggtataggtcctagaactttcccttcaacttttcttttcctcaaaaacctcagcttctggtctctctgaactttccatatacatgttccattgtggattagtccatctcagtaaagccagcactactgtcagcatgctaatgctacaaataaatatacaatattgtaaggtcattagtatatataccatcaagaagaaaccaaaagtaataaacaaatatctagtaagttttttctagttaaaaatgtaatgtttactataaagggcagaaaattacttccttagtgaaataaaacatatttaatgagcctaggcaaatttattgaagacaaagagtaccatgcactcttctgcataagtaggaatttaaactggtactatatttggggaaaattttacaatatcaatatgcattgaaatttttatatattagactcaataactctacatatgtgaatatatgtgccaagaaaaaattccgaaatatcacaaaaatgctcggattgtttacagtagttcaatttacaactaaatatcaacattaagacatctttatataaattattttgctgaaatacgatggaatattataaaactatagcaactattttttacagtgtccttagagcctaatatgctagctctgttcaaaaagaattgtttcaagaaattttgataattttgccagagaccaagaggatatttttgacagaaactgagctaggggacatttttcagtccctaaggcgtaagaatgtgccactagagagaaaaacataatgaatacaatatcatgtttttcttaactgtggataagctgctgtctgaattcacagatttcaccgttcactgctgtgaaagcacagctttccccaatgacaccttctattctgtgttccagggaaatcctgggaagcctattaaaaagccatttgggttctacataaagctgcaatacttttatgaaccaaggtgggtcctaggaaaaaaatcagaagggtcatatttcttgcatcctgatgaccagagaggaggagagaggcaaattggctgtcctttcggtgatgatcacagttttctactcactcttttgagaatgtttcacagtgctgcttacgacaatacagggaaatctgcaatccactttcttctatagaaggaagatagaggcggctggtatgctacaaaataaggacaccttcatttcttcttttctagaacgatctacaatcagaaagtgattcaaaagactctcagctaagtgctacataatgagcaactcgtactcctcaaccaaacggtaatatgaacgaaagacattttctatttgcatagagatgcagattagaacccatccgtgacttctcactggtcactatgcaggttgaatcaatcatttgaggtgaagccaagggtggcaaaagttcgagtgtaaacgatggagtacaaccatcgcttctcttgccactg

SEQ ID NO: 59914 - DNA, 2405 bp, Homo sapiens
tgcatgagttcattgacctactacaaaaacaggaaaaaaaaagatttgtgaaggaggaaagctctttgttaacagaatatcagctaagatgtaggaagaaaatagacttagaaaattatcaagggttcttaaaatccacttatacaggttctaagcatcatcctacatattatttatatgataccaaaggaaaatttttcctttccaatagagggatctaacagatgacaccagataaaatgatcaaacttagcatcactaataaggaccaratggtatcgtatgcctcataatgtttttcaatgcaaaatcacccatgtagttttttgacagacacaaaaaatgtttaattcaattctacttgacaaagaaagaattggaaaaattcatattacactaccttgcacataatatttggtttgcagtcttataaaatatctcatgctctacatcccaccttgcttgaaggaccctctagcatttttgtgactatccattatggcttcaaaataattgtttactcattgtgagaaaaaatgctttgaagtttaggctatctgaatatttctctactatctatcttcgttttcagttacagagacttcacaacaactattgccattagcctgaatgtgtgaattatatgttatgtccagtagccccatactcttcacttcattcccagtgattcccctctcacctcactttggtactccattcttatcacagctccatcaacctcagcatagccagaagtactcaaacgacaaatgtaaacttcattatccagcctttaatgaaaatagacttattatttcttctggtttcttctttcatttaaaataactgttttagtatcattgagaccttcaggcccttggcctactttttccctcagtgtatgaacttcaaattccccattttcatgacttcttggtataggtcctagaactttcccttcaacttttcttttcctcaaaaacctcagcttctggtctctctgaactttccatatacatgttccattgtggattagtccatctcagtaaagccagcactactgtcagcatgctaatgctacaaataaatatacaatattgtaaggtcattagtatatataccatcaagaagaaaccaaaagtaataaacaaatatctagtaagttttttctagttaaaaatgtaatgtttactataaagggcagaaaattacttccttagtgaaataaaacatatttaatgagcctaggcaaatttattgaagacaaagagtaccatgcactcttctgcataagtaggaatttaaactggtactatatttggggaaaattttacaatatcaatatgcattgaaatttttatatattagactcaataactctacatatgtgaatatatgtgccaagaaaaaattccgaaatatcacaaaaatgctcggattgtttacagtagttcaatttacaactaaatatcaacattaagacatctttatataaattattttgctgaaatacgatggaatattataaaactatagcaactattttttacagtgtccttagagcctaatatgctagctctgttcaaaaagaattgtttcaagaaattttgataattttgccagagaccaagaggatatttttgacagaaactgagctaggggacatttttcagtccctaaggcgtaagaatgtgccactagagagaaaaacataatgaatacaatatcatgtttttcttaactgtggataagctgctgtctgaattcacagatttcaccgttcactgctgtgaaagcacagctttccccaatgacaccttctattctgtgttccagggaaatcctgggaagcctattaaaaagccatttgggttctacataaagctgcaatacttttatgaaccaaggtgggtcctaggaaaaaaatcagaagggtcatatttcttgcatcctgatgaccagagaggaggagagaggcaaattggctgtcctttcggtgatgatcacagttttctactcactcttttgagaatgtttcacagtgctgcttacgacaatacagggaaatctgcaatccactttcttctatagaaggaagatagaggcggctggtatgctacaaaataaggacaccttcatttcttcttttctagaacgatctacaatcagaaagtgattcaaaagactctcagctaagtgctacataatgagcaactcgtactcctcaaccaaacggtaatatgaacgaaagacattttctatttgcatagagatgcagattagaacccatccgtgacttctcactggtcactatgcaggttgaatcaatcatttgaggtgaagccaagggtggcaaaagttcgagtgtaaacgatggagtacaaccatcgcttctcttgccactg

SEQ ID NO: 59915 - DNA, 2405 bp, Homo sapiens
tgcatgagttcattgacctactacaaaaacaggaaaaaaaaagatttgtgaaggaggaaagctctttgttaacagaatatcagctaagatgtaggaagaaaatagacttagaaaattatcaagggttcttaaaatccacttatacaggttctaagcatcatcctacatattatttatatgataccaaaggaaaatttttcctttccaatagagggatctaacagatgacaccagataaaatgatcaaacttagcatcactaataaggaccagatggtatcgtatgcctcataatgtttttcaatgcaaaatcacccatgtagttttttgacagacacaaaaaatgtttaattcaattctacttgacaaagaaagaattggaaaaattcatattacactaccttgcacataatatttggtttgcagtcttataaaatatctcatgctctacatcccaccttgcttgaaggaccctctagcatttttgtgactatccattatggcttcaaaataattgtttactcattgtgagaaaaaatgctttgaagtttaggctatctgaayatttctctactatctatcttcgttttcagttacagagacttcacaacaactattgccattagcctgaatgtgtgaattatatgttatgtccagtagccccatactcttcacttcattcccagtgattcccctctcacctcactttggtactccattcttatcacagctccatcaacctcagcatagccagaagtactcaaacgacaaatgtaaacttcattatccagcctttaatgaaaatagacttattatttcttctggtttcttctttcatttaaaataactgttttagtatcattgagaccttcaggcccttggcctactttttccctcagtgtatgaacttcaaattccccattttcatgacttcttggtataggtcctagaactttcccttcaacttttcttttcctcaaaaacctcagcttctggtctctctgaactttccatatacatgttccattgtggattagtccatctcagtaaagccagcactactgtcagcatgctaatgctacaaataaatatacaatattgtaaggtcattagtatatataccatcaagaagaaaccaaaagtaataaacaaatatctagtaagttttttctagttaaaaatgtaatgtttactataaagggcagaaaattacttccttagtgaaataaaacatatttaatgagcctaggcaaatttattgaagacaaagagtaccatgcactcttctgcataagtaggaatttaaactggtactatatttggggaaaattttacaatatcaatatgcattgaaatttttatatattagactcaataactctacatatgtgaatatatgtgccaagaaaaaattccgaaatatcacaaaaatgctcggattgtttacagtagttcaatttacaactaaatatcaacattaagacatctttatataaattattttgctgaaatacgatggaatattataaaactatagcaactattttttacagtgtccttagagcctaatatgctagctctgttcaaaaagaattgtttcaagaaattttgataattttgccagagaccaagaggatatttttgacagaaactgagctaggggacatttttcagtccctaaggcgtaagaatgtgccactagagagaaaaacataatgaatacaatatcatgtttttcttaactgtggataagctgctgtctgaattcacagatttcaccgttcactgctgtgaaagcacagctttccccaatgacaccttctattctgtgttccagggaaatcctgggaagcctattaaaaagccatttgggttctacataaagctgcaatacttttatgaaccaaggtgggtcctaggaaaaaaatcagaagggtcatatttcttgcatcctgatgaccagagaggaggagagaggcaaattggctgtcctttcggtgatgatcacagttttctactcactcttttgagaatgtttcacagtgctgcttacgacaatacagggaaatctgcaatccactttcttctatagaaggaagatagaggcggctggtatgctacaaaataaggacaccttcatttcttcttttctagaacgatctacaatcagaaagtgattcaaaagactctcagctaagtgctacataatgagcaactcgtactcctcaaccaaacggtaatatgaacgaaagacattttctatttgcatagagatgcagattagaacccatccgtgacttctcactggtcactatgcaggttgaatcaatcatttgaggtgaagccaagggtggcaaaagttcgagtgtaaacgatggagtacaaccatcgcttctcttgccactg

SEQ ID NO: 59916 - DNA, 2405 bp, Homo sapiens
tgcatgagttcattgacctactacaaaaacaggaaaaaaaaagatttgtgaaggaggaaagctctttgttaacagaatatcagctaagatgtaggaagaaaatagacttagaaaattatcaagggttcttaaaatccacttatacaggttctaagcatcatcctacatattatttatatgataccaaaggaaaatttttcctttccaatagagggatctaacagatgacaccagataaaatgatcaaacttagcatcactaataaggaccagatggtatcgtatgcctcataatgtttttcaatgcaaaatcacccatgtagttttttgacagacacaaaaaatgtttaattcaattctacttgacaaagaaagaattggaaaaattcatattacactaccttgcacataatatttggtttgcagtcttataaaatatctcatgctctacatcccaccttgcttgaaggaccctctagcatttttgtgactatccattatggcttcaaaataattgtttactcattgtgagaaaaaatgctttgaagtttaggctatctgaatatttctctactatctatcttcgttttcagttacagagacttcacaacaactattgccattagcctgaatgtgtgaattatatgttatgtccagtagccccatactcttcacttcattcccagtgattcccctctcacctcactttggtactccattcttatcacagctccatcaacctcagcatagccagaagtactcaaacgacaaatgtaaacttcattatccagcctttaatgaaaatagacttattatttcttctggtttcttctttcatttaaaataactgttttagtatcattgagaccttcaggcccttggcctactttttccctcagtgtatgaacttcaaattccccattttcatgacttcttggtataggtcctagaactttcccttcaacttttcttttcctcaaaaacctcagcttctggtctctctgaactttccatrtacatgttccattgtggattagtccatctcagtaaagccagcactactgtcagcatgctaatgctacaaataaatatacaatattgtaaggtcattagtatatataccatcaagaagaaaccaaaagtaataaacaaatatctagtaagttttttctagttaaaaatgtaatgtttactataaagggcagaaaattacttccttagtgaaataaaacatatttaatgagcctaggcaaatttattgaagacaaagagtaccatgcactcttctgcataagtaggaatttaaactggtactatatttggggaaaattttacaatatcaatatgcattgaaatttttatatattagactcaataactctacatatgtgaatatatgtgccaagaaaaaattccgaaatatcacaaaaatgctcggattgtttacagtagttcaatttacaactaaatatcaacattaagacatctttatataaattattttgctgaaatacgatggaatattataaaactatagcaactattttttacagtgtccttagagcctaatatgctagctctgttcaaaaagaattgtttcaagaaattttgataattttgccagagaccaagaggatatttttgacagaaactgagctaggggacatttttcagtccctaaggcgtaagaatgtgccactagagagaaaaacataatgaatacaatatcatgtttttcttaactgtggataagctgctgtctgaattcacagatttcaccgttcactgctgtgaaagcacagctttccccaatgacaccttctattctgtgttccagggaaatcctgggaagcctattaaaaagccatttgggttctacataaagctgcaatacttttatgaaccaaggtgggtcctaggaaaaaaatcagaagggtcatatttcttgcatcctgatgaccagagaggaggagagaggcaaattggctgtcctttcggtgatgatcacagttttctactcactcttttgagaatgtttcacagtgctgcttacgacaatacagggaaatctgcaatccactttcttctatagaaggaagatagaggcggctggtatgctacaaaataaggacaccttcatttcttcttttctagaacgatctacaatcagaaagtgattcaaaagactctcagctaagtgctacataatgagcaactcgtactcctcaaccaaacggtaatatgaacgaaagacattttctatttgcatagagatgcagattagaacccatccgtgacttctcactggtcactatgcaggttgaatcaatcatttgaggtgaagccaagggtggcaaaagttcgagtgtaaacgatggagtacaaccatcgcttctcttgccactg

SEQ ID NO: 59917 - DNA, 2405 bp, Homo sapiens
tgcatgagttcattgacctactacaaaaacaggaaaaaaaaagatttgtgaaggaggaaagctctttgttaacagaatatcagctaagatgtaggaagaaaatagacttagaaaattatcaagggttcttaaaatccacttatacaggttctaagcatcatcctacatattatttatatgataccaaaggaaaatttttcctttccaatagagggatctaacagatgacaccagataaaatgatcaaacttagcatcactaataaggaccagatggtatcgtatgcctcataatgtttttcaatgcaaaatcacccatgtagttttttgacagacacaaaaaatgtttaattcaattctacttgacaaagaaagaattggaaaaattcatattacactaccttgcacataatatttggtttgcagtcttataaaatatctcatgctctacatcccaccttgcttgaaggaccctctagcatttttgtgactatccattatggcttcaaaataattgtttactcattgtgagaaaaaatgctttgaagtttaggctatctgaatatttctctactatctatcttcgttttcagttacagagacttcacaacaactattgccattagcctgaatgtgtgaattatatgttatgtccagtagccccatactcttcacttcattcccagtgattcccctctcacctcactttggtactccattcttatcacagctccatcaacctcagcatagccagaagtactcaaacgacaaatgtaaacttcattatccagcctttaatgaaaatagacttattatttcttctggtttcttctttcatttaaaataactgttttagtatcattgagaccttcaggcccttggcctactttttccctcagtgtatgaacttcaaattccccattttcatgacttcttggtataggtcctagaactttcccttcaacttttcttttcctcaaaaacctcagcttctggtctctctgaactttccatatacatgttccattgtggattagtccatctcagtaaagccagcactactgtcagcatgctaatgctacaaataaatatacaatattgtaaggtcattagtatatataccatcaagaagaaaccaaaagtaataaacaaatatctagtaagttttttctagttaaaaatgtaatgtttactataaagggcagaaaattacttccttagtgaaataaaacatatttaatgagcctaggcaaatttattgaagacaaagagtaccatgcactcttctgcataagtaggaatttaaactggtactatatttggggaaaattttacaatatcaatatgcattgaaatttttatatattagactcaataactctacatatgtgaatatatgtgccaagaaaaaattccgaaatatcacaaaaatgctcggattgtttacagtagttcaatttacaactaaatatcaacattaagacatctttatataaattattttgctgaaatacgatggaatattataaaactatagcaactattttttacagtgtccttagagcctaatatgctagctctgttcaaaaagaattgtttcaagaaattttgataattttgccagagaccaagaggatatttttgacagaaactgagctaggggacatttttcagtccctaaggygtaagaatgtgccactagagagaaaaacataatgaatacaatatcatgtttttcttaactgtggataagctgctgtctgaattcacagatttcaccgttcactgctgtgaaagcacagctttccccaatgacaccttctattctgtgttccagggaaatcctgggaagcctattaaaaagccatttgggttctacataaagctgcaatacttttatgaaccaaggtgggtcctaggaaaaaaatcagaagggtcatatttcttgcatcctgatgaccagagaggaggagagaggcaaattggctgtcctttcggtgatgatcacagttttctactcactcttttgagaatgtttcacagtgctgcttacgacaatacagggaaatctgcaatccactttcttctatagaaggaagatagaggcggctggtatgctacaaaataaggacaccttcatttcttcttttctagaacgatctacaatcagaaagtgattcaaaagactctcagctaagtgctacataatgagcaactcgtactcctcaaccaaacggtaatatgaacgaaagacattttctatttgcatagagatgcagattagaacccatccgtgacttctcactggtcactatgcaggttgaatcaatcatttgaggtgaagccaagggtggcaaaagttcgagtgtaaacgatggagtacaaccatcgcttctcttgccactg

SEQ ID NO: 59918 - DNA, 2405 bp, Homo sapiens
tgcatgagttcattgacctactacaaaaacaggaaaaaaaaagatttgtgaaggaggaaagctctttgttaacagaatatcagctaagatgtaggaagaaaatagacttagaaaattatcaagggttcttaaaatccacttatacaggttctaagcatcatcctacatattatttatatgataccaaaggaaaatttttcctttccaatagagggatctaacagatgacaccagataaaatgatcaaacttagcatcactaataaggaccagatggtatcgtatgcctcataatgtttttcaatgcaaaatcacccatgtagttttttgacagacacaaaaaatgtttaattcaattctacttgacaaagaaagaattggaaaaattcatattacactaccttgcacataatatttggtttgcagtcttataaaatatctcatgctctacatcccaccttgcttgaaggaccctctagcatttttgtgactatccattatggcttcaaaataattgtttactcattgtgagaaaaaatgctttgaagtttaggctatctgaatatttctctactatctatcttcgttttcagttacagagacttcacaacaactattgccattagcctgaatgtgtgaattatatgttatgtccagtagccccatactcttcacttcattcccagtgattcccctctcacctcactttggtactccattcttatcacagctccatcaacctcagcatagccagaagtactcaaacgacaaatgtaaacttcattatccagcctttaatgaaaatagacttattatttcttctggtttcttctttcatttaaaataactgttttagtatcattgagaccttcaggcccttggcctactttttccctcagtgtatgaacttcaaattccccattttcatgacttcttggtataggtcctagaactttcccttcaacttttcttttcctcaaaaacctcagcttctggtctctctgaactttccatatacatgttccattgtggattagtccatctcagtaaagccagcactactgtcagcatgctaatgctacaaataaatatacaatattgtaaggtcattagtatatataccatcaagaagaaaccaaaagtaataaacaaatatctagtaagttttttctagttaaaaatgtaatgtttactataaagggcagaaaattacttccttagtgaaataaaacatatttaatgagcctaggcaaatttattgaagacaaagagtaccatgcactcttctgcataagtaggaatttaaactggtactatatttggggaaaattttacaatatcaatatgcattgaaatttttatatattagactcaataactctacatatgtgaatatatgtgccaagaaaaaattccgaaatatcacaaaaatgctcggattgtttacagtagttcaatttacaactaaatatcaacattaagacatctttatataaattattttgctgaaatacgatggaatattataaaactatagcaactattttttacagtgtccttagagcctaatatgctagctctgttcaaaaagaattgtttcaagaaattttgataattttgccagagaccaagaggatatttttgacagaaactgagctaggggacatttttcagtccctaaggcgtaagaatgtgccactagagagaaaaacataatgaatacaatatcatgtttttcttaactgtggataagctgctgtctgaattcacagatttcaccgttcactgctgtgaaagcacagctttccccaatgacaccttctattctgtgttccagggaaatcctgggaagcctattaaaaagccatttgggttctacataaagctgcaatacttttatgaaccaaggtgggtcctaggaaaaaaatcagaagggtcatatttcttgcatcctgatgaccagagaggaggagagaggcaaattggctgtcctttcggtgatgatcacagttttctactcactcttttgagaatgtttcacagtgctgcttacgacaatacagggaaatctgcaatccactttcttctatagaaggaagatagaggcggctggtatgctacaaaataargacaccttcatttcttcttttctagaacgatctacaatcagaaagtgattcaaaagactctcagctaagtgctacataatgagcaactcgtactcctcaaccaaacggtaatatgaacgaaagacattttctatttgcatagagatgcagattagaacccatccgtgacttctcactggtcactatgcaggttgaatcaatcatttgaggtgaagccaagggtggcaaaagttcgagtgtaaacgatggagtacaaccatcgcttctcttgccactg

SEQ ID NO: 59919 - DNA, 1500 bp, Homo sapiens
  misc_feature (1)...(1500): n = A,T,C or G
ttttaaataacagttcaggataagttggaccttgtcaaaataatgaggttttacaaaaatctgttgagtggtgatttgcaactagataatccacaattcttttccatgattgatgtgccacacacgagtaaccctaaaaacgtaaaractttagcattgaggccattcgtaggggagacttgttacttaacatttacatttttttctattgaaaggttcttcatggtgagaacctatgaaagttcatgcctgctaattcattgcaagtgtgtctgatgcccataatcctaaacataaattcattaaagaaagcacccaagctgctttgacccggcctaggcatttctttttttaacagttccatggaactttttcaagaagttcaatgctgctctacagtataagattattctgtaataaaaacaaaacgttnnnnnnnnnnnnnnnnnnnnnnnnnnnnnnnnnnnnnnnnnnnnnnnnnnnnnnnnnnnnnnnnnnnnnnnnnnnnnnnnnnnnnnnnnnnnnnnnnnnnaaggtgagttttacttgcatgtttcaccagaaggtgaaagagatctgctaaggtgtgattgcatgtttcaccaaaaggtgaaagacctgataactacaaaacacacctagaaagagtaaactgtgcctgccctctgttgcaggggttccatcaagatttatacagtactagtgtttcagtctccttttgcccctggtgttcaatgaggtctgggctcttgtcccacagccaagaagagtaaggcacatggacactggggagtaagtaagatagagtaggatttattaagtgaaaggaaagctctcagctgtgagaggggaccctgaaagtaggttgcttccagggtatctgtggttggggaccttcatgtggaagaaataaggaagtcttctgtgggttttgccttaatgggaggggtaaaattccctcctagggttattgcatctgcgcttgcctggggttggccatagtgactccatcttagttgttacctatgagtggctaagcaaaacccatgggtggggggactaaaaccacaatgctaatgtcatgttaatgatgttataatgagctgggttaagttaacgacatttagattgatttattgtgccttcacctaggttaggacagtccttctaagcagacatcctggcataggaggaagctcttaaccacatttcttttgctagctgcagaggcagtgttggtgctgtcccgcaggtgttcctgtgactattgcctctctcccgagacctccctctctgtctaaccagtctctaactgcctcctctctcactagcatgttctgcttctgatttggctttgtaatttctgcaagattttcaaagcacaatgacattggttttctaatgtaaaaaactgggttccagagctaacattcaatgattctacctttatagccaatacaacaataacattttaatttgaaaatatttcagagagcttta

SEQ ID NO: 59920 - DNA, 1500 bp, Homo sapiens
  misc_feature (1)...(1500): n = A,T,C or G
ttttaaataacagttcaggataagttggaccttgtcaaaataatgaggttttacaaaaatctgttgagtggtgatttgcaactagataatccacaattcttttccatgattgatgtgccacacacgagtaaccctaaaaacgtaaaaactttagcattgaggccattcgtaggggagacttgttacttaayatttacatttttttctattgaaaggttcttcatggtgagaacctatgaaagttcatgcctgctaattcattgcaagtgtgtctgatgcccataatcctaaacataaattcattaaagaaagcacccaagctgctttgacccggcctaggcatttctttttttaacagttccatggaactttttcaagaagttcaatgctgctctacagtataagattattctgtaataaaaacaaaacgttnnnnnnnnnnnnnnnnnnnnnnnnnnnnnnnnnnnnnnnnnnnnnnnnnnnnnnnnnnnnnnnnnnnnnnnnnnnnnnnnnnnnnnnnnnnnnnnnnnnnaaggtgagttttacttgcatgtttcaccagaaggtgaaagagatctgctaaggtgtgattgcatgtttcaccaaaaggtgaaagacctgataactacaaaacacacctagaaagagtaaactgtgcctgccctctgttgcaggggttccatcaagatttatacagtactagtgtttcagtctccttttgcccctggtgttcaatgaggtctgggctcttgtcccacagccaagaagagtaaggcacatggacactggggagtaagtaagatagagtaggatttattaagtgaaaggaaagctctcagctgtgagaggggaccctgaaagtaggttgcttccagggtatctgtggttggggaccttcatgtggaagaaataaggaagtcttctgtgggttttgccttaatgggaggggtaaaattccctcctagggttattgcatctgcgcttgcctggggttggccatagtgactccatcttagttgttacctatgagtggctaagcaaaacccatgggtggggggactaaaaccacaatgctaatgtcatgttaatgatgttataatgagctgggttaagttaacgacatttagattgatttattgtgccttcacctaggttaggacagtccttctaagcagacatcctggcataggaggaagctcttaaccacatttcttttgctagctgcagaggcagtgttggtgctgtcccgcaggtgttcctgtgactattgcctctctcccgagacctccctctctgtctaaccagtctctaactgcctcctctctcactagcatgttctgcttctgatttggctttgtaatttctgcaagattttcaaagcacaatgacattggttttctaatgtaaaaaactgggttccagagctaacattcaatgattctacctttatagccaatacaacaataacattttaatttgaaaatatttcagagagcttta

SEQ ID NO: 59921 - DNA, 1076 bp, Homo sapiens
ttgaagtgatgatgggagatattttaatgatacacattgtaaaaatattcacttcacatgttgggatttttttacatgcaactcttttttagaatccgtattcatgtgtgattctttggtcataacactcagtgacaaaaagcaggttaccatatttgaccataataataatttacagaaacagactccttaaaataatggtgaattattttgcaacagggcaaaaatgaatattcacgtcttttctactaactcctgcccatagtaaaactttttatattagcctacttgctaaataaggaaatatggaaaacagtgaagaaaagraagagaaaagccagatgaggctgaactgaaagaagaatttaagaatttgacaattaaggtccttaggaataactacagaggacatagaaattgggaagggaaaaggttttcaaggaatgttacgggtgtaatgaataggattagtattctttgagagacttaagtacaaatgaaattccatttaaattattttagctgtaaatgtgtatctgtgcagaaattaatccacgcaataaaaacccttgctggtaaatggtttctttggaaataatttccatcttctacctccccactttgggaccaaaggtgttatagtcaccattatttctgatttaaaatgtttttggaataacatcaaaagatggctcttgaatagcatgaaaaagccaaacagataatgtagaaaatattctgatattggatttgcaaatttgggaataattgagtattagaaattgtatatactaagtacaaagtaaaagctatgtacagtataataaaaaaacttttctaaactgtcatcatctaaaacaatcctgctaaaaatgcaaaatgaaaatcagtttttaccaacttataaggaccctatattatttaaaaactgtgattatttggggatagtgagcaaaatcaatatcaggatttgttacattagttcaaaactatgcctgctctacaatcaaaccaaatagtcttatccttcagggattaaatcagctggtacaaactagttgcaattagtaacttgg

SEQ ID NO: 59922 - DNA, 1289 bp, Homo sapiens
tgcatgttgaatcatactatcatctttagggaatgttttatctaaaatttattttgttaattagtgtataatagtagtatattaaataatgtgatcattatgtgccatatattattctatgtgcttttcaatcattagctctttaagtctcacagaaaacctcatacaactagccactatttgcaccatcctcattaacagctgatggcactggggttggagaggttaagtaatctgtctaacatcaaagctactaagtagtagctgggatttgagctcaagctagagctcttacctatgcagcttacccctccctccctccctccctccctccctccctccctccctccctccttcccttccttccttccttccttccttccttccttccttccttcctcaatcagcacttcttgagtatccattctttctatgcacttaagtacaaagacacatatttcggacccttaaaaaccttatacggaagtgagaaaataattatgtaaataaaatttacataaaaatataatgaatgttctaatagattagaatagcactctaatataatgctctaaaataatggatagggtcatataggattagaccaatgcaatctctgttatgtcaggcttagtatcagttctcttcaccactctattctcagactgagaaaactattttaaacttgaaagttattcaaaaaatatttgttgattgaaacattgaaagcagtctaacaaagatgacagttgacttgaccctggcctatagtaaattctcaaaagtgtcaaaaagtatttaccgtaattatcaaacatttatctactatggtgatttactatgtgccaagtattcttttaagcactttgcaaacgcaaacatagataaacctcataacaattatcaaccccattttccagatgggaacatagttctgctgagaggttgagcaatttgctacaaacagaatgtggcagagccaggactcaaacatatgcagtctggctccaggatctaggctcccarctaccacccaatgtttctgaagagtggcggaaggtccaggccaccttttccagtggcttgccacccaaaacatacattttccttctctttcaaaatgttctgttcttttgtcttgatatgtatgaaaaagcattttcatctccattttattaaagatggaaaattaggattcatgcttttggcatataatttatatgaatacaaaaaatgtgttttatttggcttttaacaaacccctgttacagttgtgtgtacatacatgc

SEQ ID NO: 59923 - DNA, 1289 bp, Homo sapiens
tgcatgttgaatcatactatcatctttagggaatgttttatctaaaatttattttgttaattagtgtataatagtagtatattaaataatgtgatcattatgtgccatatattattctatgtgcttttcaatcattagctctttaagtctcacagaaaacctcatacaactagccactatttgcaccatcctcattaacagctgatggcactggggttggagaggttaagtaatctgtctaacatcaaagctactaagtagtagctgggatttgagctcaagctagagctcttacctatgcagcttacccctccctccctccctccctccctccctccctccctccctccctccttcccttccttccttccttccttccttccttccttccttccttcctcaatcagcacttcttgagtatccattctttctatgcacttaagtacaaagacacatatttcggacccttaaaaaccttatacggaagtgagaaaataattatgtaaataaaatttacataaaaatataatgaatgttctaatagattagaatagcactctaatataatgctctaaaataatggatagggtcatataggattagaccaatgcaatctctgttatgtcaggcttagtatcagttctcttcaccactctattctcagactgagaaaactattttaaacttgaaagttattcaaaaaatatttgttgattgaaacattgaaagcagtctaacaaagatgacagttgacttgaccctggcctatagtaaattctcaaaagtgtcaaaaagtatttaccgtaattatcaaacatttatctactatggtgatttactatgtgccaagtattcttttaagcactttgcaaacgcaaacatagataaacctcataacaattatcaaccccattttccagatgggaacatagttctgctgagaggttgagcaatttgctacaaacagaatgtggcagagccaggactcaaacatatgcagtctggctccaggatctaggctcccaactaccacccaatgtttctgaagagtggcggaaggtccaggccaccttttccagtggcttgccacccaaaacatacattttccttctctttcaaaatgttctgttcttttgtcttgatrtgtatgaaaaagcattttcatctccattttattaaagatggaaaattaggattcatgcttttggcatataatttatatgaatacaaaaaatgtgttttatttggcttttaacaaacccctgttacagttgtgtgtacatacatgc

SEQ ID NO: 59924 - DNA, 668 bp, Homo sapiens
ttagcatctttatcatgaaatatttgccaggtcttatgtccacaatgctatttcctaggttatcttccaggatttttatagttttaggttttatatttaagtctttaatccatcttgagatgatgtttgtatatggtgtaaggaagaggtccagtttcaatttcaatctgcttatggctagacttttatcttcagtatgggtaaacccttcctttttctgcccatgttgggttgcaattgctgcaaatgcccattagcaattattacccagcatagtaatactaaaatcatcccagggaaattcccatgtctcaaacatacacaatcttayccctgtggtagaataacaacccaaaatcatttcagtaatcaatattgattattccaggcagtgaattatcttctttttggcttgcttattcactgtcctcagggcctgtagtattagtcacagaacccaattcagtgggaattactacattccctgatgaaaatatttcttgtctggaaccacagccttcatcctagtcatgcctaatatcatgagcataggaagcaaaaattgtctgaataggttctagatgtgatggtgagaggggccactcctacttattctctttggttcaaagttctgggggagcacaatgttatggtaactgttgtgccac

SEQ ID NO: 59925 - DNA, 668 bp, Homo sapiens
ttagcatctttatcatgaaatatttgccaggtcttatgtccacaatgctatttcctaggttatcttccaggatttttatagttttaggttttatatttaagtctttaatccatcttgagatgatgtttgtatatggtgtaaggaagaggtccagtttcaatttcaatctgcttatggctagacttttatcttcagtatgggtaaacccttcctttttctgcccatgttgggttgcaattgctgcaaatgcccattagcaattattacccagcatagtaatactaaaatcatcccagggaaattcccatgtctcaaacatacacaatcttatccctgtggtagaataacaacccmaaatcatttcagtaatcaatattgattattccaggcagtgaattatcttctttttggcttgcttattcactgtcctcagggcctgtagtattagtcacagaacccaattcagtgggaattactacattccctgatgaaaatatttcttgtctggaaccacagccttcatcctagtcatgcctaatatcatgagcataggaagcaaaaattgtctgaataggttctagatgtgatggtgagaggggccactcctacttattctctttggttcaaagttctgggggagcacaatgttatggtaactgttgtgccac

SEQ ID NO: 59926 - DNA, 668 bp, Homo sapiens
ttagcatctttatcatgaaatatttgccaggtcttatgtccacaatgctatttcctaggttatcttccaggatttttatagttttaggttttatatttaagtctttaatccatcttgagatgatgtttgtatatggtgtaaggaagaggtccagtttcaatttcaatctgcttatggctagacttttatcttcagtatgggtaaacccttcctttttctgcccatgttgggttgcaattgctgcaaatgcccattagcaattattacccagcatagtaatactaaaatcatcccagggaaattcccatgtctcaaacatacacaatcttatccctgtggtagaataacaacccaaaatcwtttcagtaatcaatattgattattccaggcagtgaattatcttctttttggcttgcttattcactgtcctcagggcctgtagtattagtcacagaacccaattcagtgggaattactacattccctgatgaaaatatttcttgtctggaaccacagccttcatcctagtcatgcctaatatcatgagcataggaagcaaaaattgtctgaataggttctagatgtgatggtgagaggggccactcctacttattctctttggttcaaagttctgggggagcacaatgttatggtaactgttgtgccac

SEQ ID NO: 59927 - DNA, 782 bp, Homo sapiens
aaaaaaccatgcagctttttcctggttgtcttagaatgctcattctatggacacttcctaatggaatactccttcttaaagcccagccatcatgcagtaagaagcccaagccaatggagatagcaaaaatgattgttgtttaagctcactactttggggcattttgtagtgatagagaactggaactgatggaacctgatggtagctttattgtttcaatttttgagaccagaactctaaggtcatccttgacgcctttccttttctcacattccatatccaaaccattagcaaatcctgtcagctctctcttcaaatatgccccaagtctgaccaattctcaccaatctgaccaattctgaccagtatctcatctataaagtgaatctctcctaggcagagattcttggtgggaaacaacagaaactgactcgagctaattttcacagaaaaatattaggcaaaaggaacccagattactcacagaatagactgaaagggataagaaccaagttcagaaaaggatctgaaatcaatgggggttaggtgcaagaaccacagccagagaaccagctgggttggcgagctgcctctgttggacacagaacgcaccaccacaccagtgcaagttgtaggctgtctccacgccatggtctctctggcatctgacatccaaggaggtgtatcttactggttggatctagatgacatttctgagtcrcagctatcaggggatggggaaaaagagagtttgggctttttggatttcacagtaagaagta

SEQ ID NO: 59928 - DNA, 759 bp, Homo sapiens
ctcccaggttcaactgattctcctgcctcagcctcccaagtagctgggattacatgcgtgtgctaccatgcccagctaattttgtatttttagcagagatggggtttcaccatgttggccaggctggtctcgaactcctgatctcaggtgatccgcctgcctcggcctcccagagtgctgggattacaggtgtgaaccaccgtgcctggcctgtatattaattctttttttttttttttttttttgagatggaatctcgctcctgttgcccaggctggagtgcagtggcrcgatctcagctcaccgcaacctctgcctcccgggttcaagcaattctcctgcctcagcctcccaagtagctgggattacaggcatgcaccaccatgcctggctaattttgtatttagtagagacagggtttctacatgttggtcaggctggtctcgaacttctgacctcaggtgatctgccagcctcggcctcccaaagtgctgggattacaggcgtaagccacagcgcccagcctaatttttatggaagattagcaccacttgggtcataagcctttgtattaatactctatatggggaataagtaacgtgatagcctccttgagccatgtgctcctctctgcaggcaggaacaatcactgacagctccaccagcatcacacctcagtatttttttagttagttcatttcaactaaatttacttcaatatgtatttgttgaatgtgtattgtgagccaagccctgttc

SEQ ID NO: 59929 - DNA, 759 bp, Homo sapiens
ctcccaggttcaactgattctcctgcctcagcctcccaagtagctgggattacatgcgtgtgctaccatgcccagctaattttgtatttttagcagagatggggtttcaccatgttggccaggctggtctcgaactcctgatctcaggtgatccgcctgcctcggcctcccagagtgctgggattacaggtgtgaaccaccgtgcctggcctgtatattaattctttttttttttttttttttttgagatggaatctcgctcctgttgcccaggctggagtgcagtggcacgatctcagctcaccgcaacctctgcctcccgggttcaagcaattctcctgcctcagcctcccaagtagctgggattacaggcatgcaccaccatgcctggctaattttgtatttagtagagacagggtttctacatgttggtcaggctggtctcgaacttctgacctcaggtgatctgccagcctcggcctcccaaagtgctgggattacaggcgtaagccacagcgcccagcctaatttttatggaagattagcaccacttgggtcataagcctttgtattaatactctatatggggaataagtaacgtgatagcctccttgagccatgtgctcctctctgcaggcaggaacaatcactgacagctccaccagcatcacacctcagtattyttttagttagttcatttcaactaaatttacttcaatatgtatttgttgaatgtgtattgtgagccaagccctgttc

SEQ ID NO: 59930 - DNA, 656 bp, Homo sapiens
agggccaggtggaacagccttcctctgctccctctggacaagtctctgcctaccacgctgccactgaggccctgggggcgggtgggaagggaggaaggagatgtacaaagcagtgtatgaagaagattaatctggctgcagtggtggcagcgtgtggacggcttggagggtagagacagaaaccaattaggatactgcagcagtccaggcaggaggcctgagagccagctctggcagacagtgatgtgcctcttgcagagagggcatgaggggctggacaggcctcgtcagagctgagcagaggcttggaccagtcactcgtgctctgcccaagcccgaccccagccagctgccatcgccccagcttccacctgctccactgaccctgaaatctctgctcttctgttcagactcctcagctcacctcacctctgcttctgatgggcctgcctgctgctcccacccacccaggacaggggcrcagacaggctgcagtgaggcagtgagggtcactgggtcagtgggaggcaagtcttcaaggaggtgtgggaagtcagggaacacctcggtggcaggaggtttcctggaaatctcacaggcctcatcatgtagatcatggtcctggtcttccccagcccccggaagctctccagttt

SEQ ID NO: 59931 - DNA, 1485 bp, Homo sapiens
gttaagagaggtgaaaggatttgtgtccaaggttgcagtaaaatgagggctggaacttgggtctctgcagccctggtctagggttcttagctatgcaccactgctcactgcttctgcccatcaggcctcagctggacctgggccccacttctagctgccaatctcacagaaattggaggtatatgtgtgtggggggggtggcagggagggggcattgattctgcaagactttaggagggagtggtgtgcaagaatcctaactccttacctggtgagtgatccccacatcggtgcgtagccccagggccaaaacttcctccagcctcaaagaaaaatcaccaaggagtcttagagaggaggcctgtgctcctcccattctccaaattctacactgggatgcatttagaggaggctaacagggaccatacagtatgtggcaaggcaggggccaggacaagacaggaaataaaagatatacaaatagacatggtcttggggtgtggggaycctggaggagagccctgtgcccttggatgctcacagctccagcctgcccagggggacacgcttccgggtgccatggccaaacagcatcacctccttcatccagttgtcaggctccagtgtctggatccgagcctcccgggtgtggcctccagccccctggggcataaatcgtccatgggcccctgacaacatcaacaaccatccccacattaatggctgttaatactatgtgtttaccagatttaaatcatgtggtccctggagcaactgcctctaacatactggaaatataaattatttttcttttcttttctttctttctttctttcttttttttttttttttttttgaggtggtgtctcactatactgcccaggctggtcttggacgcctggggtcaaacgatctttccacctcagcttcccaagtagctcagattagaggcacatgacaccaggcccttttttctttttcttttttttttaatcatctatcccaaaatgccaagacatataaattcttgggctctcctctagccctgtccaattgggaattctgagggtggggcccagcagcttgggttttaacaagccctccaggagattctcatacacactaaaggctgagaaccctagtgcaaggtgcaacattaagccccttataattcatgctcaacagttctatagggaggtattattttttgccacattttacatatgagaaaatagaggcttggagaggttaatgtggcccaagttcacacagccacgacattcctctcctgagtcaccctttctgtagttcacgggactcaccaggcccaacgccaaggtactgaccacactgccagtaagtccaattgtgggtactgagcgccccctgcggggagggaggaaatagtgcagagtgaagagggcaggcctcatttttagactcaggtaaggggccccaggttagaatgtcccaccatctcggcca

SEQ ID NO: 59932 - DNA, 406 bp, Homo sapiens
cctcctccatgaagccttctatgattatcctttattgatttattttcccctctaaaatcccatagcaccctttacagggcttggctctcagtgcaaaattccttactttgcctacttgtgtgtttgccttttctctccaattatagtataaggtccttgaacagaagtctgtattactgagtgattgaatatgtgtttcatgagtaagaggtctgtctctgcccaagtagtaattcctgcatcacttgggccattgcccaagccctggcacacagccactctccttggccaccctaccatagtccccagtcattcrgctactgtgcaccaagacttaactgtgaatccctccagcctgttctaaccctggctggtaatatctgtgttccctagtttgagatgagag

SEQ ID NO: 59933 - DNA, 781 bp, Homo sapiens
aaagactttttcttaccttttttaccttttttcacattttctgctggaaaaaaatgaaatgtcagtatctagatggacttttaaataatttagttgctcatgttttttaaaggtaatgggatataatgaktattcttgacatgaaaattttactcagatgatacatttgacataattgggcctataaaactcaatttgtggatttttaagatgtcatttttgaggacatggattgactcttcattctgttatgaaatcatcataggtaggtatgtcaaatacagaggtagctttattaatgcacatccaaactacagctcctcatctaaacagaaacccaggaaccagcaaattgcagtttgatgcttacaactcaccaaccctgattgtcagtgaagtcaagttttgataataaccaaaactatagtgagtcagtagcattttatctttgttatttagcatttttgtaacattttgtgttttcaaagggaatatcatcaccatttctcctagtcattcaagagaatatctacctgcatattttctctggtatgtaagaaccaccataactgttcatttcaaaccctagcacatattctgaaaatgtttttagttctttcctccaaaaggaaatgaccttaagaaaacttactttgcaatgaaaaggattccaaaaggaagatacacacacacacacacacacacaaacacacacgcacacacacactctgggctatttggaggtttgtatagattaattgaaatgtagccccatcctgta

SEQ ID NO: 59934 - DNA, 597 bp, Homo sapiens
acaaatgaccatgattcctcagtaatcaaagtgcacttccaatttacaagtctaaaatgaaataaggccaggtgcagtggctcttgcctgtaatcccagcacctcgggaagccaaggcaggtggatcacttggccaaactctcaaacaggagtttgagaccagcctgggcaatgtagcgagatgccgtcgctacaaaaaagaaaaaatacaaaaattagccaggagtggwggcatgcgcctgtggtcccagctactcaagaagctgaagtaggaggattgcttgagcctgggaggtcaaggctgcagtaagttaatgatagcatcactgtgccccagcctaggcaacagagtgagatcctgtctctaaatgaaatgaaatatttatgaatgctaaatctagatgtaaggatgatatggtagcatgacatttgtagacattaattaaatatgtattcgattgtggtttctatttgaatctagaagccagtacatttttccaaggtctcatacattttttgcatgctcctgaaaagcttgcaagtattgtgcaaatggactaactgtccttttgcacagactcccacacttgggacagg

SEQ ID NO: 59935 - DNA, 948 bp, Homo sapiens
gctggatgctttcaagttgtgttttagaaaacttaaataatatttcatgagtatactctattttcaattgaaatattagattttctttaataggataagtaatggtttttcatcagcttttaagtgtaaaataataaagttgtccttcatcaattaaaaaaaaacacatttatagagcacctacttctacccttcaaagtccaatctttcagcatccctaagcttccttagcccrtctcaggaggaggcaggggatgggggctaaggaaacttaaccaaatcactcctcctctcctaagtctttaccttcaccccctttaatagtcatttttcttccaaatcaaacaataacaataatagcaaatacttatttagtatttattgtatgtcaggtcttgtttcatgtattagctcatttaatcttcataactctatgatgtaggttactatgattataaactccatttttcaaatgaggaaactgaggcacagaaatgttaagtaatttgcctaaagtcacaggatttaacaattggtagagccgcaattcgaaaccatgttgcccttagacttcctctttaacaaatgtgcttaaaatctcttccacattacacatgtgtgcacacacacgcacacccctccacctctggggcctttccatttttggtcaccctctttcaagcatagaagcacagtgtctcacctctctctctctcaactctcattctaattttcttctgcaggcattatattatagacctcaccaccttttctttaaagatctatagtgttctatactttttatgaagtcctacatttttacaagcctattttctactcttactggctaataaaatcctgcctaaagccagagcctgaaagcttcataattaaccattgctagtgaaaagaaactccagggagatgaggttatcgatgcaggtataa

SEQ ID NO: 59936 - DNA, 494 bp, Homo sapiens
aatgattgtggttagtccaattccatacattcraggaccacaagatcaaaaccaaagaaaagatttcttaactgtagttgtggatgcaggttacccatgctctctgaaccttaattacattacttgcaaaatgaagggtttgagctaacttgtctcatggatctgtgctacatagaatagcaatgttgttgagagtgactttacagccagattgcccggggttagtagctcaactgtgtcacctcagcagtgcaataggccattgtaatgtcagcactgcctatgattttgttatcgatatcacagatgtttctgtatcacattaaaatttttcaggtacctcagaatattatttacagtcataattccttcaaaattgtagtagttagtggacctgcttctagatcttattgctgaatgaattaatacaagcacatatattactatattatatggttttattttgaaaactgtgttataatatacttgatttc

SEQ ID NO: 59937 - DNA, 490 bp, Homo sapiens
  misc_feature (1)...(490): n = A,T,C or G
tggnnnnnnnnnnnnnnnnnnnnnnnnnnnnnnnnnnnnnnnnnnnnnnnnnnnnnnnnnnnnnnnnnnnnnnnnnnnnnnnnnnnnnnnnnnnnnnnnnnnntgtaaggtatttactgagagaggctgcatggcaaggaactgcatgcaggtagcctctaggacctgtgggcaacctttagcagatagccagtgagaaaatggggccctcagccatatagccacaaaggaatgaattttgccaataaccttactgagcttcttcagttaagccaccagatgagaacaaagcctggatattgcctttatttattgtcctgagatcctgagtagaggaacctgctaagccatgcccagactcctgacttacagaaactgtgggataataaatacatattgatttagccactaagttcatggcaagtgttatgcagcaatagacacatgaaatagtarcaaatagtgaatgagatacctaaccttaattcaa

SEQ ID NO: 59938 - DNA, 592 bp, Homo sapiens
cttgaaatgtcatacagctgtggaaataaatattttcaataccatgcatgactctaacaaaaataatattgagcaaaaaagttacacactgagaataaaaacagattaaacttaaccacaatgattaccaaaatgggtttagagagtacaatttaaaagaaaaggaaagagtgattagcgtaaaaattagaatgactgtaacattttaggaagggagagaaggaacagcaagtgaaagaagaaattagggttatttggagtgagagaggtgggggttactggcagtgttttatttcttgtccatggtggaaataaaatcggtattcattttgcgataaattattctgtatattttcccttaagtgtgttataatttttaataaagaaacactcaaagctgtaatatgtagaggaaattttacatgtaaattrtttttccaaagtataaaattaaaaaacaatcatagggcaaaaggagcagcaagaaataattcttcaaggcaatgacaaactttaaaaggttcagataatgtgaattgtagatgtgctgttctatctataaaattggtctgattgtgtacacatgttgggc

SEQ ID NO: 59939 - DNA, 914 bp, Homo sapiens
gactgcacagtttcctgaggacactgcatgcaaaacctgcctggaacaggttgctacagctgtggatagagtatgagtgtagaatgaaaggattttgaagtggtacataagaaatgtccagtgcaattcttgacacttgataagtatgttaagggctataaatataaatataaacatttttattaattaaccactaaatattattaatataataatgcaataaatcagagtatgacattaccactgtgtgagataaaatgttctaagaatttgaacatagcactatacaggtaaaaaagaactctgacaataactgtcaaccttggaattggaatgcaatgacataaaatgaaaacttcccattcgacttctcaaagttaattcttacatatgcctctcttttcctttcttaacttcacctttattaaaaaatattttatccaaataaaatatttcaagttcagcaacatcattcattcatttgtattggctacctactgtgtgtcagatatttttccaggasctgaagataccacagtgaacaaaaaagtttcaagtcactatgctgattgagcttacattctagtggtggaaacaaataattgaaggcgaaagggcccattgatggaaaagcattgcatgtagaaagaacagctgtgcaaaggactcaagcatgacttatgtatttagaaaaatgtaaggaggccggtgatacaagaatgtagtgagtgatggaaagagttattaagagaagttagagaggatacaggtccagattttgtagctttccatgtaattgtacacgttggacatttgatgaatgagagagatagccactggagaatatcaaactgaagaatataaagggatcactttggctcctgtgatgagaaaaatattttgggatgcaaaga

SEQ ID NO: 59940 - DNA, 2956 bp, Homo sapiens
  misc_feature (1)...(2956): n = A,T,C or G
ttgctcccgtctaatatgaccagaatgagctggaataccacactgaccaaatctggatctttggactaaagtattcaaaatagcatagcaaagctcactgtattgggctaataatttggcacttattagcttctctcataaactgatcacgattataaattaaatgtttgggttcataccccaaaagcaatatgttgtcactcctaattctcaagtactattcaaattgtagtaaatcttaaagtttttcaaaaccctaaaatcatattcgccaggaaattttcctaaacattcttaagcttctatttttcccctgccaaaggaaggtgtttatcattttaaaatgcaatgtgatttagtggattaagcaggagcgctggttcttgtctccattgccttttcttatatcattgataatgatgtaagaatcacaaggggccgggcgcggtggctcacgcctgtaatcccagcactttgggaggccgaggcaggtggatcatgaggtcaggagatcgagaccatcctggctaacaaggtgaaaccccgtctctactaaaaatacaaaaaattagccgggcgcagtggcgggcgcctgtagtcccagctactcgggaggctgaggcaggagaatggcatgaacccgggaagcggagcttgcagtgagccgagattgcgccactgcagtccgcagtccggcctgggcgacagagcgagactccgtctcaaaaaaaaaaaaaaaaaaagaatcacaaggtatttgctaaagcattttgagctgcttggaaaaagggaagtagttgcagtagagtttcttccatcttcttggtgctgggaagccatatatgtgtcttttactcaagctaaggggtataagcttatgtgttgaatttgctacatctatatttcacatattctcacaataagagaattttgaaatagaaatatcatagaacatttaagaaagtttagtataaataatattttgtgtgttttaatccctttgaagggatctatccaaagaaaatattttacactgagctccttcctacacgtctcagtaacagatcctgtgttagtctttgaaaatagctcattttttaaatgtcagtgagtagatgtagcatacatatgatgtataatgacgtgtattatgttaacaatgtctgcagattttgtaggaatacaaaacatggccttttttataagcaaaacgggccaatgactagaataacacatagggcaatctgtgaatatgtattataagcagcattccagaaaagtagttggtgaaataattttcaagtcaaaaagggatatggaaagggaattatgagtaacctctattttttaagccttgcttttaaattaaacagctacagccatttaagccttgaggataataaagcttgagagtaataatgttaggttagcaaaggtttagatgtatcacttcatgcatgctaccatgatagtaatgcagctcttcgagtcatttctggtcattcaagatattcrcccttttgcccatagaaagcaccctacctcacctgcttactgacattgtcttagctgatcacaagatcattatcagcctccattattccttactgtatataaaatacagagttttatattttcctttcttcgtttttcaccatattcaaaacctaaatttgtttttgcagatggaatgcaaagtaatcaagtgtttgtgctttcacctagaagggtgtggtcctgaaggaaagaggtcccctaaatatcccccaccctggtgctcctccctctccctggtaccctgactaccaggaagtcaggtgctagagcagctggagaagtgcaggcagcctgtgcttccacagatgggggtgctgctgcaacaaggctttcaatgtgcccatcttaagtgggagaagctagatcctgtgcagcagcctggtaagtcctnnnnnnnnnnnnnnnnnnnnnnnnnnnnnnnnnnnnnnnnnnnnnnnnnnnnnnnnnnnnnnnnnnnnnnnnnnnnnnnnnnnnnnnnnnnnnnnnnnnncccatttcatttcaaagtgttgatttccactgcactccttttagaatttataataaagattgtgcaatcaaatataatattctttaacaagggaggaagcagggaagtttgtgattattaggaaaatccaggacttaccacgaagatggccagagcccctgtagttctggggaagagccccatcattgtctctgatttccctggtgaaaaagtccaagtgagccgctgcttctatcctgccagccgtctgcagttgatgtctaagaaaagccctctgcagcgtctctgctgctttccgaaggagtctacagatggtctgttatgcggtccctccccaccctaaaccaagggtaggtctcaccagaaacgcttgcatcacctttgctcccaggtaaaaacttagccacacctcgattcctaaagcaatgaaatcctttgttggaagctgaaagaaaagttcacaggctaaagacaaagtttaataggaaggtaccagatgaataataaattaatcatgatgtggaagtgcaaaagctagtccggactacactttgtcagtgttgatgtcttatggctgaatctagttgactatggttacaatgaaaaccgaaaagcaaagcaaaacgtacaaaatcccccaaaatctaacttgtaaaagagcatttattttcagcctgagtatgtgtgggtagatctaaagttaagcaaaatgtagatgttaagcaatgatatattttattgaaaggcactaaaaatatgaagaagaaaaacatcccattaagcaactatgaatgtaggctttgaataaaaaaaaaaaaagaaataaaattgaacagttatatggtgccttgaatatttgaaatatataaataatgcgttgcaaaattactctgataatactcaaatgac

SEQ ID NO: 59941 - DNA, 665 bp, Homo sapiens
ttgccaatgaggacagtatagaggttagcatttttgctgacacttaagtgaaacatttccttctctcttaatctttgcatttcttttcagtcgtgggatgctcgtgaattaagaaacaaccaaaaatgccaaatattgagactcttgaaatcaaattaagtatgatctgagattaagaacttctgagaagaatttaagcatgaacatatatattgacatgaagtccacttacaatgaagaaaggagtgacctctcgatcaactatggatgttatattaatttcaccagttttctgattaatgacaaagatcccatatggtggctgatcaattcctactccagagatgcggtatgtaacttgctggtttgcagcacaatctgagtgaatctgcagaaggaacacaagtaaaaatattagagggagcaaatagagttctatatttgatatacgacagctttcttgagagttgttgcatgtgatgaccttgttatttaggaaatgttgtcaatggagattattttcctagataagagtaacaattacagctctaatattttcaatggtaactgacaatgtaatcaaagaaattcggtttctgcttctatgaaacatgaaaaaatgcgaaawatcaccctactatatctaagtctatgcaatcatcatg

SEQ ID NO: 59942 - DNA, 1082 bp, Homo sapiens
tctctggctaattagtgctctgttttctatgtatactttggaatggggaaagcctccatccagctcactctggaaggaaataaatttgaactttgattttacattatgaacaaaaataaattctatcatccctagtgacataaatgtagaaaataaagcaaataaaaatgtgaaaatataatataaaagcttaactttataatctagagattgaggattaaaaaaatactgaaatgttgaaaattatataagaaaatatggaaatatttgaatatgtaaaaggtatccaaaatatggcaagagatgtaaacagcatcaagagtcaaaaaatttgccttagtatttctaatgctaaaacttacaatacataagaatttctactaaactaattttacagtgataaaaaatgaaaggcttagagcaggagtggtataaggccgagaaaacaagacaaatatgtatattttaaaagtaatatcacgttattttatayaagtaaaagcgtgtgtgtagtatacatgcatatatatctatagaaagagaaacagacaattatagtctatgaatagtacttaatttagggcaataagaacttaagtttactttctttaacatattaatatatgcaatttgaaaataaagcagagaaaagcaatacatgttttgttgtgaaaaactgagcagatctagcttttccaggtattttgtggggtgttcagttcactctatcttgtactagttttttttaatctgctaaacattcatgaccattctctgagctagggtttaaaaatgaaaactttacttgctcttatgagacttgtattctaatggataaaatagatgggaaaacaaacgcattattttctactgtaataagcaccataggccgggtgcggtggctcatgcctgtaatcccagcactttgggaggctgaggcgggcggatcacctaaggtcaggagatcgagaccatcctggctagcatggtgaaaccccctctctactaaaaatacagaaaattagccgggcgtggtggcaggcaactacaagttgcttgtagtcccagcaacttggaggttg

SEQ ID NO: 59943 - DNA, 1082 bp, Homo sapiens
tctctggctaattagtgctctgttttctatgtatactttggaatggggaaagcctccatccagctcactctggaaggaaataaatttgaactttgattttacattatgaacaaaaataaattctatcatccctagtgacataaatgtagaaaataaagcaaataaaaatgtgaaaatataatataaaagcttaactttataatctagagattgaggattaaaaaaatactgaaatgttgaaaattatataagaaaatatggaaatatttgaatatgtaaaaggtatccaaaatatggcaagagatgtaaacagcatcaagagtcaaaaaatttgccttagtatttctaatgctaaaacttacaatacataagaatttctactaaactaattttacagtgataaaaaatgaaaggcttagagcaggagtggtataaggccgagaaaacaagacaaatatgtatattttaaaagtaatatcacgttattttatataagtaaaagcgtgtgtgtagtatacatgcatatatatctatagaaagagaaacagacaattatagtctatgaatagtacttaatttagggcrataagaacttaagtttactttctttaacatattaatatatgcaatttgaaaataaagcagagaaaagcaatacatgttttgttgtgaaaaactgagcagatctagcttttccaggtattttgtggggtgttcagttcactctatcttgtactagttttttttaatctgctaaacattcatgaccattctctgagctagggtttaaaaatgaaaactttacttgctcttatgagacttgtattctaatggataaaatagatgggaaaacaaacgcattattttctactgtaataagcaccataggccgggtgcggtggctcatgcctgtaatcccagcactttgggaggctgaggcgggcggatcacctaaggtcaggagatcgagaccatcctggctagcatggtgaaaccccctctctactaaaaatacagaaaattagccgggcgtggtggcaggcaactacaagttgcttgtagtcccagcaacttggaggttg

SEQ ID NO: 59944 - DNA, 564 bp, Homo sapiens
ttgggaggtaattaggtcatgacagaggagccctcatgaaacagattaatgcccttaaaaaagacaactcagaaaggtctcttgccctttttctgcaatgtgaggaataagaattcggcagtttgcaacctggaagagatccctcatcagaaccagagcttgctggcactctgacctcagacttccagccttcagaactatgagaaataaatttctgttgtttataagccatccagtctatgatattctgttatagcagtccagactgactaaaacaattgccagtattctctcttgagtacttaaaagaaaaaatatataagaaaataatayatttcatagaaaaatattttttcactttctaaatgatgataatgatacaatataaaaattataaaattaatgtgaaagtaaccaagcttagaaaagccaagaaactgagttgatgaatttagactgatataaagatagtgaattataatttattcccaaaatacaaaaaatattcccacagatcacttatctatactttttgtcaaggacctgaagcacttaccaaaaaat

SEQ ID NO: 59945 - DNA, 893 bp, Homo sapiens
tgcacactaatacacaccaacactaacagggcatcagcagctagagcttcatgctactatgcagcaaaaatctctagcattatcttatggattgcccaggtatttacacgtccaatcaaaggtgaagttcatagtcaatcctatgagagagaagagcaatgctctcagtggcattttggaacttccacaacctcatgaaaagctgtgagcacagcttactgtrtgttactgtcaggaggtaaagggactctctgctgtctcacatcgtctacaccctgattttgatgaggaaatgttgcctagaaaagtaatattatatcaatggaagacagtgaatacaaagatgtttatatggcagatggctaaatatttgttgattttaactgaggcagagaaagtctacactggaagtaacaacaaagtacattttcctaaaagtttacacattccccaaaatatcacaaagggattctttggtatacctcatctcaaaattaccaaagtgattaaatataatcagatcttgaatccaggaatttcacacttttcctttattctgccaccagtttttacatgtgaggcttgattgttggcccctacccggcttaggtcttccaactttacctgtaagccccagggtcttgcctgtggccactgcccaactgaggctctgctcctgcctagagcctcttggcttcaagcctaaactctgacctgttcttgccctgcaggtgttttggcattcctggtctgactttggaaggagtccaggctttctctgatctctgggacactttacctaggccacgttctttgttttcagctactgtaatctttttcagaattccatgaaacagtttcatttttgttcctttcctttataatttgtagga

SEQ ID NO: 59946 - DNA, 1070 bp, Homo sapiens
gctgcagataataattgaggatctgaagcttgattggaaagtcagtattttagttaatgagataacttttccataaatctaagatgataagacacaggttaaggtcagaaataaatcaggcagtagtcaggacacaaaccaacaagtacaatcacaatgtccaggggaaagaaactaaggaaacagtattggctagtcagctgatttcttttcctcacttccttaacaccttcactaatcttctctgaatttgtccttctttgggaatacagtgggccagtgtgactggctgagaacagcttacttattttgcagtgcgtgccaacaggtctacctgtctggaattctaacagctgaatttctcccgatgtgcaccagaccccctcagtagcagccacatcaaatgctctatctaccagggactcttctcagcactccgcaggttgttgatgaaacaaaaatcagaacaatgcaatttagttcatatggaagttactctcatgaaccctggaaccattagcactattaggggtactcttcattcttaaaaaagacataagaggccgggcgcggtggctcacgcctgtaatcccagcactttgggaagccgtggcgggtggatcacgaggtcagaagatcgagatcatcctggctaacacagtgaaaccccgtctctactaaaaatacaaaaaattagccgggcgtggtggcgggtgcctgtagtcccagctactcgggaggctgagacaggagaatggcgtgaacccgggaggtggagcttgcagtgagccgacatggcacactgcactccagcctgggcgacacagcgagactccgtctcaaaaaaaaaaaaaaaaraaaaagaaaaagaaaaaaaagaacaagacacaagaaagcaagaaagcaatgtcccacttattccactagcattgagaatgaagtccacacctagagagggtagagccaagagaattttgaagagatggagccagggtcttcatttatcctgcctgaagagtgccttgccagtagacttctttttgtatgctatgagccattagttcctgcgc

SEQ ID NO: 59947 - DNA, 1202 bp, Homo sapiens
acttggcagtgggtttgcatgtagtaaagattagagaaactgtggtagtggtcgttatccaagtcatcgaagttattgttacaattattagagactggggcttacatatgctagtactttgtatgatattcagcctttctaagcctcggtctcttcatctataaaatgagagagttggactagatgatcctacttctggaaatctctgatcctgtcattgattatatataatctagttgaaggcaagccttgtgtcatattcctcttttgcagtcaccctaggatctcgcacagagcacatgtwctcagtaaattatataactaagctaaaaccagtgttttttaaattatacgtttatttgtatatctgtgtatctgtatatgcgtctgtgtaagaaatcttcacctgtagaacatgaagaactgtccatgtgcacaatgtttcccaaggtgtggtaaatcagggactcttttggttaggagacaaccaagagattaatcctctagaagtctaacactccctcagataaatgaatatggtttgaggtatactagtatgccctggagttccctattttatcagtgggtaaaagagtgctggctctgaagtcccagtcagagggtttcagggcactctcttgcccaccggcaaggtcctggaagctagcctggtctggacctcagtcaggaccctaaaactggtgcttcctactcggatgaatcttactcaaactggcctccttcacgatctgttgattttagtgttcagattttggaatgatgcctggtgattctggaggcaaccaggaggctggcctcctggagagttagacttacatcagagccattgtattttacttaataactttgtactaatctcatttttttctttttgcaaaaaaaaaaaaagagcagtaagagaaagtttgagaagatcatagccatttattgccatattcttagtgttgttatggccaagaacatttgtctgcaaagaagctcttggttgcctacgagtgggccagctcctgctgtttgtacctcagctgaggtgatgattctctatgacatcacaaccctccccacagcaacggaatgtgacctgaggtgcagaagaagcaatgagattgataaactcttaagagataatgactatactctcctatttagcaaaaaagaagataaatgcaataactgcccca

SEQ ID NO: 59948 - DNA, 901 bp, Homo sapiens
ttccttgaaggatgacatcctatatcaggaatatcacacaacattccttcccctcttctgcccaagtgaaaattttatatgcttaatagtctgtgttcttaatcaaatcatctatcacacaccctcaaatttttaataaaatctcttcaaccatttcatatagtgctcaaactcaccgaaaagcatgaggttaaattgaaatagttacaataacagattttttttagaacaggctctctcttaacttccaaagcctggtatcagagctttatgtttacataacgcacatttgaatgtcttcattattttatatgttgctttttactcgtatgttttgtagaaactcattaagctggaattgagttatcttcctaaattttactatacaggaaattatccttttccattttaacaagaaaggtgctgcaattgttctttacacaaaagtgaaggggattgaacatccctacctctgtctccagctaggctgctatatcaaacaaaagtctttctcattatgatgaatgcaaaaacctggctgtccctaagaagctaaccactggagggtaaatagctaaaactcctttttaagaaaatataatttctccacaggagaacaacgggacagggaagtttctgggcagcagctgcagttctgtccccaatgtgtcccaggctgagcttgatttgatgctctgcctcccatggagggcatagatatrgaagctagcttatccagtgcctttaacttctaatgcacatagcaggaattggttttacctccacaaatgagcatccaacctctatttagttaatttcacaatgacttgcattttctgtactaggaagaatgaaaaaaaaatagttacacaaataatttaaatcccacattatattaatt

SEQ ID NO: 59949 - DNA, 834 bp, Homo sapiens
acaataacgctcataggtatttgaggcttttctggataccaaggctgtaaactgttcttttaaggctcatggttacaaataagcagtgaccattcttttacatgtcaaaatgaatagagtgacagtcccacatctgaggcttgttacttgtctggtaaacattttttcagcatgcaggaccaaagccagttgtactgggccagcccagaggggtcactggtgctaggttagatgcacaggccagcttgccactcaattcccattccagctgcagaggtcactttgccagaagtccwgcaactcaggctgtcagaaggtgttaaagcaaatgtgttttcaacaataaacatggcataaaataagaccctggaacaaaagttgagaaaaggaaaaaaaattaatgttgttatctgaaaacctaatgattttacggataataaaaatggcaaaaataacacatttttatctctaagtgcttgagcaatacgttaagtatcccaaagtattttaggatagacatttgactaagtacttgcctgttatctttcagaaaaaattaaatatgattttatttgtttccctaattatactgttacagttttttttttaaactgtttttagtttcttaactgttagtttttttcccaaaactaactttactgttttttggagccatctatttaatggaaaatgcaaacctattaatgtaatccaatggaataagacagattacatgccaggaaatggaaagaatcatattgtctagaaagcgattactcctgaaagtttttcactttttgttggaagatggaagagtactagtcatttgaaagc

SEQ ID NO: 59950 - DNA, 834 bp, Homo sapiens
acaataacgctcataggtatttgaggcttttctggataccaaggctgtaaactgttcttttaaggctcatggttacaaataagcagtgaccattcttttacatgtcaaaatgaatagagtgacagtcccacatctgaggcttgttacttgtctggtaaacattttttcagcatgcaggaccaaagccagttgtactgggccagcccagaggggtcactggtgctaggttagatgcacaggccagcttgccactcaattcccattccagctgcagaggtcactttgccagaagtcctgcaactcaggctgtcagaaggtgttaaagcaaatgtgttttcaacaataaacatggcataaaataagaccctggaacaaaagttgagaaaaggaaaaaaaattaatgttgttatctgaaaacctaatgattttacggataataaaaatggcaaaaataacacatttttatctctaagtgcttgagcaatacgttaagtatcccaaagtattttaggatagacatttgactaagtacttgcctgttatctttcagaaaaaawtaaatatgattttatttgtttccctaattatactgttacagttttttttttaaactgtttttagtttcttaactgttagtttttttcccaaaactaactttactgttttttggagccatctatttaatggaaaatgcaaacctattaatgtaatccaatggaataagacagattacatgccaggaaatggaaagaatcatattgtctagaaagcgattactcctgaaagtttttcactttttgttggaagatggaagagtactagtcatttgaaagc

SEQ ID NO: 59951 - DNA, 970 bp, Homo sapiens
ccattgcccaaaccctgtggtgacacctttgtggatgccaaggcacacagggatacacacacacatacacacacacatatacacaatttacatcccacattgtagaaaaaatacatcacacagtttagaagaaatgaacaggggaattttgcagaacataktccagagagatttattctcagtattttcactcttaaatgggttggaatgtgtagggtgaattctacaggaacatgttctaattcaaaaagcaagtgctttcaaaatggtaacaaaattaagtaagtgttaggtgttgcctcccttattctctattctccctcatattaacatatgtaaattacctccagacctgggtttcccatcctcccacatatacctgagaaagagatatgattacatgcccagaagctttgtagggagccaatgttatgattttagaaacattttgtaaggtgtaattcacggctcacaattccacactgttataccaaagcagttttcctcattttcaaacataacaacagttttagtttgaatgcttttgatagaacacatcaggtaagaaacaagccataaaagaccacagattacagggaatttaaaaaagagggtaaaactttctagaaaagttttcaaagtatcttaacgctttggaaataacaggagtcattttgcaactatgtctatatatatatactatgtgcagaatatattagatatctgtttcagagttcaattcttctacattactccttcagaagggtttaaattcccctttccctcttttctttgctaggagccctctgtgccattagctatgtttactctgctcatttctttctgttctttgttacctcttcctgtaactaggaattcaggccacaaaggacacaccgtgatttcacaggtctaagtcaagttaaccaaattatttaaaatactgcaaatttaattcaagaagagcttc

SEQ ID NO: 59952 - DNA, 970 bp, Homo sapiens
ccattgcccaaaccctgtggtgacacctttgtggatgccaaggcacacagggatacacacacacatacacacacacatatacacaatttacatcccacattgtagaaaaaatacatcacacagtttagaagaaatgaacaggggaattttgcagaacatagtccagagagatttattctcagtattttcactcttaaatgggttggaatgtgtagggtgaattctacaggaacatgttctaattcaaaaagcaagtgctttcaaaatggtaacaaaattaagtaagtgttaggtgttkcctcccttattctctattctccctcatattaacatatgtaaattacctccagacctgggtttcccatcctcccacatatacctgagaaagagatatgattacatgcccagaagctttgtagggagccaatgttatgattttagaaacattttgtaaggtgtaattcacggctcacaattccacactgttataccaaagcagttttcctcattttcaaacataacaacagttttagtttgaatgcttttgatagaacacatcaggtaagaaacaagccataaaagaccacagattacagggaatttaaaaaagagggtaaaactttctagaaaagttttcaaagtatcttaacgctttggaaataacaggagtcattttgcaactatgtctatatatatatactatgtgcagaatatattagatatctgtttcagagttcaattcttctacattactccttcagaagggtttaaattcccctttccctcttttctttgctaggagccctctgtgccattagctatgtttactctgctcatttctttctgttctttgttacctcttcctgtaactaggaattcaggccacaaaggacacaccgtgatttcacaggtctaagtcaagttaaccaaattatttaaaatactgcaaatttaattcaagaagagcttc

SEQ ID NO: 59953 - DNA, 970 bp, Homo sapiens
ccattgcccaaaccctgtggtgacacctttgtggatgccaaggcacacagggatacacacacacatacacacacacatatacacaatttacatcccacattgtagaaaaaatacatcacacagtttagaagaaatgaacaggggaattttgcagaacatagtccagagagatttattctcagtattttcactcttaaatgggttggaatgtgtagggtgaattctacaggaacatgttctaattcaaaaagcaagtgctttcaaaatggtaacaaaattaagtaagtgttaggtgttgcctcccttattctctattctccctcatattaacatatgtaaattacctccagacctgggtttcccatcctcccacatatacctgagaaagagatatgattacatgcccagaagctttgtagggagccaatgttatgattttagaaacattttgtaaggtgtaattcacggctcacaattccacactgttataccaaagcagttttcctcattttcaaacataacaacagttttagtttgaatgcttttgatagaacacatcaggtaagaaacaagccataaaagaccacagattacagggaatttaaaaaagrgggtaaaactttctagaaaagttttcaaagtatcttaacgctttggaaataacaggagtcattttgcaactatgtctatatatatatactatgtgcagaatatattagatatctgtttcagagttcaattcttctacattactccttcagaagggtttaaattcccctttccctcttttctttgctaggagccctctgtgccattagctatgtttactctgctcatttctttctgttctttgttacctcttcctgtaactaggaattcaggccacaaaggacacaccgtgatttcacaggtctaagtcaagttaaccaaattatttaaaatactgcaaatttaattcaagaagagcttc

SEQ ID NO: 59954 - DNA, 1128 bp, Homo sapiens
gtctcccagtccctcggtggcagatgttcctcctagctggtctagtcggccatcttgcctccatctctccagttccctttttggaagtcaaatttatttggtataatatagtcattccagtcttccagtacttactttgcacagtttaattttcaatcatatgtacttttttattgygttgttttggttaaagcatgtctcttgcaaacagcatatagttgatattgctttttcattcattatgaaaatattttaattagagtgtttaatttgataaaatttaaagtagctaacaatgcagttaatttagttccaccattttataattgatttcctttaggcttcttgttttctgtttctccttctgtgttttctttgagagtaactgaatatttaaaattctatttaatttatctttggaatgtttagctctgtatctttgtattatatcatgatggttactctacaggttaacatatatatccataagtttgtataatctacttataattaatgttgtggtccttaatgggaaatatcaaaatcttttaatcatatagagttatctacctggtcttgtgtgtgtgtgtgtgtgtgtgtttgtatgtataattctacatacttaccatattcactacaacttgttgctttaaacaatttttaaaaaccttgaattttataaaatctggtaaaaccaaaaggtctccttggtagcaccagacaaccttaagtgggtgattgacaaaatcctttatggcataacacattccactaaggaccagttggttgcactattgagcaaaaattgtggagagacttttttgagacagcagtggatattactgtcacatgccttccttttaagcactgtatttctggaaagcatataaaagtaagatacagagaacctataaacacctctaaatggatttttagtaattgctccccatatggattttgattatatcctagaaatagtatgtatgtttttgcatgatttgaaacattcagcaatcagaatgctacgaaagtcagagagtctgaaagctattgttttcattttctctacctgggggattccaaatatctatctggtgatttttaaagggcaatttataattgtttaat

SEQ ID NO: 59955 - DNA, 1128 bp, Homo sapiens
gtctcccagtccctcggtggcagatgttcctcctagctggtctagtcggccatcttgcctccatctctccagttccctttttggaagtcaaatttatttggtataatatagtcattccagtcttccagtacttactttgcacagtttaattttcaatcatatgtacttttttattgcgttgttttggttaaagcatgtctcttgcaaacagcatatagttgatattgctttttcattyattatgaaaatattttaattagagtgtttaatttgataaaatttaaagtagctaacaatgcagttaatttagttccaccattttataattgatttcctttaggcttcttgttttctgtttctccttctgtgttttctttgagagtaactgaatatttaaaattctatttaatttatctttggaatgtttagctctgtatctttgtattatatcatgatggttactctacaggttaacatatatatccataagtttgtataatctacttataattaatgttgtggtccttaatgggaaatatcaaaatcttttaatcatatagagttatctacctggtcttgtgtgtgtgtgtgtgtgtgtgtttgtatgtataattctacatacttaccatattcactacaacttgttgctttaaacaatttttaaaaaccttgaattttataaaatctggtaaaaccaaaaggtctccttggtagcaccagacaaccttaagtgggtgattgacaaaatcctttatggcataacacattccactaaggaccagttggttgcactattgagcaaaaattgtggagagacttttttgagacagcagtggatattactgtcacatgccttccttttaagcactgtatttctggaaagcatataaaagtaagatacagagaacctataaacacctctaaatggatttttagtaattgctccccatatggattttgattatatcctagaaatagtatgtatgtttttgcatgatttgaaacattcagcaatcagaatgctacgaaagtcagagagtctgaaagctattgttttcattttctctacctgggggattccaaatatctatctggtgatttttaaagggcaatttataattgtttaat

SEQ ID NO: 59956 - DNA, 1128 bp, Homo sapiens
gtctcccagtccctcggtggcagatgttcctcctagctggtctagtcggccatcttgcctccatctctccagttccctttttggaagtcaaatttatttggtataatatagtcattccagtcttccagtacttactttgcacagtttaattttcaatcatatgtacttttttattgcgttgttttggttaaagcatgtctcttgcaaacagcatatagttgatattgctttttcattcattatgaaaatattttaattagagtgtttaatttgataaaatttaaagtagctaacaatgcagttaatttagttccaccattttataattgatttcctttaggcttcttgttttctgtttctccttctgtgttttctttgagagtaactgaatatttaaaattctatttaatttatctttggaatgtttagctctgtatmtttgtattatatcatgatggttactctacaggttaacatatatatccataagtttgtataatctacttataattaatgttgtggtccttaatgggaaatatcaaaatcttttaatcatatagagttatctacctggtcttgtgtgtgtgtgtgtgtgtgtgtttgtatgtataattctacatacttaccatattcactacaacttgttgctttaaacaatttttaaaaaccttgaattttataaaatctggtaaaaccaaaaggtctccttggtagcaccagacaaccttaagtgggtgattgacaaaatcctttatggcataacacattccactaaggaccagttggttgcactattgagcaaaaattgtggagagacttttttgagacagcagtggatattactgtcacatgccttccttttaagcactgtatttctggaaagcatataaaagtaagatacagagaacctataaacacctctaaatggatttttagtaattgctccccatatggattttgattatatcctagaaatagtatgtatgtttttgcatgatttgaaacattcagcaatcagaatgctacgaaagtcagagagtctgaaagctattgttttcattttctctacctgggggattccaaatatctatctggtgatttttaaagggcaatttataattgtttaat

SEQ ID NO: 59957 - DNA, 948 bp, Homo sapiens
tataacaaatagaattgcattttataattaaatataacaaataaatagttatatgagtccttcaaaatgtaacagattttaacaaggtcgagttgttcttacatcaatattattgcttttaagcatctgaaattgcaatataatgtatttcccattcttatcaaaagatcattcaaagcattttagccttcattctttagcttctttaagaaaaaagtcaaaaagagtctctatttgaaatgatagcatataagttattgaatttttagtaatcattagcacaataaggaactgcgtagctaactagccactagagataaaccaagataatctgtacttttggcctagtgacctggcgaaaatatgtttcttttctcccaccttgtttataaggtcctattttacctcttaagcaaagaaaacatctctgtatctataaattgcttgttatcgagatctcttggaattatgagggctttcagtatagttcactttagaatatctgtcagtaacttgccctattggtatacttcttaaagattcagtttaaatcaagcaccttttcaggattccagtaagatcctacctctcccttggttcattctactctataccagctttatttcctgtctgctccttacctaaattcagctgagacttcgttgttactacagctgggggtcttgcagatrtagtactaaccacattgcaacacccaagacagctcaagcctgttgcaaacatagtgaagtaaaacaatattatgttatttgagaaattccttaattctaagtgttgtgtattattcaaatcatttgtctcatgcactaagcccttctgttaaaactttgagagaataagtatgttttaacatatttggtcacaaatatcttagctaggattggtttgctgaattaatttctaatgagatatcagggaaggggacgt

SEQ ID NO: 59958 - DNA, 711 bp, Homo sapiens
cagtcgttattatgaagaaaatggtttgcctctgtctttcgcaaatagaacgtacaacacgctctggcccagccacactcagtatcatcccatagcggtgagtaccctgcagccagggagcacgtgatggaagsttcgtgctgctaatataaggactagtgctgtgatttgctctgacaggtctgtcattgctacatttctaaaagggtggccaagctggggtgctgtaaaatagaaacagaccttctaattcagtgatatttaatttaacaagaatagtaatttaggatatatatgtctcctgaggggggaaagaacatgaaacaactgaatttgcaggtatattattgaatgcaagactaaattataaagagtattaagatttcaaggatgaagcttttaactgcattaaatatatcaaataaaatttaagctataattatagttatgattatagcaaccatttcccgggtaatctacactgttccagatactctgcttttcacttccagtacacgatctactaaactcatgcactattaatcactcaatagtttaactgactaggttattgtgtgatatatggtaatcattcatgtaagatgctataaatagagccggagtgcaggtcgaaatgatgactgcccccgggttgtttattgtgaaagaaaatgatacatcattttgtaaaactgagttaaatatgattaa

SEQ ID NO: 59959 - DNA, 711 bp, Homo sapiens
cagtcgttattatgaagaaaatggtttgcctctgtctttcgcaaatagaacgtacaacacgctctggcccagccacactcagtatcatcccatagcggtgagtaccctgcagccagggagcacgtgatggaagcttcgtgctgctaatataaggactagtgctgtgatttgctctgamaggtctgtcattgctacatttctaaaagggtggccaagctggggtgctgtaaaatagaaacagaccttctaattcagtgatatttaatttaacaagaatagtaatttaggatatatatgtctcctgaggggggaaagaacatgaaacaactgaatttgcaggtatattattgaatgcaagactaaattataaagagtattaagatttcaaggatgaagcttttaactgcattaaatatatcaaataaaatttaagctataattatagttatgattatagcaaccatttcccgggtaatctacactgttccagatactctgcttttcacttccagtacacgatctactaaactcatgcactattaatcactcaatagtttaactgactaggttattgtgtgatatatggtaatcattcatgtaagatgctataaatagagccggagtgcaggtcgaaatgatgactgcccccgggttgtttattgtgaaagaaaatgatacatcattttgtaaaactgagttaaatatgattaa

SEQ ID NO: 59960 - DNA, 711 bp, Homo sapiens
cagtcgttattatgaagaaaatggtttgcctctgtctttcgcaaatagaacgtacaacacgctctggcccagccacactcagtatcatcccatagcggtgagtaccctgcagccagggagcacgtgatggaagcttcgtgctgctaatataaggactagtgctgtgatttgctctgacaggtctgtcattgctacatttctaaaagggtggccaagctggggtgctgtaaaatagaaacagaccttctaattcagtgatatttaatttaacaagaatagtaatttaggatatatatgtctcctgaggggggaaagaacatgaaacaactgaatttgcaggtatattattgaatgcaagactaaattataaagagtattaagatttcaaggatgaagcttttaactgcattaaatatatcaartaaaatttaagctataattatagttatgattatagcaaccatttcccgggtaatctacactgttccagatactctgcttttcacttccagtacacgatctactaaactcatgcactattaatcactcaatagtttaactgactaggttattgtgtgatatatggtaatcattcatgtaagatgctataaatagagccggagtgcaggtcgaaatgatgactgcccccgggttgtttattgtgaaagaaaatgatacatcattttgtaaaactgagttaaatatgattaa

SEQ ID NO: 59961 - DNA, 711 bp, Homo sapiens
cagtcgttattatgaagaaaatggtttgcctctgtctttcgcaaatagaacgtacaacacgctctggcccagccacactcagtatcatcccatagcggtgagtaccctgcagccagggagcacgtgatggaagcttcgtgctgctaatataaggactagtgctgtgatttgctctgacaggtctgtcattgctacatttctaaaagggtggccaagctggggtgctgtaaaatagaaacagaccttctaattcagtgatatttaatttaacaagaatagtaatttaggatatatatgtctcctgaggggggaaagaacatgaaacaactgaatttgcaggtatattattgaatgcaagactaaattataaagagtattaagatttcaaggatgaagcttttaactgcattaaatatatcaaataaaatttaagctataattatagttatgattatagcaaccatttcccgggtaatctacactgttccagatactctgcttttcacttccagtacacgatctactaaactcatgcactattaatcactcaatagtttaactgactaggttattgtgtgatatatggtaatcattcatgtaagatgctataaatagagccrgagtgcaggtcgaaatgatgactgcccccgggttgtttattgtgaaagaaaatgatacatcattttgtaaaactgagttaaatatgattaa

SEQ ID NO: 59962 - DNA, 664 bp, Homo sapiens
aaaataaaattagaattattaaggttctagcaaggctgtcaaaaacaaaagtggtacaaattatgactatcgaagatgaaagtctggacattaatacatacccaacagatattcgaaagacaataaaaggataacatgtcaactttggaatataggtataataataaagtttattcaaagacacatatatgaaaaaggaggaatagtaaacctaaacacctgatatctattaaattatataaattaataatcaataactttcctacaaagcaactcccaggaccgtaagaaaagtttcctataaaacatttaagaaaaatgtgaaaagaatcttagtttctttaagatcatgaaaaatggttttcctacttttgaacttttctacattttaaaataaaatcwtatatccaatttattaaaacatgcacaagtaatacatacaattttgtctattaaaaattaaaaacatatacaagaattattctttaaaaaatagactaaacatttagatcactgattttttccttgttttttaatatacataaaagaattccaaatttatctcgtgcatagccttagctgcatcaaataagttttgattataacatcaacatcatcaatttgtataaaatattttctaatttccactttgactaaatttttg

SEQ ID NO: 59963 - DNA, 1194 bp, Homo sapiens
aaaataatgattggaagtggccgggggcggtggctcacacctgtaatcccagcactttgggaggctgaggcgggcggttcacgaggtcaggagatggagaccattctggctaacacggtgaaaccccgtctctactaaaaatacaaaaattagccgggcatggttgcgggcgcctgtagtcccagctactcgggaggctgaggcaggagaatggcgtgaaacctgggaggcggagcttgcagtgagccgagatcgcgccactgcactccagcctgggcgacagagtgagactctgtctcaaaaaaaataaaataaaataatgattggaagcttatgaatacatatatgagcaatgaatagatcactgctttggaattttaagtggtttatttttcggttgctattttaactgcaaattccaaatggcttgacatataacaccagagggaatctgttacattaagtgatttaagaactctacattgagggagtagctgtaatcgaaagcaaaggaagaaattagctcaaaggaaaaatgtaaccaaaaagccaataagaattatgactatatgggtctaccagaaactcagagtaaggaatcattctatgtcacctgcccaccgcacctccacaggcttccataggtgcatttcctatgccactaactcacacaattgctgtgaattcccaattcttgtgaagacctaatgtagctaaggtgactcaggaagactcatggccacaggatccactggcattaaaaggcctccctcaaaatccacaaagttagaagcaactgaagttgcacgcagatagactccccaaatgcagttccttttatatatcagcatacagcaagatggatttagcaagtttttgagattgggatgatttagaaatcaattgaattaatatgtcaggacagaggacaaggacagaggattccttgtaatcaaatgtatctatasttaaacaatttccaagattttcagaattagttgaactgctgaacttgttcatatttatgaaatttagaatgattgttgtgaaatggttttttcatctaattacaagtgctcttgaaaattaaaatcagtttttatgagttctgcaatacactagaattattaagctttatttcattgccagtatggtaaggtaattttgatgctactcagtaaaaattccactcta

SEQ ID NO: 59964 - DNA, 1194 bp, Homo sapiens
aaaataatgattggaagtggccgggggcggtggctcacacctgtaatcccagcactttgggaggctgaggcgggcggttcacgaggtcaggagatggagaccattctggctaacacggtgaaaccccgtctctactaaaaatacaaaaattagccgggcatggttgcgggcgcctgtagtcccagctactcgggaggctgaggcaggagaatggcgtgaaacctgggaggcggagcttgcagtgagccgagatcgcgccactgcactccagcctgggcgacagagtgagactctgtctcaaaaaaaataaaataaaataatgattggaagcttatgaatacatatatgagcaatgaatagatcactgctttggaattttaagtggtttatttttcggttgctattttaactgcaaattccaaatggcttgacatataacaccagagggaatctgttacattaagtgatttaagaactctacattgagggagtagctgtaatcgaaagcaaaggaagaaattagctcaaaggaaaaatgtaaccaaaaagccaataagaattatgactatatgggtctaccagaaactcagagtaaggaatcattctatgtcacctgcccaccgcacctccacaggcttccataggtgcatttcctatgccactaactcacacaattgctgtgaattcccaattcttgtgaagacctaatgtagctaaggtgactcaggaagactcatggccacaggatccactggcattaaaaggcctccctcaaaatccacaaagttagaagcaactgaagttgcacgcagatagactccccaaatgcagttccttttatatatcagcatacagcaagatggatttagcaagtttttgagattgggatgatttagaaatcaattgaattaatatgtcaggacagaggacaaggacagaggattccttgtaatcaaatgtatctatagttaaacaatttccaagattttyagaattagttgaactgctgaacttgttcatatttatgaaatttagaatgattgttgtgaaatggttttttcatctaattacaagtgctcttgaaaattaaaatcagtttttatgagttctgcaatacactagaattattaagctttatttcattgccagtatggtaaggtaattttgatgctactcagtaaaaattccactcta

SEQ ID NO: 59965 - DNA, 1273 bp, Homo sapiens
gcatttttttcctaaattatgtcacagcctccttgcacctaggaaacactagacagcacttcaacactacaactgagggccattaaagaagcgaaatcatcaacaaccaaagcacagaaatgagaaaaagagggcattagtttatactgatgagagctaaaacaaaaaggcagagcatcaccttgttcaatttcagccgcacatcgggcaactcaaaatttgctttgctctgtgcatgtccacaaatgtttaaaaaagagtcacaagtattgattttggtgttacaagtaaattttagtgagtaggcaaaattgcagatatggaatctatgaataatgaaaattgaagattgtgtgtttacatatatgtatatgtgtgtatatacgtgtgtgtaaataaacatgtgtcgaataaatattctgcaggagatgtttataagattctttggctttatgaattcttttatcttttttttttttaacgaaatatcttagtgaatggcctttccatttatccaatgacccacgttggtaaccaggagtgatctttgagtttatccatattattggatgcaattaatcatgatgtgtctgttaaaaatttttttgattgtgtgtcacaaaatatcagcaaaaagtagtttgagtatggagtgtaatttataataaagactcaagcatcactcatggaaatcaaagtaaaaatcaagtgggcgtctatattgaactgaaaccaagtatttcagtattttcaggttctttttctacttttcttgcttctatttgtctgcaattcttatcattcatgcctctcattagattacttttctccatagtgagcataacagactatagccacccacgtttggtaaatgaacaaaatttgtaagagaatagagataacattgttcccaccccaccccccaataggtcagcttcgcaaattcatggagtataccttttaytggttataggaaagtgttgaacaactgttgagtcaattttctggaacagagtattcttaaacaggataaatttttattctactaatattaaatgaataagtttttgttgctaaccatattaatgtcccagctattaccctgaaataatttatgaagcagtcacaaaggcagtgtttaaatatgctgtaagatataaggataattctgctattaaacattgatcaatcacatctgttatatatatacccatcacatcttaaatttttgaattatgagaggttgtactataaatctgaaattaaaacaaca

SEQ ID NO: 59966 - DNA, 1273 bp, Homo sapiens
gcatttttttcctaaattatgtcacagcctccttgcacctaggaaacactagacagcacttcaacactacaactgagggccattaaagaagcgaaatcatcaacaaccaaagcacagaaatgagaaaaagagggcattagtttatactgatgagagctaaaacaaaaaggcagagcatcaccttgttcaatttcagccgcacatcgggcaactcaaaatttgctttgctctgtgcatgtccacaaatgtttaaaaaagagtcacaagtattgattttggtgttacaagtaaattttagtgagtaggcaaaattgcagatatggaatctatgaataatgaaaattgaagattgtgtgtttacatatatgtatatgtgtgtatatacgtgtgtgtaaataaacatgtgtcgaataaatattctgcaggagatgtttataagattctttggctttatgaattcttttatcttttttttttttaacgaaatatcttagtgaatggcctttccatttatccaatgacccacgttggtaaccaggagtgatctttgagtttatccatattattggatgcaattaatcatgatgtgtctgttaaaaatttttttgattgtgtgtcacaaaatatcagcaaaaagtagtttgagtatggagtgtaatttataataaagactcaagcatcactcatggaaatcaaagtaaaaatcaagtgggcgtctatattgaactgaaaccaagtatttcagtattttcaggttctttttctacttttcttgcttctatttgtctgcaattcttatcattcatgcctctcattagattacttttctccatagtgagcataacagactatagccacccacgtttggtaaatgaacaaaatttgtaagagaatagagataacattgttcccaccccaccccccaataggtcagcttcgcaaattcatggagtataccttttattggttataggaaagtgttgaacaactgttgagtcaattttctggaacwgagtattcttaaacaggataaatttttattctactaatattaaatgaataagtttttgttgctaaccatattaatgtcccagctattaccctgaaataatttatgaagcagtcacaaaggcagtgtttaaatatgctgtaagatataaggataattctgctattaaacattgatcaatcacatctgttatatatatacccatcacatcttaaatttttgaattatgagaggttgtactataaatctgaaattaaaacaaca

SEQ ID NO: 59967 - DNA, 2228 bp, Homo sapiens
ttcaccaaccctaaactactgtgttatgaacattgtccaattctaataattttcctgcttgaaaaaatctgctttaaactcatcccattttgaaaactcttgagccaaactccaaatcctctaaatttcctccaatactaagactctgtctgctttactacaatgagtttgaatacattctgtcagtctttatgaacaaggtgtctgatgacacttttgggaattcaacatcaggcatttcttgccagtgccacagataatgctggtttgtttttgttttttttacctaatcgtatgtattgccttagtgaggaggagaagagaaggcccaaagtaaataccgttcttgtgggtagtggtagtgtattgctaaggtgacaaggaaaatttattctctgactacatcataaagcagcatctctccttgaatgatggagcagcgtgaacttgagattggggaaaaggctctgaactggtgtatgtccacagatggagacaccaggccagggtcagtcttttctttgtactctggcaacagtcatatttagtatattaaagtcctgccatatctcattacctacctaccctctctagttatgcctataccttcaagtcacagacacccactagtctagtggtgtagggaattacagagctaacagcaaatgacagtattgtcttccctaatactttgcactgaagctgagacaacaacaacttcactcctccacagaagctggctagcaaggagtgccccacagggcaatgtagcagcacgggtgggctctgaaaaggatgacagatacctccctcccctttctcacgtatgattttttaaaagtattttcacgaaaaagggcagtagaactttgggttagagttacaaagggatagttaccactttatcttttctctgaagtctcttcgtttttctgtccagtaaagaagaaacaagaaattaactgcaattcctgctgtgaacttctatctccccacaggcctgtggatgtctagaggagacactgtcattatttccaaggcaaaagcagaaaaaggaggttgatgctcaggaagaggttggtcgaaggctgctgggtggttctagagctgtaactagtaattaaagttcattaatcagctgtctcagccaggggcactaggccggctgctattttgatcaaacaattatttatcctgataaggggggaacatgtgagaagcttcttggcagcagaatttgttyctttattttaaagcaagatgataaattatcccagaaaatgggttcttgtttttttctaagaatatacatgcatataaaagtaatatgtgaagtgcaacactataatattaatacaactctttctaactaaaattaatattgatttttttaaaaacccaggattagtaagggtataaataatctttgctacctagttaattattcattgtatgataatccctgtttctgtagtcatctaaatgttgatctcctccacagtgtttttttgtgactgactaacgttggaaatgcagaagacccaacgagaaatggagtttccccttgtctttcagttacaaggttaactatgtcttttaaatgggtagttggcatatgatacaacaaggagggcaccaatggatgaataaagaaatcaaagttcctgcctgggctcagcaataaattcctatggccttggggaaatcatttaaccttgtgaacaacaatttacatttttctaattccctagatcaagggttggcaaacttttttccttttacttaatagtaaatattttaggctttgcaggccatttggtctcttgcaacatctcaattctgctcctgtattgcaaaaacagctatagacaatatgtaaatgaatgggcatggctaagttccagtaaaactttacttatgaacagtgaaatttgaattacatgtcattttcatgtgtcataaaatatattttgtttgtttgtgtcccaaccactttaaaatataaaaatgattcctagtttgtgagctgtatagaaacaggctgcaggctggatttggcccatgggccatggtttactaaccactgctctagatgcttcctaatgataaaattccctttggttttctagagtttggaaaagacaaagaataagccaattcttagatgaataattaaaatgataataaagaggcttttagagaagttgtaagagacagcgtgatgaagc

SEQ ID NO: 59968 - DNA, 1081 bp, Homo sapiens
acaatttttacatatgttgattagaatgcacatccctgcataaagttcagtgcgttgatcttgactacattttttagtaacaacaatacagtaaataagttataaacatattgctgattccattgtagttctaataacagaaatgtattattaaattacttctattcatgtcatgttctatacaaagttatttcatatacttcatttcatttaattcttttttttttttgatgragtctcactctgtcgcctaggctggagtgtagtggctcaatctcggctcactgcaacctccacttcctgggttcaagtgattctcctgcctcagcctcctgagtagctggggttacaggcgcacaccagcacgcccggctagtttttgtatttttagtagagatggggtttcactatgtttgtcaggctggtctcaaactcctgaccttgtggtccgcccacctcggcctcccaaagtgctgggattacaggcgtgagccaccgtgcctggcccatttcatttaattctcactgcaacattgcaagttagctatattatctgccttttaggtgaggatattgaggttcagagtggtgaagtgacttgccaatcacacaatcaaatgacagcacagccagggactcaaacttgtgtcttttaaataaaaatatagtgttcctttcagttatcaaactagtaattatgatctttcggctgctgcatggagtcagggggaagttcgaagtttagttgcctttttgaaatttcaacaggtttggtcttactcaaggaacttcttcggttttaatttaaatttggtcataagaagcaatcgattaccatttgttaggctataatagctttcttcttcccgagcaaagatggcaatgcagggcagctcctttatttaacatatctaattcaatggaagcacgtgtcctttagtgggtgattatccacctgcaggtggctgttcacctctgctttctctgtgtcttcctcattgctaaagcacccctccctgccatgctcacctcaggagagcagaaactgtgctccttttaccaattcactttaagcgggaac

SEQ ID NO: 59969 - DNA, 1741 bp, Homo sapiens
ctagctaatttttacagtttttttttgtagagatggggtcttgctatgttgtctaggctggtgtcaaacttctgagctaaagcaatcgtcctgcttcagcctcccaaagtgttgggattacaggtgtgagccactgcacctggcctatgttgttcttactggttttatagagttctgttaacttatttaacccatccagtcaagaaacatttctctttttgtttttttcttttttttttgaaacagagtctcacttgttgcccaggctggagtgcagtggcccagtcatggctcactgcagccttgacctcctggattcaaatgatcctcctatctcagcctctcaagtagctgggaccacagatgtgcaccaccatatctggccctttttttttggtagagatgggatcctactatgttgcccaggctggtctcaaacttctgggctcaagtgatactctcagcctcccaaagtgctgagattataggcatgaaccatggcgcctggccaaggaaatgtttcttattcattttcacccctcctctttctttattcccatgtacactttatttgtggagttttgcttaagctgtgggctctgcttttattaagactctgtaccttttgatagtaatagaagacaaggcattcagagatagtgctgagcccagagctgggctggacactgatgcaggaggctgaggctgatgaggatctgcttcaggcagaaaccctgaaatcctaggtactctgagtccctgctggatattaactagcttgtaagacctgccttgccttgcctttgcccaggtacatgtattggactgactggggtgcgagccccaagattgaacgagctggcatggatgcctcaggccgccaagtcattatctcttctaatctgacctggcctaatgggttagctattgattatgggtcccagcgtctatactgggctgacgccggcatgaagacaattgaatttgctggactggatggcagtaagaggaaggtaagggtggcagtaagaggaaggtaagggtggcactaaaacatcttcccacagccttgacagcctccaggacagtactttttggctggcagctgattggagataaggggatctggaggttatgggaccagcatggggcatgtgctgtttctctgaggctgtaggtgctgtccagagcttgggggcaggggtgggaaagggctgctggttgatgatgaaaagaaactagggacttgtgtggattgtgagctgggggtgtaaatgcacagaatttcctgttaaccagcacaactaatgcttgttaaattaccagttgcactgtgggcctgtgattcatctctttttgtttttgttttggtataatttcaaacttacagaaaagttgcaagaacaggtaaaaagaataaataaaattttgccacatttgctttatcattctgtttctgtacacactcactattattttttggaactgtctgaaattagagtggagacagcctgcccttgactccagactattcctgtgcacatttcctaaaagcaaggatgttgtcttacatcaccacagtacaatgatcaaaatcaggaaatytaacattgatccaatattactgtctttttttttttttttttttttttttttggttttttagaggcagggtcatgctgtgtcacccaggctggagtgcagtggcacaatattgggtcactgcaccctcgacctacta

SEQ ID NO: 59970 - DNA, 512 bp, Homo sapiens
ttttgtctcggcctcccaaaatgctgggattacaggcgtgaaccactacgcctggcyttctcttaatctaactgtagccctgttcggggcttcaccaatggctcttggtactactgtacctggggcttccatatgaaggagtcccaggaatttctttttgccactccctgaccattttacctacttatatacagaaggcttggggtccccagcaggtggttgagccaagagacccttgcccatttgccagtctttatcttgactcatctacctattgtttccacaatttcagatcagatttctcattgtaatctgcctcctgacttacaatttctccaaactggggtaaatatagcaaacttgtttggaaccccttaatggtgggagaccagcagggtctccctttggctcccaggctagtcttgaactcctgggctcaagtgatcatcctgtcttggcctcccaaagtgctgggattataggcatgagccaccacaccctgctaccttact

SEQ ID NO: 59971 - DNA, 658 bp, Homo sapiens
tataaactttctctaatttgttaaaatttgatagtaaatttggcattttgttgttttaattttaattgtcctcatactaatgaggtcgagagttttaattttctcttactttttgcattttctcttgcctgttcatatcctttgatacttttcaactggacctttatttttccttttctgaagaagttctttgtwtatgaaagatattaaacctttctccacatatagttcaaatgttttaccctgtcacttgctatttgactctctctgtttttttgccatatagaaatgattaacttccatcgtgaaaccagcctctgtctgcctgtatgtcctttgagttttgtttgttgcttgacaaggcctttttcaccccaagattaggcaacattcttctatattttcttctaatacttgtatgggtttgttttacacttagttatttgatatggtttggatctgtgtccccacccaaatctcattttcaattgtaatacccaatgtttggcagtggggcctggtgggaggtaattggatcacagggatggtttctcacggttaagcatcatccccttggtgctgtctcatgatagagttctcatgagatctggttgtttaaaagtgtgtggcacctccctgctctctctcttgctcctgc

SEQ ID NO: 59972 - DNA, 640 bp, Homo sapiens
tgatctcataaactttgctctccttgtccttttgaataccttctagaagaatccctggatcctcttcgtcaaaagtccacatgctcttgggggttaccattgttccggataatctggagttttcatgttgaaaacaaccaccaccacaccaacacgtttttctgttgtcctcttggcaacttcagagccctgacaccgtagggaaagcgcttagggatcccatcacagttcaagggccagggccggtggcctctgccaagtgccaggccctcttatccctgagtgaagcactcacattccctaagaaggggcatagggaccagagcacagggcagtgagggaagtgctgtggggcaagggtggtggtgtctgaagacggctctgcctttacaaggcccactggagctttatgtctgcatgccccacagcagaactgtccttgctctttttcatgtttaaatttatggtgaggtaggaagattgcttgagcccaggaggtcaaggctgcagtgagatatgatcatgccactatactccagcctgggagacagaacaagagcccatytcaaaaagaatttaagggcctggcgcagtggctcatgccaataatcctagcactttgggaggccgtggtgggtgg

SEQ ID NO: 59973 - DNA, 1121 bp, Homo sapiens
ctccccttcattggttagtgtccctgggtattaaccatttgttttcttctatcctcagaggcactggtacttgcatcgtagagagaaacaggccctctgttctagaatggcacagccacgtggtgaaaccctcctttcctgggtgatatggtttggctgtgtccccacccaaatctcatcttgaattgtagctcccataacccccacttgtcatgggagggacgtggtgggagataattgaatcatgggagtggtttttcccatgctgttctcgtgatagtgaataagtcttatgcaatccgatggttttataaagggcagttcccctgcacatgctctcttgcctgcctccatgtaagacatgcctttctcctcttttgccttccaccatgattgtgaggcctccccagccatgtgaactgtggatccattaaatctctttttctttatacattacccagtcttgaatatgtctttattagcagtttgaaaacaaaccagtatactgggcttgccccttcccaatagtgcctctgtagggaaagctggggtatctgtgtctttttaaggttctttcaaagaggccactgagggtgtttctccaattccatttaggaaaccatcgcactcatttcagttgatcacagctattcaggttttcatatacctataaatattaacacatctcttttacctattttcatgaatcaccagaatgagcacagaagaggaggaaccacataagtatggtaaccgagagggaactgactttctttgaagaaagacaccaattttccaattctagctggtccaagcagccaaatagcaaatraaggaaatagcaaaaaaaaaaaaaaaaaaaaaatctataactaggagcagttgcagacaaaagtttgatgtcttatcatttctctcagctacattcacactcagagacaactgctttgtccaacgtagtcattgcagaaaaaaaaaaaaaaaagcaataaaggttttccatattggctacaatggctacaatctgtaaactctggttagcaaattcatgaccagagttccatctcattttttttgtcatttaaaaattggtattttgttaaacgaaatctccgtatttt

SEQ ID NO: 59974 - DNA, 599 bp, Homo sapiens
caccctcctgtatcctctgttcacacaattccctccgccccagggctcccctcccgctgcaacggctgcatcctgcacacccctttgcactcctctctcataccaggacactggggggcagtcatccgacacaccacacaactccgtcctctgctccagcttccgctcagcggagaatggctcccttatctgatggttccaggatgctctgtggcaacactgagtgtaaagcaaacaaggccatcgggtgctgcagcctgcacaccagcgtggtcctgggccacacaccgggcagccggagagaatctctgcagctcccaggcggcagggtgcacaaatcacagcctttccttgaccccgcgagctgagagagcaaagtcacagacagactgttttaagtggattcagggaaacaccccccactgctgtcccccctcccgccccaacgcacacatacatgcacacacagctttgtttccttgtcattcctctcattccctcaataacccctgatakgcttctaggaatacttcctctctcagcaaaggaaaagtgtatggttctgtgttacaagatgattgggctttaagcaaatgaaa

SEQ ID NO: 59975 - DNA, 1035 bp, Homo sapiens
tatgtgtgcatgtctgcgcatgtgtgtaacctccttagaacaggcagaaattggggctctggaatcctttctttgcctaccgcagttccttttaggctgtcttcatagagaaagggatagctcaaaacccacagccctgctttggcctgatgggggatttctgggtctcctcagtctgtcttttattaggcaggccatgggctgtcaggccctggctgggtagatgctctgctcatgaataaaagatagrggcagggcaggacagggccctccctgatgggcctccccgccgttctgtgtggtggaatctcacagtcaactttgacctgtgcacatccacttttttttttgagataggatcttgctctgtcacccagctgggagtgcagtggtgccatcacagctcatttcagcctcgacctcccaggctcaagcaatcttcctgccccagcctcccaagtagctgggactacaggtgcataccaccacacccggctaatgttttgatttctgcagagctaaagtcttactatgttgtccaggctggtctcaaactctgggctcaagagatcctcctgccttgggctcccaaactgctgggattacaggcatgagccactgcacccggccaacacattcacttttttgggacatggcagggacttaatgttttagaaaacatttagctacccctttgacaatgctgcttgacactatttgacagtgtgacttaccacatcctaataacttccatgaaaatcatcacaaagcaaattttaaatttttattaaaaatcacagtttttaaaaatgtccagtgacacaatgtagctcttctgaaatgaatggaaaacacaacacactgctaaccagtggagggagctctctgcagggctgggagacctgacaatgcagctgtagcctctgcaagtgaaaatccaggccgacttgcagtcattggactgatgtccaagtgcaatcaccatacagcagctacaggcagggctggctgatagggagtatgggagaaggacac

SEQ ID NO: 59976 - DNA, 1246 bp, Homo sapiens
acagatattccagtggaagctcagyctcaaatctgatgacacaaatcacttttatgtccttacatccttgtcacctcagctatttccaagaccgcaacctagaaattgtgagaagcctacccatgaccacagtgacaacgcagtcttcagtggttcagcctcctgccccctcccagtgccggtgttcccaaatgcaaggggatttcagacattcagcttttcatttacctccaaggcacagatgccgagatgtccccatgtctgtcttcagagtctcatttgcaaattggcagcttcataccactctcgctatctgcattgctatatttacacctgagctgatgtgtacccggggaaagtgtgctatgacccagtgcttgggtggctcatctaaagccatccagagtctctgactcctggtgcatggggagcctttctgggtcatcttctcagctctgcgcagccactaatgcttgccttttaagactgtagatgaaaagggtcaaactctgaaaaatatttgaagagaattcttctgagccaaatataagggaccaatagcctgtgacacagctctaggagataatgagaacacgtacccaaggtaattgagctacagttttgtttatacattttagcgagacataagacatcagtcaatacaagtgagatgcacattgattctgctcagaaaggcaagacaacttgaagcggggagaagggtttccagatcataggtagattcaaaaattttctggttggcaattggctgaaaaagttcatctaaagacctggaatcaatagaaaggaatatctgggttaaaataaaggttgtagagaccaaggttttaccatgtagataaagcaaaatgaaacaaaagtaagaattgaacttgagaggctttgaatatggaagaggcccaagcccaggaatacaggaggaccctagaagtaggaaaaggcgtgaaaatcatttctgccctagaatctccaaaagccctgctgacaccttgaccgataagaaatataataaatttatttcattttaagccactgagtttgtgataatttgttacagcaccaataggaagataaaacatcctgccccatcacccctcttcgattagtccccttttaactcaattgctctagcaataaagattttaaaaagcaacaataaattcaatgaggtattacgtacatttatgtaatcacaatagctttttcatatatttgaaaaataata

SEQ ID NO: 59977 - DNA, 1246 bp, Homo sapiens
acagatattccagtggaagctcagcctcaaatctgatgacacaaatcacttttatgtccttacatccttgtcacctcagctatttccaagaccgcaacctagaaattgtgagaagcctacccatgaccacagtgacaacgcagtcttcagtggttcagcctcctgccccctcccagtgccggtgttcccaaatgcaaggggatttcagacattcagcttttcatttacctccaaggcacagatgccgagatgtccccatgtctgtcttcagagtctcatttgcaaattggcagcttcataccactctcgctatctgcattgctatatttacacctgagctgatgtgtacccggggaaagtgtgctatgacccagtgcttgggtggctcatctaaagccatccagagtctctgactcctggtrcatggggagcctttctgggtcatcttctcagctctgcgcagccactaatgcttgccttttaagactgtagatgaaaagggtcaaactctgaaaaatatttgaagagaattcttctgagccaaatataagggaccaatagcctgtgacacagctctaggagataatgagaacacgtacccaaggtaattgagctacagttttgtttatacattttagcgagacataagacatcagtcaatacaagtgagatgcacattgattctgctcagaaaggcaagacaacttgaagcggggagaagggtttccagatcataggtagattcaaaaattttctggttggcaattggctgaaaaagttcatctaaagacctggaatcaatagaaaggaatatctgggttaaaataaaggttgtagagaccaaggttttaccatgtagataaagcaaaatgaaacaaaagtaagaattgaacttgagaggctttgaatatggaagaggcccaagcccaggaatacaggaggaccctagaagtaggaaaaggcgtgaaaatcatttctgccctagaatctccaaaagccctgctgacaccttgaccgataagaaatataataaatttatttcattttaagccactgagtttgtgataatttgttacagcaccaataggaagataaaacatcctgccccatcacccctcttcgattagtccccttttaactcaattgctctagcaataaagattttaaaaagcaacaataaattcaatgaggtattacgtacatttatgtaatcacaatagctttttcatatatttgaaaaataata

SEQ ID NO: 59978 - DNA, 1246 bp, Homo sapiens
acagatattccagtggaagctcagcctcaaatctgatgacacaaatcacttttatgtccttacatccttgtcacctcagctatttccaagaccgcaacctagaaattgtgagaagcctacccatgaccacagtgacaacgcagtcttcagtggttcagcctcctgccccctcccagtgccggtgttcccaaatgcaaggggatttcagacattcagcttttcatttacctccaaggcacagatgccgagatgtccccatgtctgtcttcagagtctcatttgcaaattggcagcttcataccactctcgctatctgcattgctatatttacacctgagctgatgtgtacccggggaaagtgtgctatgacccagtgcttgggtggctcatctaaagccatccagagtctctgactcctggtgcatggggagcctttctgggtcatcttctcagctctgcgcagccactaatgcttgccttttaagactgtagatgaaaagggtcaaactctgaaaaatatttgaagagaattcttctgagccaaatataagggaccaatagcctgtgacacagctctaggagatmatgagaacacgtacccaaggtaattgagctacagttttgtttatacattttagcgagacataagacatcagtcaatacaagtgagatgcacattgattctgctcagaaaggcaagacaacttgaagcggggagaagggtttccagatcataggtagattcaaaaattttctggttggcaattggctgaaaaagttcatctaaagacctggaatcaatagaaaggaatatctgggttaaaataaaggttgtagagaccaaggttttaccatgtagataaagcaaaatgaaacaaaagtaagaattgaacttgagaggctttgaatatggaagaggcccaagcccaggaatacaggaggaccctagaagtaggaaaaggcgtgaaaatcatttctgccctagaatctccaaaagccctgctgacaccttgaccgataagaaatataataaatttatttcattttaagccactgagtttgtgataatttgttacagcaccaataggaagataaaacatcctgccccatcacccctcttcgattagtccccttttaactcaattgctctagcaataaagattttaaaaagcaacaataaattcaatgaggtattacgtacatttatgtaatcacaatagctttttcatatatttgaaaaataata

SEQ ID NO: 59979 - DNA, 1246 bp, Homo sapiens
acagatattccagtggaagctcagcctcaaatctgatgacacaaatcacttttatgtccttacatccttgtcacctcagctatttccaagaccgcaacctagaaattgtgagaagcctacccatgaccacagtgacaacgcagtcttcagtggttcagcctcctgccccctcccagtgccggtgttcccaaatgcaaggggatttcagacattcagcttttcatttacctccaaggcacagatgccgagatgtccccatgtctgtcttcagagtctcatttgcaaattggcagcttcataccactctcgctatctgcattgctatatttacacctgagctgatgtgtacccggggaaagtgtgctatgacccagtgcttgggtggctcatctaaagccatccagagtctctgactcctggtgcatggggagcctttctgggtcatcttctcagctctgcgcagccactaatgcttgccttttaagactgtagatgaaaagggtcaaactctgaaaaatatttgaagagaattcttctgagccaaatataagggaccaatagcctgtgacacagctctaggagataatgagaacacgtacccaaggtaattgagctacagttttgtttatacattttagcgagacataagacatcagtcaatacaagtgagatgcacattgattctgctcagaaaggcaagacaacttgaagcggggagaagggtttccagatcataggtagattcaaaaattttctggttggcaattggctgaaaaagttcatctaaagacctggaatcaatagaaaggaatatctgggttaaaataaakgttgtagagaccaaggttttaccatgtagataaagcaaaatgaaacaaaagtaagaattgaacttgagaggctttgaatatggaagaggcccaagcccaggaatacaggaggaccctagaagtaggaaaaggcgtgaaaatcatttctgccctagaatctccaaaagccctgctgacaccttgaccgataagaaatataataaatttatttcattttaagccactgagtttgtgataatttgttacagcaccaataggaagataaaacatcctgccccatcacccctcttcgattagtccccttttaactcaattgctctagcaataaagattttaaaaagcaacaataaattcaatgaggtattacgtacatttatgtaatcacaatagctttttcatatatttgaaaaataata

SEQ ID NO: 59980 - DNA, 1186 bp, Homo sapiens
attgggtactttcacacatcagaaagttcttctttcttaaaatctgttcttgaattattcattcttctctagctttttgttgatctattttataattttagaaaaatcagaaagtaacttgaagtatctgtcatctctagaggtttacctccctctttgtggtcttcagaatgccataacaggcttttcccatgctcatcacatggtttctatgtatgagacctcaccacaggagctgtggtccgccgggagcaggcatctgtggatggcgccttattccgggctgctgggacctgtgcgctgccagtggcactccacggcggtgatttcctagctcagtgttgcagctccagatggtgggtgagacactaggaccactttgtgaacagcgagggcttggggtttgcttttctaccatgtccagggctgctcttcatggggaatgtttctcacctgacgtcatggctgaagccaacttagaacctctctagccgtatggggagtatgtgagtgatacagatgttaattagctcagtggagccactcccctatgtagacatgttacaaaacattatgctgtacagaataaatataggtcatttttatgtgtcaatcaaaagagaaactaattattaaaaaaaaaacctctctactaaagcagaaacctcagctccagtcccagaagwcacacaaggctgctcctgtcctgtgtatgttaaacctacctcagaaatgcaaggggcattcaggtttcattctcaattcaaatgccctttttaattttgtctattcctagcacctggcaacatccagctctttttttggggctcattcattatttaaaccatgtataatttttcacccaacattctaacacatgtagtactgtagagaatccttccctaggaggatctgcagcattagaaaagaattaagaagtccaacatttacaagaaggaaaaagcaaagaagagatcaaaaaatgggcaacttctagaaatagaaaaccctcatgagtatgatgataaatcgctggcacacatgtgaatagttacttgatgcttatagtgatgtctgggaaaatgacatgaaatacttataatctgtttctcacacatgtaattcaaaagaataaagagaagatgatttgaaatattcttgagtttgcaggaaaaaagctacttcc

SEQ ID NO: 59981 - DNA, 1186 bp, Homo sapiens
attgggtactttcacacatcagaaagttcttctttcttaaaatctgttcttgaattattcattcttctctagctttttgttgatctattttataattttagaaaaatcagaaagtaacttgaagtatctgtcatctctagaggtttacctccctctttgtggtcttcagaatgccataacaggcttttcccatgctcatcacatggtttctatgtatgagacctcaccacaggagctgtggtccgccgggagcaggcatctgtggatggcgccttattccgggctgctgggacctgtgcgctgccagtggcactccacggcggtgatttcctagctcagtgttgcagctccagatggtgggtgagacactaggaccactttgtgaacagcgagggcttggggtttgcttttctaccatgtccagggctgctcttcatggggaatgtttctcacctgacgtcatggctgaagccaacttagaacctctctagccgtatggggagtatgtgagtgatacagatgttaattagctcagtggagccactcccctatgtagacatgttacaaaacattatgctgtacagaataaatataggtcatttttatgtgtcaatcaaaagagaaactaattattaaaaaaaaaacctctctactaaagcagaaacctcagctccagtcccagaagacacacaaggctgctcctgtcctgtgtatgttaaacctacctcagaaatgcaaggggcattcaggtttcattctcaattcaaatgccctttttaattttgtctattcctagcacctggcaacatccagctctttttttkgggctcattcattatttaaaccatgtataatttttcacccaacattctaacacatgtagtactgtagagaatccttccctaggaggatctgcagcattagaaaagaattaagaagtccaacatttacaagaaggaaaaagcaaagaagagatcaaaaaatgggcaacttctagaaatagaaaaccctcatgagtatgatgataaatcgctggcacacatgtgaatagttacttgatgcttatagtgatgtctgggaaaatgacatgaaatacttataatctgtttctcacacatgtaattcaaaagaataaagagaagatgatttgaaatattcttgagtttgcaggaaaaaagctacttcc

SEQ ID NO: 59982 - DNA, 1115 bp, Homo sapiens
tttgcctgtcttatggcaacatyttgctcactgttctccccaccccatgttatttcacacagtactctgcaggttctgaggacaagttagaattatttttaatgtgcctaaaaattctttgtagctggagaatttgaggtcatttatagattacaaatgcaacattcttgtcacttaatttagataagataacgcagtatccatggattagatcgttggacagatagcattgttaatcattattatattataacacaaagaatggtaaatatcaaattagactaagtgaagtattaataccagtgggccatgtattattagtgctacataagaaaacaaatcaaaatttggatatcccattagagacatgtcttagaaataaaattgtattaaggagagttagtggtaagtaaaatattttaaattcaaatttctatgaaatatttatcccaccgcttatgtttccatgcagaatcttctgttgttgagtgggtataataagttttggacaaaaataaaataacctttgtgggtttaaaatttggaataatcttttttgcggattcgtattgccatcttgggaaatttctcactcatattattataacttcttttatttgaatgggcacagttacagtccacagtttttattctcagacacctaattacagccaaattctaggtcattctctttagagaaatctcaaagacaatggcaggcttttggattaaaacattttctcagtgattttggaagcaaacttgttttcagtgtttacagaagggccagaggtgaaaccattagcagcacctgcctttttagtgtcttctataccaggaattccaggtacctggagctcaaagtaaaagctctaaagtacataggattctcccaggcactgtgctggttcttgcacatgctggtaaatatctgagtttctatgcttatgactgacaaatgaaatgacaaaaacatcacaaaaactatatattttgatactactctgctaagcttatgaataagacacagactgattatttgaaacactaccttttcatgtttctacattttttaaattgacagataaaattatatgtattgtcatgtaaaatgt

SEQ ID NO: 59983 - DNA, 1115 bp, Homo sapiens
tttgcctgtcttatggcaacatcttgctcactgttctccccaccccatgttatttcacacagtactctgcaggttctgaggacaagttagaattatttttaatgtgcctaaaaattctttgtagctggagaatttgaggtcatttatagattacaaatgcaacattcttgtcacttaatttagataagataacgcagtatccatggattagatcgttggacagatagcattgttaatcattattatattataacacaaagaatggtaaatatcaaattagactaagtgaagtattaataccagtgggccatgtattattagtgctacataagaaaacaaatcaaaatttggatatcccattagagacatgtcttagaaataaaattgtattaaggagagttagtggtaagtaaaatattttaaattcaaatttctatgaaatatttatcccaccgcttatgtttccatgcagaatcttctgttgttgagtgggtataataagttttggacaaaaataaaataacctttgtgggtttaaaatttggaataatcttttttgcggattcgtattgccatcttgggaaatttctcactcatattattataacttcttttatttgaatgggcacagttacagtccacagtttttattctcagacacctaattacagccaaattctaggtcattctctttagagaaatctcaaagacaatggcaggcttttggattaaaacattttctcagtgattttggaagcaaacttgttttcagtgtttacagaagggccagaggygaaaccattagcagcacctgcctttttagtgtcttctataccaggaattccaggtacctggagctcaaagtaaaagctctaaagtacataggattctcccaggcactgtgctggttcttgcacatgctggtaaatatctgagtttctatgcttatgactgacaaatgaaatgacaaaaacatcacaaaaactatatattttgatactactctgctaagcttatgaataagacacagactgattatttgaaacactaccttttcatgtttctacattttttaaattgacagataaaattatatgtattgtcatgtaaaatgt

SEQ ID NO: 59984 - DNA, 1302 bp, Homo sapiens
tgcatataatcaggtaatgagagttaataattatagttgatataatccagcaaatgtattcacatcacagactttggttttataatttgttataattgtaatcaatttgtagtttttgttttttcactcattatagggaaaaaactttattaatgaacttaaatatactcaatatcaagactggttggacaggagcacagaaatgtgactgtgacagactctgctgcaaagtccagtggtaaaaacagacatataaatcattctttttatttccaacttttattttagattcaaggggtacatgtgcagatttgtcacatgggtaaattgcgtgtcacaggggataaaccattcttaaaattcctgattatgtactatttaatcctcaaaacaaacctatgagatagataatgatttttgcttctcatttatacagaagaggaaattgaagattatttatcctcctacctaagaggcttatccttctaaggaactgaagtagcccttttaagtttagtatttgtatgaacacattcagtgattttaatgagatgagaagtgtaccttcatggtgtacaaataattatttaaaagagttgtatgacttaccctcattaatacaattgaattattaaatatttactctaaatattatgaagaccataattaaaaagatttagaacatgttattaaaatattttaagttaaataaataatacagaaatgatagcagattttatttactttttattattctgtcttcaatgaatgtatctgttataaagacataatatgagtacaattaatattacttttattaaacatatyacatgatttccaaatatgaaattaataaaaagcaagttttcccctcttctctgcacctataacactatgctatagtgcagggccgactcaacaatgagacaactcaaatctcagctttctcatttattaattagtgactttgcataatatgattaagccatctgtactttgatttactcatcagacaaatgaaaattataataaagtagtacatagctttgtggtgggattaaattaaagaacacatgtaaagaactaagtctctggcacataagtgcctgataaatgttagcaattattattaatataagtatactttatatataatatcatgagtacattattggtttatagtaacagaatttgttaaacccctcagatgttcactaaacctctgttaaatgaataaatgaatgaaagctcttatctagcatagggacctaaaatcagtcaagagatatttattgagtggct

SEQ ID NO: 59985 - DNA, 1302 bp, Homo sapiens
tgcatataatcaggtaatgagagttaataattatagttgatataatccagcaaatgtattcacatcacagactttggttttataatttgttataattgtaatcaatttgtagtttttgttttttcactcattatagggaaaaaactttattaatgaacttaaatatactcaatatcaagactggttggacaggagcacagaaatgtgactgtgacagactctgctgcaaagtccagtggtaaaaacagacatataaatcattctttttatttccaacttttattttagattcaaggggtacatgtgcagatttgtcacatgggtaaattgcgtgtcacaggggataaaccattcttaaaattcctgattatgtactatttaatcctcaaaacaaacctatgagatagataatgatttttgcttctcatttatacagaagaggaaattgaagattatttatcctcctacctaagaggcttatccttctaaggaactgaagtagcccttttaagtttagtatttgtatgaacacattcagtgattttaatgagatgagaagtgtaccttcatggtgtacaaataattatttaaaagagttgtatgacttaccctcattaatacaattgaattattaaatatttactctaaatattatgaagaccataattaaaaagatttagaacatgttattaaaatattttaagttaaataaataatacagaaatgatagcagattttatttactttttattattctgtcttcaatgaatgtatctgttataaagacataatatgagtacaattaatattacttttattaaacatattacatgatttccaaatatgaaattaataaaaagcaagttttcccctcttctctgcacctataacactatgctatagtgcagggccgactcaacaatgagacaactcaaatctcagctttctcatttattaattagtgactttgcataatatgattaagccatctgtactttgatttactcatcagacaaatgaaaattataataaagtagtacatagctttgtggtgggattaaattaaagaacacatgtaaagaactaagtctctggcacatamgtgcctgataaatgttagcaattattattaatataagtatactttatatataatatcatgagtacattattggtttatagtaacagaatttgttaaacccctcagatgttcactaaacctctgttaaatgaataaatgaatgaaagctcttatctagcatagggacctaaaatcagtcaagagatatttattgagtggct

SEQ ID NO: 59986 - DNA, 714 bp, Homo sapiens
cagagtgtctcctccaccgctctgacccatgggctggctttccggtctcatctgccagcctggaaaccctttgacaacaaggatcctgcctggccccaaaggccacagcttgtctgttagggtctacttggctgcaagtagcagaaacccccgagtaatagtggcttcagtaaagctcacaggtctccgtcacattaaaatcgrgaggcagacaggccaaagctgatgtgacctaccagtgccaggcacctgcactgtacctctgccgttgccctggggcacagcctggagtcaggacagctgctcccacactgcggggagcatggaggaaaggaggaaggcactccctccccggtgtaaggagacctcctggaatttgcacaaaccctctcccttcatcccttggccagacttagtcatagtgccatacccaattgcaagggaagcctggaagtacgggctccattaatatgcccagctaaatattggggttccattcttttggagggagaaagtggatattaggaagctattagccatctggcactccagtgcgttttaatgtcgtacgcttttatggaacccgtatatgtttataaaggcctgggccaggaatgcagtggagcacaggcgagagtttgtgcctctattgactgccagcctgggccaccactgtaccccatgcagctcctttccccctccccataccctaca

SEQ ID NO: 59987 - DNA, 714 bp, Homo sapiens
cagagtgtctcctccaccgctctgacccatgggctggctttccggtctcatctgccagcctggaaaccctttgacaacaaggatcctgcctggccccaaaggccacagcttgtctgttagggtctacttggctgcaagtagcagaaacccccgagtaatagtggcttcagtaaagctcacaggtctccgtcacattaaaatcgagwggcagacaggccaaagctgatgtgacctaccagtgccaggcacctgcactgtacctctgccgttgccctggggcacagcctggagtcaggacagctgctcccacactgcggggagcatggaggaaaggaggaaggcactccctccccggtgtaaggagacctcctggaatttgcacaaaccctctcccttcatcccttggccagacttagtcatagtgccatacccaattgcaagggaagcctggaagtacgggctccattaatatgcccagctaaatattggggttccattcttttggagggagaaagtggatattaggaagctattagccatctggcactccagtgcgttttaatgtcgtacgcttttatggaacccgtatatgtttataaaggcctgggccaggaatgcagtggagcacaggcgagagtttgtgcctctattgactgccagcctgggccaccactgtaccccatgcagctcctttccccctccccataccctaca

SEQ ID NO: 59988 - DNA, 536 bp, Homo sapiens
taactgaccttttcactttggctgttaggaagctcagaactaaacatgaatccacctaaagcaccatgttggccttcagtgaccgtacactcacagccactgccacacaagtgcactcacaggtacacgcgaacgtgcactcactgccaccgccacacacgttcactcacaggtacgcatgaacacgcactcacagcctctcctgcacaactgctcttccaagtcttgaccaactatgccaatatggtttcccttggtccagaccttctgcattttatttcractctttattgtatatccagagagagtttggaaaagaagcgagaagcgtggataatggccaggaaatgggggtgacggtgctgtgacagagtgtctagtcaaagaggcagtgcacagcctgggaggtatgtgtcaaatcacacagtccccacccctccccacccctgctcctttccaccaccccttccccgcttccagaccctgactgctgggaaggggccttctctcagggtgctggagcccaaggaaagctc

SEQ ID NO: 59989 - DNA, 715 bp, Homo sapiens
actgaacacctgctcaggctggaacgagcacccacagatgcacccaagggtggggctgctgcctggtccccccaracacactctctccagttggttcgtttgttctccatcccatcgctcagaggcggacctcaccacaggacctgggtaactgcccaagttctggtaggagaagggaggaaaagccaggctgaggtcaagaagaccccactgaatgggattcctaaagctcccccagctacagggtcactgacgccctcgagggacagcactattgtgtggacatgtgtgggtttgcgttttcctagacaaatagtccaaagctttcatccaatcatcaaaatgctctgaggctccagaaggttagtagccaatatcttaaaggacagggtggccgtgggtgggaggagagatgagggcaagaggattagagttaagggaagaacagtttagaaataggcaaggaagggagggcttttcttggtttcaggtcagaacccccatcaaggggctgggcaggtgaagtggtggcaggctccagaggcccttgatgaaggacaggggctgggattcccagaaggctgccagaggaccctgtgtggggtacggaggtgagggtctgggggcagaggcaggaacaaccataggagtggacacacagatgtgtgctcttgaaatgccaagcctgtgccagtctgcctccgaggtataaccc

SEQ ID NO: 59990 - DNA, 715 bp, Homo sapiens
actgaacacctgctcaggctggaacgagcacccacagatgcacccaagggtggggctgctgcctggtccccccaaacacactctctccagttggttcgtttgttctccatcccatcgctcagaggcggacctcaccacaggacctgggtaactgcccaagttctggtaggagaagggaggaaaagccaggctgaggtcaagaagaccccactgaatgggattcctaaagctcccccagctacagggtcackgacgccctcgagggacagcactattgtgtggacatgtgtgggtttgcgttttcctagacaaatagtccaaagctttcatccaatcatcaaaatgctctgaggctccagaaggttagtagccaatatcttaaaggacagggtggccgtgggtgggaggagagatgagggcaagaggattagagttaagggaagaacagtttagaaataggcaaggaagggagggcttttcttggtttcaggtcagaacccccatcaaggggctgggcaggtgaagtggtggcaggctccagaggcccttgatgaaggacaggggctgggattcccagaaggctgccagaggaccctgtgtggggtacggaggtgagggtctgggggcagaggcaggaacaaccataggagtggacacacagatgtgtgctcttgaaatgccaagcctgtgccagtctgcctccgaggtataaccc

SEQ ID NO: 59991 - DNA, 588 bp, Homo sapiens
agcacggtgaatgtattagtccgttttcacactgctgataaaaacatacctgagactgggcaatttacagaagaaagagtttaattggacttacagttccatgtagctggggaagcctcacaaccatggcagaaggtaaggagcagcaagtcccatcttacatggatggcagcaggcaargagagaatgaggaaggtgcaaaagcagaagcccctgataaaaccatcagatctcatgagacttattcactactatgagaacagcatgagggaaactgccccccatgattcaattatctcccaccaactccctctcacaacatgggggaattatgggagtacaattcaagatgagatttgggtggggacacagagccaaatcatatcagtgaacttgcagttttcagaactataataatttgctatgccagaaatataaagtgtatgacaggaaatggtaagaaatgaggctagagaggtaattactcgactatgtttcaggatatatttcaagaaggggaagtctactgtgaacaaatatgaagaaaatagtattaagtacatgtgcagaaatagacttcagataggc

SEQ ID NO: 59992 - DNA, 588 bp, Homo sapiens
agcacggtgaatgtattagtccgttttcacactgctgataaaaacatacctgagactgggcaatttacagaagaaagagtttaattggacttacagttccatgtagctggggaagcctcacaaccatggcagaaggtaaggagcagcaagtcccatcttacatggatggcagcaggcaaagagagaatgaggaaggtgcaaaagcagaagcccctgataaaaccatcagatctcatgagacttattcactactatgagaacagcatgagggaaactgccccccatgattcaattatctcccaccaactccctctcacaacatgggggaattatgggagtacaattcaagatgagatttgggtggggacacagagccaaatcatatcagtgaacttgcagttttcagaactataataatttgstatgccagaaatataaagtgtatgacaggaaatggtaagaaatgaggctagagaggtaattactcgactatgtttcaggatatatttcaagaaggggaagtctactgtgaacaaatatgaagaaaatagtattaagtacatgtgcagaaatagacttcagataggc

SEQ ID NO: 59993 - DNA, 1185 bp, Homo sapiens
aaaaacatcacagtgagaaggggtccacaggcttccctacttcaagaagtccatggcacagacacacaaaaagggaagctcccttggcagagtgaaggcatttgggctctagtctcttttccaggacttgctagagcaggaattttgagattgatgggtttctctaggaagttggtaactagtgccaatgggagatctgcctggcttgatttgttgtgctgcacatggacaactgtggatgctgtcggagcttctgtggagtgggaagggagctccgcagtgtagaatttgaggagaagccctcctttgaaatcttgtaacaataagaaagataactcatatacgatgtgctttgttgggttaggcaccggacaatttattttgtaaacatgatctactttatttctccaataaccctatgtatgagttagattctcttacccccgttttacagaggaggatactgaaccttggttgcttctacaacatttttgtctacttagtaaataagtattcttgttaagtaaaagttgttcctagtaagtactcaataaatgaatgctgtccttttaatgttataattaacatgacttgagacaggaagttcttccttcccctcagctatctctctttagcacagtttccttctttggatctcagccagttgcatatatactctcgctttaggtgaacatgctggcatgtgaacatccttgcggctagagcttcactgccaacttcacaagaatctctcttggcatctgaggctcattagtgcactaatacaccaaggtgtgcgaaaaactgtcatccacgtccctttctattgctcggataaattagtatcccactaaatgttcaccctaaactcctttaccgagtggaggaattgccaaactacttcaaatattaaagtaggagcctatctcccaaatwcagctatgttgatttgctttttatcaagacacattaactgatccacataggattttatttaccaagttggccttaatttaatgcttttatttttttaaccaagtgacttttatttaaaatagtggattagggaggttcagttttaagttccttttaggaactggtgtcggcataacaaaggacataaaagaggctgagagcaacgtgtgtgtgcgcgcacgcgcgtgtgcatgtgtgtgcgcacatgca

SEQ ID NO: 59994 - DNA, 1143 bp, Homo sapiens
tgttggccctttgaagattcatctcaatgtccctgaactgctggggaggaaacagcaatggtgttaagttgtctggtatgaattactgctgcaaataaatctgacaaaccaacggtcatggtgagaagaattgcctcagacacacactgtcagcctgctgggttaacctccatctttaagtgggaggaaaaacaagcataactatctctaagaacagaaggaaaaaatccttcactggaggtctctgtccaaacgctatgactcaatggttctatccagacttatcaccctggggaacctggagagatccatttcctgtgagagagaaagagaactgaattccagccattccttccccaccacctccttctcttcttccttactggcaccattcatctatatgatagtgtagccttttcttgctcatctttctttcccatgccatacaatattctctaaaacatttgttcatagctgcatagcatgccttcaaatggtggtgccctaatttggataccactcctttattcttgggctcctaagtttttttctcaatattcaccattgtaactatcacatctctgacatccttgttcttaatttgccttcatctgagattatttttcgggatactttcctgcaagtttgctatataagtaacatcaaattactctccatggtgaaatctactaatttatgctccctggcccgatgggttttccattccacctttccttgatcaccaaacatcattacagctttcaaaatatctcccaagcttctaagtgagaaatggaatgttgctatagaattctttccatttctggtaacttcaaacatttgtatcttctttcgtgattacctaatcacatcttttaaccatctttttattgaggtgcttctcactttcttatttagaagatctctttgggtattaakaatattatgcacatataatgcagatagtttctccaagttattacttcccatttgaccctgcaatcactcatactcatggattctattttggtgcaagccgccagtagggatccaactttgttttattataaatgatctcacatctgttgaattaaccacttcgtgttaattttaaaaataattttactattattttaactgaca

SEQ ID NO: 59995 - DNA, 882 bp, Homo sapiens
tcctgatgcatgctcaagtttgagaacaactgggatacacattccacattaccagcattcgtaatcttatttacggagggctctaaatttcctgctaactgaaccactctaaattagctgagaattaaaagaagaaggagtgctattacataaatgaaggctattcaaatctccacgccttgaggaacwccttgagccctgtagggcagtggcaggggaggaagtattatagtaactggtggttacagagcagagattgaggccagtcctcctgggtcaagcgcatgcaccgctgcatccagctgcatgatcggggctaagttccttaatctctttgtatcttgtttccttcttccataaaatgctcatctatagcgcctaccttatgcagctgttggagggttaaatcagttgagtgaagcatttagaagctttcctggccaagactaagcgctgcttgttgttgttagtattatttatctgaattaattttcagttcttctcccatttttaacagatctcaacagtgctcttatcttcttccatagcaacacgtcaaaaaacaaatgcaccatcatcctttccgtttaaattaggaatgtgaccagatttaaggaacagacattcagtttaaacaaatgaaaagttatttttcttgcctcggaatctgaggcctggcagttgctgatgtcttttagtgactcattcatgtgactctcctctaagaccccttccttttagctctgcagagtcagaactgggtcactcgtgggtcagtaggcctggggtgggggatgagaatttaaatggccaacaagtctgcagggactgctgctgctgccagcctgcaggctccgcttaaaagccaatgccttgaatgca

SEQ ID NO: 59996 - DNA, 882 bp, Homo sapiens
tcctgatgcatgctcaagtttgagaacaactgggatacacattccacattaccagcattcgtaatcttatttacggagggctctaaatttcctgctaactgaaccactctaaattagctgagaattaaaagaagaaggagtgctattacataaatgaaggctattcaaatctccacgccttgaggaactmcttgagccctgtagggcagtggcaggggaggaagtattatagtaactggtggttacagagcagagattgaggccagtcctcctgggtcaagcgcatgcaccgctgcatccagctgcatgatcggggctaagttccttaatctctttgtatcttgtttccttcttccataaaatgctcatctatagcgcctaccttatgcagctgttggagggttaaatcagttgagtgaagcatttagaagctttcctggccaagactaagcgctgcttgttgttgttagtattatttatctgaattaattttcagttcttctcccatttttaacagatctcaacagtgctcttatcttcttccatagcaacacgtcaaaaaacaaatgcaccatcatcctttccgtttaaattaggaatgtgaccagatttaaggaacagacattcagtttaaacaaatgaaaagttatttttcttgcctcggaatctgaggcctggcagttgctgatgtcttttagtgactcattcatgtgactctcctctaagaccccttccttttagctctgcagagtcagaactgggtcactcgtgggtcagtaggcctggggtgggggatgagaatttaaatggccaacaagtctgcagggactgctgctgctgccagcctgcaggctccgcttaaaagccaatgccttgaatgca

SEQ ID NO: 59997 - DNA, 882 bp, Homo sapiens
tcctgatgcatgctcaagtttgagaacaactgggatacacattccacattaccagcattcgtaatcttatttacggagggctctaaatttcctgctaactgaaccactctaaattagctgagaattaaaagaagaaggagtgctattacataaatgaaggctattcaaatctccacgccttgaggaactccttgagccctgtagggcagtggcaggggaggaagtattatagtaactggtggttacagagcagagattgaggccagtcctcctgggtcaagcgcatgcaccgctgcatccagctgcatgatcggggctaagttccttaatctctttgtatcttgtttccttcttccataaaatkctcatctatagcgcctaccttatgcagctgttggagggttaaatcagttgagtgaagcatttagaagctttcctggccaagactaagcgctgcttgttgttgttagtattatttatctgaattaattttcagttcttctcccatttttaacagatctcaacagtgctcttatcttcttccatagcaacacgtcaaaaaacaaatgcaccatcatcctttccgtttaaattaggaatgtgaccagatttaaggaacagacattcagtttaaacaaatgaaaagttatttttcttgcctcggaatctgaggcctggcagttgctgatgtcttttagtgactcattcatgtgactctcctctaagaccccttccttttagctctgcagagtcagaactgggtcactcgtgggtcagtaggcctggggtgggggatgagaatttaaatggccaacaagtctgcagggactgctgctgctgccagcctgcaggctccgcttaaaagccaatgccttgaatgca

SEQ ID NO: 59998 - DNA, 882 bp, Homo sapiens
tcctgatgcatgctcaagtttgagaacaactgggatacacattccacattaccagcattcgtaatcttatttacggagggctctaaatttcctgctaactgaaccactctaaattagctgagaattaaaagaagaaggagtgctattacataaatgaaggctattcaaatctccacgccttgaggaactccttgagccctgtagggcagtggcaggggaggaagtattatagtaactggtggttacagagcagagattgaggccagtcctcctgggtcaagcgcatgcaccgctgcatccagctgcatgatcggggctaagttccttaatctctttgtatcttgtttccttcttccataaaatgctcatctatagcgcctaccttatgcagctgttggagggttaaatcagttgagtgaagcatttagaagctttcctggccaagactaagcgctscttgttgttgttagtattatttatctgaattaattttcagttcttctcccatttttaacagatctcaacagtgctcttatcttcttccatagcaacacgtcaaaaaacaaatgcaccatcatcctttccgtttaaattaggaatgtgaccagatttaaggaacagacattcagtttaaacaaatgaaaagttatttttcttgcctcggaatctgaggcctggcagttgctgatgtcttttagtgactcattcatgtgactctcctctaagaccccttccttttagctctgcagagtcagaactgggtcactcgtgggtcagtaggcctggggtgggggatgagaatttaaatggccaacaagtctgcagggactgctgctgctgccagcctgcaggctccgcttaaaagccaatgccttgaatgca

SEQ ID NO: 59999 - DNA, 661 bp, Homo sapiens
ggtgttttgacattcagtctctgatatggataactgttgtatgtcggacatgttatcttggaccacacataactcccagaagattcacctagaagtcactggttctctccaggctgttgcctactgtgccttacagaaatcaggaaacctgaccctgagcaggaacatagctggagcccaaagtctctagggcgtgggggtaatggaatgacttctgcatctcttggtctcaagggctttctttctccactcacgtccctctgacattgccctcctggggtctctttagtgcaggaacattcagtgggaaggggaaggagcaagyggagcagagcatcattgtgtgaattcccaggtccttccagatggccaatgctctttacctgtgaggagggcagggatggggcttgtacacagtgtgttttcagtccttttgccttccaggccttgctgacagtaggggaaagaaagtgagtacatccagaatggatggacttaccctgctgatggtgaaacagtgtggcattatattataaaacaagccggggggtgggggtgggggcaggatatctaagctcagttcatgaattcatgcccagctttatcattgagtcactgggcaatcttgggcgagtcacacagtgagtgttgcccacctctg

SEQ ID NO: 60000 - DNA, 864 bp, Homo sapiens
attagataagacctaatccattagattcttatttgttaagaaaatgtgtctcatctataagtgtcaccacaagtgatgtctgggaacccacctcccagatgagggcatttccaccatctgtgaggcctttggcgataaatattgccatgatacactgacacgaggatgctcccaactcctacaagtgagccatcaatgacagcaggcttcaggattccagggcaaggagcccagcttccttctgtctcttgtgtagtacaagagtcctggaatagaaggcaagaggcttgggctctgttaccacctcagccactttctagttatgtgatacttggctcttaagcctctgtatgcctgggtttcctcatctataaaataaatcattttaattattataattgcttcacagggttgatgtcagaattaagcaagataatccatgtaaagtgcttagagcagtgccttgaacgtgttatgtactcagtaaatagcagttgctgttkctgttgtcatcatcatcattattgtcaccattaatctatagataatattattattccagatagtctattattacttcatcaccaccactgggcaagcaaatcacttttcttctctaagcctctgttccctcttttatagaataagatgctatctcctagtcatctcaaaggttcttttgtttttattttggttttgtcttgttctttgctggaagagtatccatatgttgataagactctcaacgggctccccaaaatgttaagaacaactgtacattttatgtttgggagtcactactcctttgagatctgataaaggaaaataaatccccaatgcagaaaacacacacacacacacatt

SEQ ID NO: 60001 - DNA, 748 bp, Homo sapiens
tctggccctgaaggggacttacgatgccttagctggagacaggtatgcaagggattttccccactgacgaacatgcccactcctctaaaaactcaccctagaatagccttctgctcattataatagtaaaaaacacacctctgggagattttaaatgctaataacacatgcaatgtttgtactaacatgtacaaccatagagccagtgtacccaaaaagacctcccaaaacatgcttgcaattagcacccactcacrccccttcataaataatcatgtaagattctcctaaagagtgtccctcagcattagctctgggttcattctcttgtgcattccactctgttttgactttgagagtgtactgtctttttaaataatggtgatactgctgctgctactatttttccagctggaccaacccagagctgttttctactcctctccaggaatgtacctatagtccctcagtaaattctgctacaatgtgtctcttgactgaattctttcttccaagtcagacaagaaccaaagatgctcacacttcctgataacaataccaggaattttacatgttgctgtggtgtttgactagtactatgcctatcctcatctccacagaaggcctgttaaagtactgatgctatttgtcctatggaaaaagttgagaagatgaactaaactttggttgcagagttgttctgtattcaaactagggatgagctaatttccagccaaaaaggagcctg

SEQ ID NO: 60002 - DNA, 1805 bp, Homo sapiens
  misc_feature (1)...(1805): n = A,T,C or G
ttttactaggatgtgaagcctgtgaggcaggaatttcattactttttgtcatggccagcatctagaacattgtccgcgcatagtgggtcccagcagacacccgctaaatgaattagtgaatgagctgcagagttagccaacaaagggaagcacgttaagccataggcctggtctacaatggattaatggatttcccattgaactttcagaatctgctggccttctatcacagtcgctctgctgcagagcaccatttttgctattataggcagtaagccagctagcaaacagccatgctggggtacttgccaaactcaacaaatgccatttagaaacaaaagaacctctaatggagacatcagccgtttgttaaacaaaccattagtttggaagcagaagctgcacatgtgatgaatctactaatttacagagcattattggacattagttaattgccagacaacttcatgtcccaggatacattgaggaagcctctattactaaggagagattggatgtcttgcctgttaatgattacaggacgcatatacaagaatgaacgagtgagtagctcctgcatcatcctagtgtttcactgccacttctagaattatttctgagtttttatttttaaataaaagttatacttacacgctgaatatttatttatatttatttatttattcgtttatttcttgagatggagtcttgctcygtcccccaggctggagtggcctgatcttggctcagcacaacctctgcctcccgggttcaagcaattctcccacctcagcctcccgagtagtagctgggatcacaggcatgcgctactgctcctggctaattatgtgtatatatatatatatatttcagtagagatgagttttcaccatgttggctatcctggtctcaaactcctgacctcaggtgatccacccgcctcggcctcccaaagtgttgggattacaggtgtgaaccaccgcgcctggcctttgctgaatatttaaatggaacagaaagataaacaattagaattagtctctttacccgaagtccctttccagatgcatttttttagtcattatccacatataaaatgtcacaagcactcctcttgagattttacttaatgccacatttaggagatttttacagcacaaacaaatataaccaattcttatttaatggttgcatagtgctctattttgtgtgtgtttaataatttaattaatgggacagtactgatagttggtatttaggttttttttttaaactgttatgcaaagaacaagataaatgtacctgtaatgtcctatgaccataatgtcatgagtatatttgtaaagcaagttcctgacagaagtatttctgagacaaggaatatttgtgtttaaaaatatgaaactgctatattggcatcttgaatagaaagtagccatgagagtnnnnnnnnnnnnnnnnnnnnnnnnnnnnnnnnnnnnnnnnnnnnnnnnnnnnnnnnnnnnnnnnnnnnnnnnnnnnnnnnnnnnnnnnnnnnnnnnnnnntcccctaaaattcacaaaccatggtgtcacaaaatgttagatatttcagcttccatgctttttttttttaatttcaatagttttggggaaacaggtggtttttggttacatggataagttctgcagcggtgatttctgagattttggtgccaccatcacccaagcagtgcatactgcacccaatgtgtaatcttttatccctcacccttttcctacctttccccctgagtccccagagtccattatatcattcttatgcc

SEQ ID NO: 60003 - DNA, 1805 bp, Homo sapiens
  misc_feature (1)...(1805): n = A,T,C or G
ttttactaggatgtgaagcctgtgaggcaggaatttcattactttttgtcatggccagcatctagaacattgtccgcgcatagtgggtcccagcagacacccgctaaatgaattagtgaatgagctgcagagttagccaacaaagggaagcacgttaagccataggcctggtctacaatggattaatggatttcccattgaactttcagaatctgctggccttctatcacagtcgctctgctgcagagcaccatttttgctattataggcagtaagccagctagcaaacagccatgctggggtacttgccaaactcaacaaatgccatttagaaacaaaagaacctctaatggagacatcagccgtttgttaaacaaaccattagtttggaagcagaagctgcacatgtgatgaatctactaatttacagagcattattggacattagttaattgccagacaacttcatgtcccaggatacattgaggaagcctctattactaaggagagattggatgtcttgcctgttaatgattacaggacgcatatacaagaatgaacgagtgagtagctcctgcatcatcctagtgtttcactgccacttctagaattatttctgagtttttatttttaaataaaagttatacttacacgctgaatatttatttatatttatttatttattcgtttatttcttgagatggagtcttgctctgtcccccaggctggagtggcctgatcttggctcagcacaacctctgcctcccgggttcaagcaattctcccacctcagcctccygagtagtagctgggatcacaggcatgcgctactgctcctggctaattatgtgtatatatatatatatatttcagtagagatgagttttcaccatgttggctatcctggtctcaaactcctgacctcaggtgatccacccgcctcggcctcccaaagtgttgggattacaggtgtgaaccaccgcgcctggcctttgctgaatatttaaatggaacagaaagataaacaattagaattagtctctttacccgaagtccctttccagatgcatttttttagtcattatccacatataaaatgtcacaagcactcctcttgagattttacttaatgccacatttaggagatttttacagcacaaacaaatataaccaattcttatttaatggttgcatagtgctctattttgtgtgtgtttaataatttaattaatgggacagtactgatagttggtatttaggttttttttttaaactgttatgcaaagaacaagataaatgtacctgtaatgtcctatgaccataatgtcatgagtatatttgtaaagcaagttcctgacagaagtatttctgagacaaggaatatttgtgtttaaaaatatgaaactgctatattggcatcttgaatagaaagtagccatgagagtnnnnnnnnnnnnnnnnnnnnnnnnnnnnnnnnnnnnnnnnnnnnnnnnnnnnnnnnnnnnnnnnnnnnnnnnnnnnnnnnnnnnnnnnnnnnnnnnnnnntcccctaaaattcacaaaccatggtgtcacaaaatgttagatatttcagcttccatgctttttttttttaatttcaatagttttggggaaacaggtggtttttggttacatggataagttctgcagcggtgatttctgagattttggtgccaccatcacccaagcagtgcatactgcacccaatgtgtaatcttttatccctcacccttttcctacctttccccctgagtccccagagtccattatatcattcttatgcc

SEQ ID NO: 60004 - DNA, 1805 bp, Homo sapiens
  misc_feature (1)...(1805): n = A,T,C or G
ttttactaggatgtgaagcctgtgaggcaggaatttcattactttttgtcatggccagcatctagaacattgtccgcgcatagtgggtcccagcagacacccgctaaatgaattagtgaatgagctgcagagttagccaacaaagggaagcacgttaagccataggcctggtctacaatggattaatggatttcccattgaactttcagaatctgctggccttctatcacagtcgctctgctgcagagcaccatttttgctattataggcagtaagccagctagcaaacagccatgctggggtacttgccaaactcaacaaatgccatttagaaacaaaagaacctctaatggagacatcagccgtttgttaaacaaaccattagtttggaagcagaagctgcacatgtgatgaatctactaatttacagagcattattggacattagttaattgccagacaacttcatgtcccaggatacattgaggaagcctctattactaaggagagattggatgtcttgcctgttaatgattacaggacgcatatacaagaatgaacgagtgagtagctcctgcatcatcctagtgtttcactgccacttctagaattatttctgagtttttatttttaaataaaagttatacttacacgctgaatatttatttatatttatttatttattcgtttatttcttgagatggagtcttgctctgtcccccaggctggagtggcctgatcttggctcagcacaacctctgcctcccgggttcaagcaattctcccacctcagcctcccgagtagtagctgggatcacaggcatgcgctactgctcctggctaattatgtgtatatatatatatatatttcagtagagatgagttttcaccatgttggctakcctggtctcaaactcctgacctcaggtgatccacccgcctcggcctcccaaagtgttgggattacaggtgtgaaccaccgcgcctggcctttgctgaatatttaaatggaacagaaagataaacaattagaattagtctctttacccgaagtccctttccagatgcatttttttagtcattatccacatataaaatgtcacaagcactcctcttgagattttacttaatgccacatttaggagatttttacagcacaaacaaatataaccaattcttatttaatggttgcatagtgctctattttgtgtgtgtttaataatttaattaatgggacagtactgatagttggtatttaggttttttttttaaactgttatgcaaagaacaagataaatgtacctgtaatgtcctatgaccataatgtcatgagtatatttgtaaagcaagttcctgacagaagtatttctgagacaaggaatatttgtgtttaaaaatatgaaactgctatattggcatcttgaatagaaagtagccatgagagtnnnnnnnnnnnnnnnnnnnnnnnnnnnnnnnnnnnnnnnnnnnnnnnnnnnnnnnnnnnnnnnnnnnnnnnnnnnnnnnnnnnnnnnnnnnnnnnnnnnntcccctaaaattcacaaaccatggtgtcacaaaatgttagatatttcagcttccatgctttttttttttaatttcaatagttttggggaaacaggtggtttttggttacatggataagttctgcagcggtgatttctgagattttggtgccaccatcacccaagcagtgcatactgcacccaatgtgtaatcttttatccctcacccttttcctacctttccccctgagtccccagagtccattatatcattcttatgcc

SEQ ID NO: 60005 - DNA, 1805 bp, Homo sapiens
  misc_feature (1)...(1805): n = A,T,C or G
ttttactaggatgtgaagcctgtgaggcaggaatttcattactttttgtcatggccagcatctagaacattgtccgcgcatagtgggtcccagcagacacccgctaaatgaattagtgaatgagctgcagagttagccaacaaagggaagcacgttaagccataggcctggtctacaatggattaatggatttcccattgaactttcagaatctgctggccttctatcacagtcgctctgctgcagagcaccatttttgctattataggcagtaagccagctagcaaacagccatgctggggtacttgccaaactcaacaaatgccatttagaaacaaaagaacctctaatggagacatcagccgtttgttaaacaaaccattagtttggaagcagaagctgcacatgtgatgaatctactaatttacagagcattattggacattagttaattgccagacaacttcatgtcccaggatacattgaggaagcctctattactaaggagagattggatgtcttgcctgttaatgattacaggacgcatatacaagaatgaacgagtgagtagctcctgcatcatcctagtgtttcactgccacttctagaattatttctgagtttttatttttaaataaaagttatacttacacgctgaatatttatttatatttatttatttattcgtttatttcttgagatggagtcttgctctgtcccccaggctggagtggcctgatcttggctcagcacaacctctgcctcccgggttcaagcaattctcccacctcagcctcccgagtagtagctgggatcacaggcatgcgctactgctcctggctaattatgtgtatatatatatatatatttcagtagagatgagttttcaccatgttggctatcctggtctcaaactcctgacctcaggtgatccacccgcctcrgcctcccaaagtgttgggattacaggtgtgaaccaccgcgcctggcctttgctgaatatttaaatggaacagaaagataaacaattagaattagtctctttacccgaagtccctttccagatgcatttttttagtcattatccacatataaaatgtcacaagcactcctcttgagattttacttaatgccacatttaggagatttttacagcacaaacaaatataaccaattcttatttaatggttgcatagtgctctattttgtgtgtgtttaataatttaattaatgggacagtactgatagttggtatttaggttttttttttaaactgttatgcaaagaacaagataaatgtacctgtaatgtcctatgaccataatgtcatgagtatatttgtaaagcaagttcctgacagaagtatttctgagacaaggaatatttgtgtttaaaaatatgaaactgctatattggcatcttgaatagaaagtagccatgagagtnnnnnnnnnnnnnnnnnnnnnnnnnnnnnnnnnnnnnnnnnnnnnnnnnnnnnnnnnnnnnnnnnnnnnnnnnnnnnnnnnnnnnnnnnnnnnnnnnnnntcccctaaaattcacaaaccatggtgtcacaaaatgttagatatttcagcttccatgctttttttttttaatttcaatagttttggggaaacaggtggtttttggttacatggataagttctgcagcggtgatttctgagattttggtgccaccatcacccaagcagtgcatactgcacccaatgtgtaatcttttatccctcacccttttcctacctttccccctgagtccccagagtccattatatcattcttatgcc

SEQ ID NO: 60006 - DNA, 924 bp, Homo sapiens
tgcatattttttactcagtttaattaaacatggggactgtttaattagctttaattagaaaattaatgcagatcattcctacaagtctcaaacaatttagacgtgaatgaaattaaaaaattaaattctctccccctacaacccacctctccactcacacacctataaacacaacactcgcctacatcctcatcaagattcttccagctctaagatcctacatgtctccgccttgctactcaactccacctgaacgtttgggcatagccaattcaccaagctaccccattctgcttttttccatgaaaggtcttgctccttcccttttatttccagtctatggccccgtcagatgctacaatcctccttgactcaagaatttcaattcaacagttayaaaaattaatttttgaaactggtaagattgtgttatgagtgccttgtattgtacccaagcataagtatggctgaagaccatgacacagcctgcctctgaagtgacagtaaggtagaagtcccctgacaagtcttccacttgactgaccctttcattcactctgtaaagcaaagtgaccccagttcatggcattcagaatgcctacagctggcagggtccttgctaatccacccccacagctcagttcccatcttttaaggtgtatgcttttaaaaaaaccaactattgggtttttgttctcaaatctgtttattccatttataatggtaggcatgttatttaattttaaatattatataagctaatgaaatatgaatgctaaggaggggaaggaagcaaaatcagacagagagggaaatggagtggcaatgtgatgatcccaagggcactacttaataaatatctcacccactaaattccatctcattgtatgcttcccaggaaacccaacttgcaatggcgttgct

SEQ ID NO: 60007 - DNA, 967 bp, Homo sapiens
agtgtggaggactcttgtctttcaagaaactgtctgggcctggtgttttctttgtgagcacatgtttaatgactgaccaatttctttaatggttgcggtagtatgttacagttttccatttcttctgagtaatgtgacagttttaaaacatggcctgtatggttcacctccagcaggaagtgaagtctgtattcttcccctggaatacagactgttccaggtgctggaatagctggaccggtagagtactgctgaagtggctccattgtctcaggtcagcctttaagaaactgagatgaactaaagaacgaacgttatgtagaaaagagccaggatatgtggggtttgaaagtgagcctgttcttgactcccgacatctccagacagccgaagagtctcaaaataagaaagagcatcagagtagggatcagatcttggtactaggtgatcaactcattttggaagcccagaacttttctggctttaacactgaaaatctcacatcccaggaaatccctcagtaacatgaatggaaagctgacstatttttaaagttttcttcattggttttatgttctaacttctaattctgtgttttctttccttttctttaatttacagcatttttcagaccatttggtccctatgtgtatactgctgattacagagttattctgttaaaataattatgaagagaaaaattcaattgtgtattttgacacataattgtatttatatactcttaatttgttgattattttgtatacatagaaaaaaggctttgtgaattactatggaccacagagatttgggaagggaaggaaagttcacacagaccaaattggactagctttgctgaagaatgaaatggtatggattttgaaaaatgtaatcttatctgtttctgtcaattatacttactacataacccagctccttgctttcttaactctagcatataaatgca

SEQ ID NO: 60008 - DNA, 1535 bp, Homo sapiens
ttagaatgatacttttataatgaatcaatttttctgaaacatacatatgcatatacaacagacatatctctggatagtaaaaatatgaaaaattttttttcttaaactattctgtatacatatcatatttacaatgaatatacattgcttttgtaattaagagaccaaatgaatatatttcaatacttcagctcttaatttgtgggcctgacaactatatcatagagataacgtcaattgaaaggtaccctgtccacaagagtttctttaccagccaggcagagacccaaatgctagcattgacataacagaggaattaattgcttctgtgtacatgagcagtaagtactgactgtccttgttaaacatctgaagtttattgctggtgtaataaattttcattacatttcatttatagtaaagaaatattagtcaagtatgaaacattgctaatttgaatcctctataaatgaaagatgacacaatgtttcctaaagtgcttgaaaaaaatatataattaagtgaggggttcaaaaccctagctaatgttccttaaccaaggctacaaataaacaattagcaaaatattttaaaaatacaaagaaataaaaagattcatgtgaaaacagtaaaattcttaaaaatatacccttgrtttcagaggtggttgaagtaatttattgtccccattaagttggatgaataaagaacaaaatattgtaaacaacaattaattttaatgacatgaagatgatcacggatcctggacttgatattccaatctaagtatttcttttaatcttggattagcacttgatttggttaaaacattgttggattacctcacataaagtaagacagattcattcttgcatatttcccccctttttattcaaagtttattgtataaattctatgttcttcactcaaatcatgatatgaaatgaaaatgtagatgacataggagtcatattttattaagggagtgaagggaaaggtagaatttaaatatcttgcagtggccagaaagaggacacagtaaaactacaagtagaactggccaaaaggcaaccctgaagaaatgttaggttgatcagtgaaccctaaacaggctaattttaagaatgtttgcagccttaaaaattatgattcttagtttcttttgagaatcatttacatattccttttttgaattttttatcttttaaaacagggtctcactctgcacccaggctggagtgcagtggcacaatcatagctcactgcagcctcaaccacttggctcaagcaatcctcccacctaagcctcctgagtatctgggactaaggcatgtgccaccatgtccaactttttctttctttctttctttctttttttttttatggagacagggtctcactatgttgcccaggctggtctcaaactcttgtgctcaagtgatcctcccacctctgcctcccaaagtgctgagattatagtcatgagccactgcacccagctcatttccatattctttaagcccaacatgggatca

SEQ ID NO: 60009 - DNA, 641 bp, Homo sapiens
tggccatatattacatcttactataatgccatttaaatatttttgcatatttttaagttgggaaaccattccctttattgagaaaacttttaagatacagaaaaacagacttgtagtattaacacctgtgtagccttcacctcatatcttagtccattttgcattgctctaacacctgagactgggtagtttatttatttttaaaaaaggtttatttggctcaggattatgcaagctgtaagattgggcatctggtgaaagtctcaacctacttccacttgtggcaaaaatggaaggggagccggtacgtgcagacaggacactcactacccgagaggaagcaggagagacagcagggaggtgactgctctctcaggaactcatagagtgagaactcactcacccccagggtgggcattaatctattaatgaaagatctctctcatgatccaaacaccccccattctcccattaaaccccatctccaattgggaatcaaatttcagcatgagagttggaggcratgaacattgaaatcatagcacctagattcagtaattaagagttgccatagctgcttttggtcctctctccctctctctagttattcatcatatatatataatatatatacacacaca

SEQ ID NO: 60010 - DNA, 545 bp, Homo sapiens
gtggagttgcttgaacatgatcataagtgctgtaggtcttataccacttccagtgagatcactcatacctcccatactygcagactaaaaggaggaaggaagaacaaaacgcaacttttccttcttccatgaaatttttgcccatcataactagtacacagcatttgctaaagcttaatttgcaagcttaataatccaaaggatctgctgaataagtgtcaaatctgttttcaaagatagcaacaaacagcccgaaggaatcttaaaatagccatacatgctgcagcatcagcaggtaccgttctagcgttgtctctgtgtgctccctcagttgaaactgtgaagctggggataactgcatgtataccgccattgaaatgtatttgctaaggtcagagtatgtcacaaatgtccaaaagcgatagggcagagctctgccagtctgctttactggcagttattggaaactccattttagcataatcatttctctatattttgattcctgataccggaacttaatatgttaacctatatgttaatca

SEQ ID NO: 60011 - DNA, 526 bp, Homo sapiens
tcctcactagcccatttataaaatccctgactttttactacaacttggaaacccactcaggacccctccctgtgacagagagctgttctttccttttgcctattaagctcctgctccaatctcactctacgtgtgtgtgtgtgtccatgaccttgatttccttggccatgagaccaagaaccctggtatttaccccagacaacaaggctgcttcagtatgactgagaacttccaggtgttggagaaatgaaaaatttgctgggtaaaagtaataaacctgatctccaacatgttaagtataaaatgtcaacaaaatagcatttacttgagtgcacaatggagaaaagaaacaaatagtctcaataggttaaaagcaatggatttaataacatataaggcctatatagaggtgattaaatcttaataggacttrttaggaaaaacaggacagaagagcaagtgaaaggggtctgatggcactcactccgtagcgatatcccggatgagcccccaagatgtgtccaga

SEQ ID NO: 60012 - DNA, 991 bp, Homo sapiens
caagttcacattcagagttggactggtcagtactgctatttgagtatgccagcattttaaaaaactaagatgctacatgctcatggccatcttgttatctgccacggtgctttataggctcattctttggccatattcttaaagagatcagagaaaaatgtaattgacatttgaaacatgttttttttttttctctagaaaccacgccaatattttgcatcccattatgttcttttttcactactttcatatggcaggaagcccattttaaactccttaagagagaaaaagctatttcctttcctcactaaagaacttcacactggagaggcatggcttctacttctatcccttctccagctcccattcccaatcaaagtagagctaggtgtttagcagagttccttacacacagtaaacatcaatagagcgtatccactgaatgaacactattaatattgggtgataggttgttggaagtaggaagatggcactgaggaagaaaagattaaaaaatgaaaggtgttgcgtgaagtctgttggtaggtgtaactagtagttgccatggcttgaataactcccatggagaaagaataacttccatgaatatgtgctgtaggtcttgcttcatcaagctgtacattaggaatgtgccagatgatgctgtcaggggccaaaggttacaagaacactcacaatgcagcaaccagctgaatatttactacctgcagaagcaaatgataaaatatctcctctccagmgcaaggactgtctgcatggcgttgctgctttcaagccatggcccactactggatggtgcctggagagcttgtgataagaatggagcacattttccaaatgtgaatatcactaactcaggaactctgatgtctttccataacctaaactcaaatatcattgcctgggaccatggatcaaaacattcacctgactcatcagagctagtaactttaaaagaacctgcctctct

SEQ ID NO: 60013 - DNA, 505 bp, Homo sapiens
gaggaaactgaagtttattattttcccaagggcaacaaaaatagtcactggaggaactatgccatggattcctgttgatttaaagaactataagaaacatttcactgcagtgtcacaacagtgaatcagctaagaagcctggcctcctctgctgttctgtgtctacattcaggcatcaagaagcaaccatatggtggtgttaatacaacttatctctgtgaattataatctctaatatgtgtgcgtgcatctccyaaggatattgaagtttgatccctaggggaaaaattatacatgactttattcttgagaaataaacaattcattctaatgcacccctggttgcagcacgtgtaggagtgtgaggttcacactccaaagtctttattcattgacagagttaaaacagaaggaaaaataacataaaaatcatggcaaatgttatagattcctttaaagtactatattaatatattgggattaagaatgaccacaccaatcactt

SEQ ID NO: 60014 - DNA, 1295 bp, Homo sapiens
atttagtaaaataagctagaacacgtgtccctgctctgcaatggtggatgtcacagtagggagtgaggaacagcttccctagcaacacagtgaacccgaggcaagccctatgacaaggcagaggacttcagcgatgaaagtcatggcaacgctgggcagatgcaggggcactggcggccgctgcatcctactgtggggctgcacacccagcacagaggcagatgaatcttggagaatgacacaggattaccataaacgtagccacggcgtgacttcaattccaacctctgctccagatagagtctctatgggaacacacggacacagccccagccacctcttaattggttgttatggaaatggtttctccccttcactagcaatggmcgcagaacctcctgagccagcagtggtgcccatcactgtctgacttcccggctccctcaaccttctgactctttcccctgatttattgtgcaagggccctgaaggttgaggccaactcccaggattcatgctggttcaacacagtgataaccttatgctcattgaacatggcaagcagggatgatggataccctcaaggccacagggcaggagacgaactcccaggaaaattcaggggcctgcccctgtgggcagggtttttgggatccagtggtccttggcatgttgcaatatttctgccaaaagtaaaagataagttgctacatcttgaacctgctaccacttaaaaggaggtgcagcacttggtgatgtctgcattttgaaggcatccacgcacatttgatcatgctcctctcacttatttgctgagtgaattacggctgccaattttggtgaagcccataacgagagctgacgggcagctggtctagactgcagtaccaaagagaagatcccatggtgcccaaacagacagaaaggaagtttcaaaggagcaattgacaaaccttgaccagaaaaacagcacaaaccctgggaattctttcaaagcttcttctgcaaataactattctcggttagagaaatagttgctggcttgccactgatgtccctgaaggcccaaatacctcaggcttccatggagccagttcatgctgtggaattcctgtttctccctcagcccatccccgcagtctcatggggcattctatgagatcagccagatcaggaagggaaagtccaggtggttccattcggcacagggcaaagaaatacggagtgggaagaggaggaagggacttcacaaatatcaaggactccctgaagaccacttgcagacgcctgaactg

SEQ ID NO: 60015 - DNA, 664 bp, Homo sapiens
gttaattcatttactaagcagcgactgcatgcatacaataagaatacaaagggaggtaagtaaataacagctttgctttcaaaacactctacatttatttgacatatgtttcttgagcatttaccttgttccaggcactctgccaagtgttaatatttttaaaaattcagataatataaatctctgggaatctgatttgatatggacatcacctctcagagcctaaatatgctgaaaactgaagtcaccagagaagcatcttgataacattcactgtttcagattaatagagggagttaaatacacaagcggcatcgaaatggcattatatctcctgcaggctgttagactaaatgaaatttagtctgtaatgcttgctggagaaggttaaaaagccttmaaaggcccatacaaaagccatttcctacccagtggggtcaggccgtcttgccctcgggaggtcttcatcccagcagactccctgagtcggccccgggagctcctcagcttgcctggctgcctgtgtcttctgacacgtgtgttcttcccctgtgccgactatgtctactctgcgccttttgctgtcctcgttgacgaggcgctcctctgccactccacgcttactgctgcccgggcactctgtctggtcagcattccagaaaat

SEQ ID NO: 60016 - DNA, 731 bp, Homo sapiens
cttgatttagccattcaatgtaaacatatttcagaacaacatattgtactcgataaatatatacaattaaaaataggattattgtcagaaaatgtatttcaaatatgagataattataacttgtacactgcctacatgaaatttattataatgttatattgcattatatagtgtgttacaattgaataacaattgcattgccttgtacttctaacatgattcagaaaatgagcatgtcttcttagctcacatattctagcttaaatattgtatcaagtcaaatagcaatataagattgactttattcacttaccctccattcaaagtagacacacatttgttgctgttatttgggrgaaaatccatgtttagtaagtgtttatttaacgcttacatagtgtttaacatattccaggctttgttgtaatcatttcaccaatattaactcatttaatccttgtaacaatcctgtgagatactgttattttccacatttcatatagggagaaaagaggcataaatgggtcaagtaatttgctcaagttccaatgacaagagagtggcagagccaggattcagatccagaaagtcttactccagactaaaagagttgtcactgtgacaactctgctagcaaagctctgagataatgcttttccagtggaaataatgacatttttttcagatttacagcacaatttacctgcatactttctattgtgccctatcta

SEQ ID NO: 60017 - DNA, 2008 bp, Homo sapiens
tgcatgaattaaaatttaggaaaatatcaatgaaaactgcatgtgcctaaaaagggaaagatcttgattgataattatttgtttcaaaataaaattacttatattttactgtaaaaattttggtgacttttaatgttgaaggaaatgttaatcgtaagtaaaaaatagaacattcaaatattcattataaaagtaaatgaatgtaaattatcaccactttggttaagttataatttcctgttaactaaggaagaaaaagacatgtagaattatatgtagctgttatggttcaaacaaaaaggatgcaaattattttcaggatattttccctgacaccaattctagaatgtattgattatgcagattttgatgtaagggtgattaaataacacaaagagcaattgctctaacttcagctttacagaggataaagggcccttctgatagacagtacatgtattcctttctggaaaaatgaaactgtttataagtaaatctacatatactgacaatatttccacagtggccttgaatattataatctagacaaatccagaatctgtgacattaaaaagagttttaaatagcttggaagaatatttcacatgtttccagtagctatctatttattgtaataattaccttggaaaagttttaaaaattcaacttccaagacttaaccctggacctattgaataaatatttcttcataggacccatgaaatctctctaaattatcaaatattattattgataattttacaagtatggattgcagtcattttattttataacagttcataaaaggttaatattttagattaattacataaagaagtcatattgtaaaagcaggctgtaaaaatttaaaagttaaggcagagttaattaaaattttaagagagaacgtgtttttttttggttagtttctacatgagtgtatgtatactagccattaaaaagtaggtctgaatctgcaaacgcatgcagacaagcattgcaatgctatctcacagttgtaccaaatagcagggaagcaattctctggttaccataaccatgaaggaataccagtatggcttcttcaaaatgtattgctaagattaaatattacagcccaatttttgcacatgttgcattaatatctccatttaaaataatattaatgtttaaaaatcatacagtaacaccacttcatttataaaaattaagtaactaaaatctctgtagtaggaatattttattgaagaaattgaaaccctatagtaaatataaaactatgcatttaaatgtttccaataagtttgtgaaaacctatagataaatatgtttctatttactaaaaacaaaacaacaacaaatagccacgtgttatctaatgatagggagctggacgttatccttatgccactgtataaatgacactcactaatggccataattaactgtaaatgcagttatggaatgcactgcatttgacttgggaatgtgactggtgattacartttaaaaaattaatgacacacctacaagcacaccaattaccaacacaagactcccgttttcatatacaatatagaaaaatagaacattctcagatgttcaacaataccaccaccaccagcagcaacaacagcaaagctgggcaatcatcaaattcacaactattcttgaatccatcaatgaagtaagatcacaggccaaccaagtaactccaaatccatggaaagacaagtatatctaaggacagatgcagatcaagcagttgcttatctgggacagacaccagtggtcagctaaatattttgagaaattcttctccataatgctatactttgatgtttgtcccttccaaaattcatgttgaaatgtggttgccattgtgttggtgttggaaggtggggccttcgggaagcaattgagccatgagagctctacccttataggtggattaatgccattataaaaagtccagtttgttcctctcatgactttttgcctgttcacc

SEQ ID NO: 60018 - DNA, 2008 bp, Homo sapiens
tgcatgaattaaaatttaggaaaatatcaatgaaaactgcatgtgcctaaaaagggaaagatcttgattgataattatttgtttcaaaataaaattacttatattttactgtaaaaattttggtgacttttaatgttgaaggaaatgttaatcgtaagtaaaaaatagaacattcaaatattcattataaaagtaaatgaatgtaaattatcaccactttggttaagttataatttcctgttaactaaggaagaaaaagacatgtagaattatatgtagctgttatggttcaaacaaaaaggatgcaaattattttcaggatattttccctgacaccaattctagaatgtattgattatgcagattttgatgtaagggtgattaaataacacaaagagcaattgctctaacttcagctttacagaggataaagggcccttctgatagacagtacatgtattcctttctggaaaaatgaaactgtttataagtaaatctacatatactgacaatatttccacagtggccttgaatattataatctagacaaatccagaatctgtgacattaaaaagagttttaaatagcttggaagaatatttcacatgtttccagtagctatctatttattgtaataattaccttggaaaagttttaaaaattcaacttccaagacttaaccctggacctattgaataaatatttcttcataggacccatgaaatctctctaaattatcaaatattattattgataattttacaagtatggattgcagtcattttattttataacagttcataaaaggttaatattttagattaattacataaagaagtcatattgtaaaagcaggctgtaaaaatttaaaagttaaggcagagttaattaaaattttaagagagaacgtgtttttttttggttagtttctacatgagtgtatgtatactagccattaaaaagtaggtctgaatctgcaaacgcatgcagacaagcattgcaatgctatctcacagttgtaccaaatagcagggaagcaattctctggttaccataaccatgaaggaataccagtatggcttcttcaaaatgtattgctaagattaaatattacagcccaatttttgcacatgttgcattaatatctccatttaaaataatattaatgtttaaaaatcatacagtaacaccacttcatttataaaaattaagtaactaaaatctctgtagtaggaatattttattgaagaaattgaaaccctatagtaaatataaaactatgcatttaaatgtttccaataagtttgtgaaaacctatagataaatatgtttctatttactaaaaacaaaacaacaacaaatagccacgtgttatctaatgatagggagctggacgttatccttatgccactgtataaatgacactcactaatggccataattaactgtaaatgcagttatggaatgcactgcatttgacttgggaatgtgactggtgattacaatttaaaaaattaatgacacacctacaagcacaccaattaccaacacaagactcccgttttcatatacaatatagaaaaatagaacattctcagatgttcaacaataccaccaccaccagcagcaacaacagcaaagctgggcaatcatcaaattcacaactattcttgaatccatcaatgaagtaagatcacaggccaaccaagtaactccaaatccatggaaagacaagtatatctaaggacagatgcagatcaagcagttgcttatctgggacagacaccagtggtcagctaaatattttgagaaattcttctccataatgctatacwttgatgtttgtcccttccaaaattcatgttgaaatgtggttgccattgtgttggtgttggaaggtggggccttcgggaagcaattgagccatgagagctctacccttataggtggattaatgccattataaaaagtccagtttgttcctctcatgactttttgcctgttcacc

SEQ ID NO: 60019 - DNA, 1087 bp, Homo sapiens
catatgctcaataaatagtaatttaatttctataatataaacagttgtttctcttaatctttaataaacaaggcattttatgccaaatttcttccagtaacctccttgcatttaataaggaattgcatttttttattattttgaaagtcaaaaattttaaaagctgcctacttagttattaataaattgtttttgattggcatcattataatgtccttgtgtttgaatcccacttccctcaccatttcctaattgaaaatttgaaaactgagagtttcctagaataaacaaaataattctgacttactatctcttcctaaaataaagataaattgggaatcaagtaagtgtttataaacagtgcaatacaaacagcttactttccaatgttttgggaagtgaactttaatcgaaatcttgcttgtaaatcgattgcagatttgtaagaaagtgtatattattataatggcttggtaataagtatgaccctttgcaaaggacatatccttagggtattaatttaactttctcataagcaggagtaaagtccatatttacctcagggcactttttatattgccagaaattaaggtttgcctagataaaagtatatttcaaataaccacagaaaaggcactrtaaatgtaatttctgcctttattgaaaagcttctgtataatacatacaccattaaactcattggattactcccttccaatatagaatgaaaatcatttgaattgcatgcagttaactcttaagctacaaagcctgtttataaatgctatgattttgatgctttttgctttttcacgcacccaatgaccattcagggaccaaatctggcagctaacaatttgccattcaacattctgtcaatagatctttcttttaatagcctgttacattttaaaaagtgattgagctaattaaacacaactgtgaaactaagccgagatttaattaacattattcgatggctttgggaagtacataattattaacaaagatatatttgaaataactcaaagccgagctaaattcattaatccaggcctttagtattacttactgcaggcaactttta

SEQ ID NO: 60020 - DNA, 766 bp, Homo sapiens
tcctttcttccctttctcccttcctccctctcttcctccctccctctctgcctgccttctttccttccttcctttcttctctctctttctttcattcattcttttctctsttctttcttttctttctctctcacttattgtctctcttttctggatgcgtcctacatctgagctaacaatttaaaaccattgaaaatattttcaaacatatgggcagttagaaaaggcaaatattttaatacctagaagtattcaatggcatttactatattaaattatgacttaaaatatatatttatatttatttatatacatatatttaaaaacataccacaatgtttacagtcactgagatacagtgtttttgtttttggactgtgtttctatattgtttcttaagtactgcatagtaaaaaacaaaaacaacccaaaaactaaagtagtgaaatatttaattccaaagtttaaacaattaaaaaaattaatgacactaatttgttatttcttaggtctgtttgttacattactaagaatgttaattaaagccatcttaagatgtccttgattttacttttagtatttttcctgcacttctggtagcaaagaatccaaaatgaaagttaaatctgctgtatatttgaaagtattttatctgtttgccattatctgtgaactcttagctactactgcccagtaatccatgacctacatgttaaaggactttgatatttttatggtcaaaataaattgtttcaaagtcatttcc

SEQ ID NO: 60021 - DNA, 766 bp, Homo sapiens
tcctttcttccctttctcccttcctccctctcttcctccctccctctctgcctgccttctttccttccttcctttcttctctctctttctttcattcattcttttctctcttctttcttttctttctctctcacttattstctctcttttctggatgcgtcctacatctgagctaacaatttaaaaccattgaaaatattttcaaacatatgggcagttagaaaaggcaaatattttaatacctagaagtattcaatggcatttactatattaaattatgacttaaaatatatatttatatttatttatatacatatatttaaaaacataccacaatgtttacagtcactgagatacagtgtttttgtttttggactgtgtttctatattgtttcttaagtactgcatagtaaaaaacaaaaacaacccaaaaactaaagtagtgaaatatttaattccaaagtttaaacaattaaaaaaattaatgacactaatttgttatttcttaggtctgtttgttacattactaagaatgttaattaaagccatcttaagatgtccttgattttacttttagtatttttcctgcacttctggtagcaaagaatccaaaatgaaagttaaatctgctgtatatttgaaagtattttatctgtttgccattatctgtgaactcttagctactactgcccagtaatccatgacctacatgttaaaggactttgatatttttatggtcaaaataaattgtttcaaagtcatttcc

SEQ ID NO: 60022 - DNA, 766 bp, Homo sapiens
tcctttcttccctttctcccttcctccctctcttcctccctccctctctgcctgccttctttccttccttcctttcttctctctctttctttcattcattcttttctctcttctttcttttctttctctctcacttattgtctctcttttctggatgygtcctacatctgagctaacaatttaaaaccattgaaaatattttcaaacatatgggcagttagaaaaggcaaatattttaatacctagaagtattcaatggcatttactatattaaattatgacttaaaatatatatttatatttatttatatacatatatttaaaaacataccacaatgtttacagtcactgagatacagtgtttttgtttttggactgtgtttctatattgtttcttaagtactgcatagtaaaaaacaaaaacaacccaaaaactaaagtagtgaaatatttaattccaaagtttaaacaattaaaaaaattaatgacactaatttgttatttcttaggtctgtttgttacattactaagaatgttaattaaagccatcttaagatgtccttgattttacttttagtatttttcctgcacttctggtagcaaagaatccaaaatgaaagttaaatctgctgtatatttgaaagtattttatctgtttgccattatctgtgaactcttagctactactgcccagtaatccatgacctacatgttaaaggactttgatatttttatggtcaaaataaattgtttcaaagtcatttcc

SEQ ID NO: 60023 - DNA, 766 bp, Homo sapiens
tcctttcttccctttctcccttcctccctctcttcctccctccctctctgcctgccttctttccttccttcctttcttctctctctttctttcattcattcttttctctcttctttcttttctttctctctcacttattgtctctcttttctggatgcgtcctacatctgagctaacaatttaaaaccattgaaaatattttcaaacatatgggcagttagaaaaggcaaatattttaatacctagaagtattcaatggcatttactatattaaattatgacttaaaatatatatktatatttatttatatacatatatttaaaaacataccacaatgtttacagtcactgagatacagtgtttttgtttttggactgtgtttctatattgtttcttaagtactgcatagtaaaaaacaaaaacaacccaaaaactaaagtagtgaaatatttaattccaaagtttaaacaattaaaaaaattaatgacactaatttgttatttcttaggtctgtttgttacattactaagaatgttaattaaagccatcttaagatgtccttgattttacttttagtatttttcctgcacttctggtagcaaagaatccaaaatgaaagttaaatctgctgtatatttgaaagtattttatctgtttgccattatctgtgaactcttagctactactgcccagtaatccatgacctacatgttaaaggactttgatatttttatggtcaaaataaattgtttcaaagtcatttcc

SEQ ID NO: 60024 - DNA, 1135 bp, Homo sapiens
atacacatttgtcagttttgtggtgtaattttcataactaacatcatcataattaccctctttgaagataggtaaggtgataggtgtatttgaatttgatatcattctcttatacatctagagtgacttacacaaagcatgtacttttattacgacacatttgtggcataactttcagtacaatctgattgacatggggtctaaatccctgtaaattctcatactgtagagccttcctaagccaaatcatgagaaagcaaagctgatgttcagcacccctcgggcattccatctaccaaaggagtctctaaggatattccttagcctaaaatctcctaattgagcttctgaaattaaggtttatttctaatgtgaaccatatgcttaaaccatactggtgatcatgtagtccctgagattcatgacatttcctcctctcaatatttcctttaagcagggattaaactgtgacatttgaaagccatggcctttggagatagagtactgagatatgactttcacctctaacagtttttaactctgtggccctaggaaagaggcttaagctgcaagcctattttccctttttaaaaacagaccttactcagagagaattcatgatgaatgaataaaacaatctatttgacacccttaaaacagtacttgaaattaactttggaaatactttgtttttattattttgataatggaatttcatgatgataattattatgatagtaatcataatgatagctactattattgattgagcatcttctasgggaacttcttcccattatttattctctaagtttcacttattaatcaggaggacagcttttattttgtctactctataatacctctttcaaaatgttggcataattaacctccttgtcttctgagccaaaaaacatgtattgcttatcatagacttctttgtttctttttttttttctctctcttttttttgcttcattatattttacatacacatatggatgaataccaagtgaagtttatttatattaatgtttaaaattatgttatgtaaaaacttgttttattctgctttgtttttaagggcccctcttaattaaaaacgttaaattgaattcttttatttaaaatattt

SEQ ID NO: 60025 - DNA, 756 bp, Homo sapiens
aagtgtcagacaattggtttaaaatccaaggtgtgacatttattatctctggacattggggaatttacttatcaaataggagcttcatttttctcatttgtagaataatacttatcttttagggttattgtgcattcacacaaaaaaatgagatagtggacaaaaaaagttgtaattatgtaaggcgtatagacaaggtaaataaaaggtaaatatgagatatgtaaatgaggtaaagaaaataaaatacctaccatagtgcccaataacttcaattagctcacactgtagatatttccaatatagattatatattgtttcagagtttgaattgttaatatgaatttctctaacttttagatataaattaaacaaaaatccttaatctcttttttaactaaaaaaattcaggaggctgaggcaggagaatggcgtgaacccgggaggtggagcttgcagtgagccaagatcgtgccactgcactccagcctgggcgacagagcaagactccgtctcaaaaataatgatgatrataataataataataataataataataataataatttattgtgataatatacacataacataaaattaaccatgttaatcatttttaagtattctgttcaatagtgctaagtacaacatattaaacttctaaaagtattaagaagtcataaactctcttttctgattgttgtaaatttatttgtattaaggcaaaacatcttcctgagaacaacttcagtttcc

SEQ ID NO: 60026 - DNA, 556 bp, Homo sapiens
gaggwccgtgaattactgttacattaagccagctgttctggggataatcaggaggtgcaaagggtaaagatggcaatgttgtaccagtcttcctaaagaatgtgtgtctttctccttaggacaaaaaaaatggtctgaatttcagcccagtatacaattccattcaaatgacaaggtttcacagaatgaacagcccacaggtcctactggaaggaaattggcaacaaatattttataatccaagcagaaaatgtggcttggacttacattttattagcaaaatctgagaaccagactctgcttgtagcatagaatcagaagtttggaagaagttataaagttcttagcttgggttaaatatgggtcagtatgctccaagctgacccaagtttgtcctgctgaagcaaggccacttagaagatcctgggaggactttgatacaggagatgctagtaagtgggcattctagctcctctgaaagttgagcagtgagaatcttccccaataatttgtagaaaatcatagcccccagaaaagagaataaagaccataagga

SEQ ID NO: 60027 - DNA, 556 bp, Homo sapiens
gaggaccgtgaattactgttacattaagccagctgttctggggataatcaggaggtgcaaagggtaaagatggcaatgttgtaccagtcttcctaaagaatgtgtgtctttctccttaggacaaaaaaaatggtctgaatttcagcccagtatacaattccattcaaatgacaaggtttcacagaatgaacagcccacaggtcctactggaaggaaattggcaacaaatattttataatccaagcagaaaatgtggcttggacttacattttattagcaaaatctgagaaccagactctgcttgtagcatagaatcagaagtttggaagaagttataaagttcttagcttgggttaaatatgggtcagtatgctccaagctgacccaagtttgtcctgctgaagcaaggccacttagaagatcctgggaggactttgatacaggagatgctagtaagtgggcattctagctcctctgaaagttgagcagtgagaatcttccccaatawtttgtagaaaatcatagcccccagaaaagagaataaagaccataagga

SEQ ID NO: 60028 - DNA, 970 bp, Homo sapiens
ttggtcaagtataccatctctccctgggccaactaaaatacactagaggctgtccgacaaaaggcaaataactcccccttaccttagcatgaccttgctctataacctcaggggcctgcattgtggtactcccacttatccttgccataacctctatactgcaacatttccaccattgacacctccaaacataaaaggcctgttgaattgtgtggcccaagtgttagggctgcttgaactgcagcctggacctgctgcagagtccttttgtattctggacccctcaaaactggctacttttcatatcaatcagtgtataggccagataaatattcctaagggtggaatgtgtttttcctagattctaaaagttttcttctttgttattggagatgcacattatgacaatttgcattttgcagaggatgtctgggtaaatccctgactactggcattctttaattataggcgtctgggtggtaagtgtccaaatcatattctcaaaccattctcggtaccaactctgacaaattctgatctttcaggattgaggaagttggaagtgcaagccattccttggaaggtatgtctgtgagagacacagggggaagaagcaaaattaggtagaagaagacttcagaccatgatccagatctgaaatctgaaagaaaaggagattaaagcaggattgtgtagagagagcctcagacaaggtctctgtcaaagttctgggtggagattgcctgttagaggcgtccatgctggggagaaaagaccacwtgctagtagcctctccatggttggtctttggttgaaggcaacctatgaagccagagacttgccttgaaagctcatgctgactcaaagcgtctgcaggtgaaggctatcatctaactatcctcctttcagcttattattgttttgtttttctggaaggaagatctgagtgattcacctgtacaactgccac

SEQ ID NO: 60029 - DNA, 765 bp, Homo sapiens
atatttttgacattaacactatggtttttttttaaacataatatatttatcacactcaggaaatttgacattggtgttatgttgttacatgcatttcatattcacgtttcttataacaataagaataacaaaataataaaaatagtgtccttaatattgtttttgttaaacccactatccaattaaagatcatacattgcagttattctcatatctctttcctttcctttaaagattgtccccaagcacttaaaaaatttttatgggtacatagaagatgtgtatatttatggggtacattagttcttctttaaatgtttggtaaaattcagtagygaagctatcaggtcgtgggcttttctgtgctggaagactctttattactgcatctatctcattacttgttattagtctgttcgggttttggatttctctgcttaatttcagtgttctctcttacaagttctattctagcagtgattgttcataattttggtttttctttctggaagaggcaagtgttggatgcctccttttctatggtaggttttttatatttagcctctatcagattaagaatgtctttttctattcttagttttctgaaagagtttattttaaattatgtattggtattgaacttaataaaaaatttgtttttatgtatatatatatataaaatcatgcagtctttgctagttagcccattaatgtgaaggattacatcacaaatattctgataataaataaaaggcatgttttagg

SEQ ID NO: 60030 - DNA, 836 bp, Homo sapiens
atctctttcctggcaaatatcaattccatcttgtgtttgagttatacatttacgtattatgtgcctagcacttaaacaatttgctgaattatttgtttattaaatatttgctgaattgaattgaaatgtgaactatgctatgtagagaagaaggcctmcttcctccttgtgttctactttgatatggtaagatggaatcaccattgatttaacaatttatttttatttatttatttttttttttgaaggagtctcgctctgtcacccaggctggagtgcagtggcacgatcttggctcactgcaagctccgcctcctgggttcatgccattctcctgcctcagcctcccgagtagctgggattacaggtgcctgccaccacgcgtggctaattttttgtacttttagtagagatggggtttcaccatgttagcgaggatggtctcgatctcctgaccttgtaatctgcccacctcggcctcccaaagtgctgggattacaggcgtgagccactgcgcccggcccaaaaatttttttttattttaattattctgagtgtataatagttgtataaacataattgattttaacaacaaaagatggtcattagaaatggccaagtaaagtaggcttaaattatgattctggtttttcaaacctaatccttcatttattgcgtctttagagatgcaagaataaatgtgatggcagttcatgaggaaagaactggagaatatgagctgaccgcaaagtcaacagtgatttcccactgtgattccgttgttgaaaacgctaataccatctcaggctgcacttacaagagtgcaagtccagaac

SEQ ID NO: 60031 - DNA, 836 bp, Homo sapiens
atctctttcctggcaaatatcaattccatcttgtgtttgagttatacatttacgtattatgtgcctagcacttaaacaatttgctgaattatttgtttattaaatatttgctgaattgaattgaaatgtgaactatgctatgtagagaagaaggcctccttcctccttgtgttctactttgatatggtaagatggaatcaccattgatttaacaatttatttttatttatttatttttttttttgaaggagtctcgctctgtcacccaggctggagtgcagtggcacgatcttggctcactgcaagctccrcctcctgggttcatgccattctcctgcctcagcctcccgagtagctgggattacaggtgcctgccaccacgcgtggctaattttttgtacttttagtagagatggggtttcaccatgttagcgaggatggtctcgatctcctgaccttgtaatctgcccacctcggcctcccaaagtgctgggattacaggcgtgagccactgcgcccggcccaaaaatttttttttattttaattattctgagtgtataatagttgtataaacataattgattttaacaacaaaagatggtcattagaaatggccaagtaaagtaggcttaaattatgattctggtttttcaaacctaatccttcatttattgcgtctttagagatgcaagaataaatgtgatggcagttcatgaggaaagaactggagaatatgagctgaccgcaaagtcaacagtgatttcccactgtgattccgttgttgaaaacgctaataccatctcaggctgcacttacaagagtgcaagtccagaac

SEQ ID NO: 60032 - DNA, 836 bp, Homo sapiens
atctctttcctggcaaatatcaattccatcttgtgtttgagttatacatttacgtattatgtgcctagcacttaaacaatttgctgaattatttgtttattaaatatttgctgaattgaattgaaatgtgaactatgctatgtagagaagaaggcctccttcctccttgtgttctactttgatatggtaagatggaatcaccattgatttaacaatttatttttatttatttatttttttttttgaaggagtctcgctctgtcacccaggctggagtgcagtggcacgatcttggctcactgcaagctccgcctcctgggttcatgccattctcctgcctcagcctcccgagtagctgggattacaggtgcctgccaccacgcgtggctaattttttgtacttttagtagagatggggtttcaccatgttagcgaggatggtctcgatctcctgaccttgtaatctgcccacctcggcctcccaaagtgctgggattacaggcgtgagccactgcgcccggcccaamaatttttttttattttaattattctgagtgtataatagttgtataaacataattgattttaacaacaaaagatggtcattagaaatggccaagtaaagtaggcttaaattatgattctggtttttcaaacctaatccttcatttattgcgtctttagagatgcaagaataaatgtgatggcagttcatgaggaaagaactggagaatatgagctgaccgcaaagtcaacagtgatttcccactgtgattccgttgttgaaaacgctaataccatctcaggctgcacttacaagagtgcaagtccagaac

SEQ ID NO: 60033 - DNA, 642 bp, Homo sapiens
gccagacttggaagccatgtggcttcatactgcaaatagaaacacaatacagaactcactgtgatgagaccatttactcacacggcagatattactgagcatctgatatgaggtgggcattcatataagttagggaaatagcagtgaaaaagacagacaagattgctttcatggggtctagtacggggagacaaaaataaaccataaataaataaaaagataagttgaggcagagagtattaattgacatggagaaaaacatttgtgatgagataaagactgggttgggagctactttaagctgcgtagtcagggaagtcctctcttaggagatgacactgatgccgagacttgcatkgtgcacagtgaattgtgctgaggtcctgggggaaagcgttccaggcagagggcacagcaagcacagaggtcctgaaacaggaacaagccagggctgcccacaggctagaagacagccagtgtgaacaagcagagaatggaggcacaagggacaggggtcagatcatgcagggtcttatcggcatggcaagttacctaaattttattctgtaatgtgattataagccattagcaggatttatgcaagggagcgatatggtagatttacacgcttaagagattatt

SEQ ID NO: 60034 - DNA, 642 bp, Homo sapiens
gccagacttggaagccatgtggcttcatactgcaaatagaaacacaatacagaactcactgtgatgagaccatttactcacacggcagatattactgagcatctgatatgaggtgggcattcatataagttagggaaatagcagtgaaaaagacagacaagattgctttcatggggtctagtacggggagacaaaaataaaccataaataaataaaaagataagttgaggcagagagtattaattgacatggagaaaaacatttgtgatgagataaagactgggttgggagctactttaagctgcgtagtcagggaagtcctctcttaggagatgacactgatgccgagacttgcatggtgcacagtgaattgtgctgaggtcctgggggaaagcgttccaggcagagggcacagcaagcacagaggtcctgaaacaggaacaagccagggctgcccacaggctagaagacagccagtgtgaacaagcagagaatggaggcacaagggacaggggtcasatcatgcagggtcttatcggcatggcaagttacctaaattttattctgtaatgtgattataagccattagcaggatttatgcaagggagcgatatggtagatttacacgcttaagagattatt

SEQ ID NO: 60035 - DNA, 671 bp, Homo sapiens
catccacctctcctagccgaagtgcttcccaggccagctccatcctgttcttgggctcccaacgcccargaaggcattgtggcatggtagaaagaacctgagaattagaatcggacaggcctgggtttaaagcccaactcaccacttacagccgtgtgatcttgggcaaatcacatggtctctttagccgtccatttcttcatctataaaatacctacttcttttctatagcagattcacatattttttccctggggcaagttctgaagtaaccaagtaagcaaaaaacaaagataagtaagcgtgtccttaataaatccatttgaggggtacacttggaacccccatatatgtcaggcaactttctctactggggtggcagatgtgatcgaggcaggcaaggtccctgctcttatagagcctggcatctggtgcagggttccagtcagcacacatcagtgggtattaagcactattcaaagacctacatggtaataggaaatgacaaggaaagtcttctcccaggaggtgacatttcagccgagatctgagtgacaagaaggagcctcaggcaaagatggaaggaaaaaagatcatccaggcagagggaagagctaggataagctcctgcggagagaataagccaggacaaagcagccccagggagactg

SEQ ID NO: 60036 - DNA, 685 bp, Homo sapiens
tcccacctaagcctcctgagtagctgggactacaggcgcttaccaccatgccaggctttctttttaaaaaaaaaaaaaaaaaatgcttcatagagacagagtcttgtcatgttgcccagaktggtctcgaactcctgggtcaagcaatccacttgccttggcctcccaaattgctgggattacagacatgaggcactgcacctggccaactgaatcttccaattaacccctgttaattgtactactaattaattgtataattgtacaattaagaaatgtagttcttcagtttagggatagacccaccagcttccacgaaacatccattgtacaattgtacaattaagaaatggtggaatattaatgggttaattgaacaattaacaagggttaattgtaagatccaaaatgtaatcaaccagggagatttttcaatggaaatgtacagtttcatgggaactgattttcactcattttcctttttaatataatacaattgaatagtgccattcacacctctcataacatacactcccttgaatagatccaaatagccatttgccatttagcaaatgttttccctgatcctgtgctttgcttttgttacatttaaagtacactccccacttgctgcaaaaagtgtgactgcgattcaaactcagccctcttggctcatttatgaggg

SEQ ID NO: 60037 - DNA, 734 bp, Homo sapiens
agccaaagttaagaaaggaaagcatagcatacaatgagaattcaaaaaagaattctaattagcatctaacttaggttggagacaaaggaggaactgtgatattggtttttaaaatggaaacaaataccaaatggaaggtgattaacttgcatttaacatccatagatacacaaactgttattaattaacagcagacaaaaatgtgcccccgaactggtcatctctctagaaatccagtgatggaggtaagagaaagggattccactggggaagccaggaacacaggagaaccagaaccccatgctgctggacaatgaacaaagacarggttctgtctcgctttcacttactctggagctgagaccatgtcctagaataaaataggttgctgaacactagaaaggctgcagtgcagcatgaagcagtgtctgtctgacctcagcaccctgttctgattcctgatctgcgtttggttcctatgttactgaggaccactgtgtaccctactttcttaatactcagccccagggacccagtctctctgtacctctcccagacttccaggtgtttctcccctatgtgctgggatctttgctggtaaatatctggactgaagaaagtctgggatcttactcataacaaacacacagactgatgctgtggtttttgacttatctttggacttgtgcacccatggtcaaatcttaaagcttagcagaattcccaaggatccc

SEQ ID NO: 60038 - DNA, 1077 bp, Homo sapiens
cttttatgcatttattactaacatagctttaaatytttaaatgtattgaagcattgtgctgtctgaaaataaggaattgcttataaaccagccacttctgaatacaatatgtagctgatttaataagctagttagtgaatggaaaataagtgtggagtattaaaaatgttctttggttggtaaggcctaagatagggtttcatttatttctatactttttctgttttttaaacacctgcatatttttatgtaaatctctaaatttaaaatattttaagtacatttatttttggtgttttattgtataaaaccttagacaatcaatcagtcagtctttactgacaggagcagcagctatctgtcttttgctgatctacaaataaatgaattgagaatttagtccatagaggtccctggctaccaaacacattctcctttgaattgttaaaattcagaacattcaaaataactgttttgctacaacccatgattattttcctgttgtgtttatttaaatttactttctctttagaagtgcacttatttctgaaaaatcttaatgaaacaaacgcttagaacaaatataaatatgagacacttgggactactagagatattttagatttttatgaaaaaaatgtgaggggatattgctgctttaaaaaggaataaagtaataaaaatatatctcagctatttttttaaagcaatataattcagcaattgtctagaaaagtaatcatgaggctactgagtttggtgttcagttactgagtttcaaaaatgttttggtggcatgaggacaaaatttcattgaaggtaagataagaataaaaactatgtttacaaaatttctgttgatgaagttttttggttttatttttgagttttgagataggtgttacccaaaactcaagaaagactatttagttaatgtaaattactgtctaacttttacacttgaagatcacatcaagaacaaaatatttgaagtttgtatttaaaatctccattcaaatctgtagctaaaaacatataggctacacgaactgtgctgtactttcaggtacttattgg

SEQ ID NO: 60039 - DNA, 917 bp, Homo sapiens
gcatcaaatttctaatatatattcagaatgacagcaaccaaaacaatacatagaattttcccaaagggcctcactcacaagattattttagattccttgctccactgcaaaccttgcctgaatcccatcagttgaattgattgtcaaggaaatcccccctcccaaaaaaggaggcgaatttgcaacaagtccagcactgttyaagcagctctctttatgcacgctttccagtattctatctgctaataactttccaatttctccttattaaagagcaatgaagtgaaggataatttattgcttggttgaccattaatgtgatcaacatgtttactgccaattcttatacactttcttcaaattctgttaattgacccacaagcgtctcatcgatcctattctagaaataaaacattttttattttcacatcctcatagccaaaactgtcaggaactatgaagggtctaagattttaccttacttgcaagctaataagttagcctgctacagtttcgtggatgttggcaaaagccacaagactcctgggtcagaaggaaaaggactttattagtcacaactatagcagtatctagagtatcggcattttctttgccaattcagtgccctagctcccccaggggaatgcaaagggggacatctgtacatgcagtggtttgcattacaggagaagaaccatgagtttataaactcaaatattttaccatgggtagtaaacatacttgtcctttgttccaaggggaggcactatatcttctatagctttccttgtaaaaatatccttgaaaagacggtccataacaaaaacagcaagtttactcacaacacatgaaaaaatgctggagacccatgaagaattgtctcccatgaaagacctagaatgttcccccaaaattat

SEQ ID NO: 60040 - DNA, 917 bp, Homo sapiens
gcatcaaatttctaatatatattcagaatgacagcaaccaaaacaatacatagaattttcccaaagggcctcactcacaagattattttagattccttgctccactgcaaaccttgcctgaatcccatcagttgaattgattgtcaaggaaatcccccctcccaaaaaaggaggcgaatttgcaacaagtccagcactgttcaagcagctctctttatgcacgctttccagtattctatctgctaataactttccaatttctccttattaaagagcaatgaagtgaaggataatttattgcttggttgaccattaatgtgatcaacatgtttrctgccaattcttatacactttcttcaaattctgttaattgacccacaagcgtctcatcgatcctattctagaaataaaacattttttattttcacatcctcatagccaaaactgtcaggaactatgaagggtctaagattttaccttacttgcaagctaataagttagcctgctacagtttcgtggatgttggcaaaagccacaagactcctgggtcagaaggaaaaggactttattagtcacaactatagcagtatctagagtatcggcattttctttgccaattcagtgccctagctcccccaggggaatgcaaagggggacatctgtacatgcagtggtttgcattacaggagaagaaccatgagtttataaactcaaatattttaccatgggtagtaaacatacttgtcctttgttccaaggggaggcactatatcttctatagctttccttgtaaaaatatccttgaaaagacggtccataacaaaaacagcaagtttactcacaacacatgaaaaaatgctggagacccatgaagaattgtctcccatgaaagacctagaatgttcccccaaaattat

SEQ ID NO: 60041 - DNA, 917 bp, Homo sapiens
gcatcaaatttctaatatatattcagaatgacagcaaccaaaacaatacatagaattttcccaaagggcctcactcacaagattattttagattccttgctccactgcaaaccttgcctgaatcccatcagttgaattgattgtcaaggaaatcccccctcccaaaaaaggaggcgaatttgcaacaagtccagcactgttcaagcagctctctttatgcacgctttccagtattctatctgctaataactttccaatttctccttattaaagagcaatgaagtgaaggataatttattgcttggttgaccattaatgtgatcaacatgtttactgccaattcttatacactttcttcaaattctgttaattgacccacaagcgtctcatcgatcctattctagaaataaaacattttttattttcacatcctcatagccaaaactgtcaggaactatgaagggtctaagattttaccttacttgcaagctaataagttagcctgctacagtttcgtggatgttggcaaaagccacaagactcctgggtcagaaggaaaaggactttattagtcacaactatagcagtatctagagtatcggcattttctttgccaattcagtgccctagctcccccaggggaatgcaaagggggacatctgtacatgcmgtggtttgcattacaggagaagaaccatgagtttataaactcaaatattttaccatgggtagtaaacatacttgtcctttgttccaaggggaggcactatatcttctatagctttccttgtaaaaatatccttgaaaagacggtccataacaaaaacagcaagtttactcacaacacatgaaaaaatgctggagacccatgaagaattgtctcccatgaaagacctagaatgttcccccaaaattat

SEQ ID NO: 60042 - DNA, 917 bp, Homo sapiens
gcatcaaatttctaatatatattcagaatgacagcaaccaaaacaatacatagaattttcccaaagggcctcactcacaagattattttagattccttgctccactgcaaaccttgcctgaatcccatcagttgaattgattgtcaaggaaatcccccctcccaaaaaaggaggcgaatttgcaacaagtccagcactgttcaagcagctctctttatgcacgctttccagtattctatctgctaataactttccaatttctccttattaaagagcaatgaagtgaaggataatttattgcttggttgaccattaatgtgatcaacatgtttactgccaattcttatacactttcttcaaattctgttaattgacccacaagcgtctcatcgatcctattctagaaataaaacattttttattttcacatcctcatagccaaaactgtcaggaactatgaagggtctaagattttaccttacttgcaagctaataagttagcctgctacagtttcgtggatgttggcaaaagccacaagactcctgggtcagaaggaaaaggactttattagtcacaactatagcagtatctagagtatcggcattttctttgccaattcagtgccctagctcccccaggggaatgcaaagggggacatctgtacatgcagtggtttgcattacaggagaagaaccatgagtttataaactcaaatattttaccatgggtagtaaacatacttgtcctttgttccaaggggaggcactatatcttctatagctttccttgtaaaaatatccttgaaaagayggtccataacaaaaacagcaagtttactcacaacacatgaaaaaatgctggagacccatgaagaattgtctcccatgaaagacctagaatgttcccccaaaattat

SEQ ID NO: 60043 - DNA, 684 bp, Homo sapiens
acctcccctccccggttcaagtgattcttgtgcctcagcctcccgagtagctgggaccacaagtgtgtgccaccatgcctgcctaatttttgtatttttagtagagatgtggtttcaccatgttggcctgattggtcttgaacacctgacctcaggtgatccactcacatcacctcccaaagtgctgggattacaggtgtgagtcaccgcacctgagcagttacttcacacttaattaattaatttaaaatgcatgaaatatgttttttaacttgtagcactgtaaggaagaaatggtagggattatttagttctagatacatgtgaaacaagtgwtgtatatttggaaaattgtagctgtctgtgtgaacactggcacattttctatattcctcttccaaaataatttaagcaactgcatgtatttaagaatgtatccatggttcagttattttattttaaagcaattataatagaaacatgtgtttttaatgcttgttggaaccaagtgactacttttaatgcctgacatgtattatcacattcagtcctcacaacagtactatcaactaaatgattctgtggtgatcaaattttgcgaaagaggaaaataaggtactgagaagataagcaggttgcctaaaatgacatagctcataaatggcagagataagatttggattt

SEQ ID NO: 60044 - DNA, 684 bp, Homo sapiens
acctcccctccccggttcaagtgattcttgtgcctcagcctcccgagtagctgggaccacaagtgtgtgccaccatgcctgcctaatttttgtatttttagtagagatgtggtttcaccatgttggcctgattggtcttgaacacctgacctcaggtgatccactcacatcacctcccaaagtgctgggattacaggtgtgagtcaccgcacctgagcagttacttcacacttaattaattaatttaaaatgcatgaaatatgttttttaacttgtagcactgtaaggaagaaatggtagggattatttagttctagatacatgtgaaacaagtgatgtatatttggaaaattgtagctgtctgtgtgaacactggcacattttctatattcctcttccaaaataatttaagcaactgcatgtatttaagaatgtatccatggttcagttattttattttaaagcaattataatagaaacatgtgtttttaatgcttgttkgaaccaagtgactacttttaatgcctgacatgtattatcacattcagtcctcacaacagtactatcaactaaatgattctgtggtgatcaaattttgcgaaagaggaaaataaggtactgagaagataagcaggttgcctaaaatgacatagctcataaatggcagagataagatttggattt

SEQ ID NO: 60045 - DNA, 1792 bp, Homo sapiens
attcctatgctttgttgttttaataatagggactattttcatgtactttatatcacattagtagtagaaaaccaacaactcaatagatgtagaaaaattttagtgaatgcaatttgacattattcttaatcaaaaccaactaataatctaaaagtattttttaattgtaataatgaaatattttcaaaatgcatcaaagaagtactcacaatttgtaaaatgctcctggcatacaacagggccctaaaaaagaccaagtgctataaaacacattttatatatttagcatcatagaatttaggagattattttatttaggagcttgcaataggaaaacattcattaagaaggaatgcctcaaataaaggaaagagacctgagattaaatagacacaggtagaccaatgagtcatgtgtaagacttatgggatttgcaacaaaggttagagatggttcttttatctgagacattctggaaaggtggaggcagatcttatcttagaatacataagaacagcgtggtccttgtgatgacagtttcctagaacacaaaagagtggagaaatttcttaatcattgatattttctggaagcacagggctcagatgaagttcaacattgtcaatgtcttacctggaacattacatgactatgcgactaaagttatctaccatgagcttggcattataagatccatcagatcgtgtaaccagatagccacagtgaccactgaaaatgcaaatggtatattttgaattgggtctaataagctccaaacttacaagtaagttgtatatatgggtggctcaaattctcatgttacctagttctattgtatctatgcttcttcctcaagtcaaattgtgatcttatgaagacattcatatgatcaacttgcaaagaaggaaaaaaaatcaggactggttaaaatataagtgtactacattgttctaattattgactaatacatataattttttaaaaatttattggcagatgcatgaatgcaagcacatagatacatttatctgtctaaataatacactttaatatattaaattatgttatttatatattatataatactatatattctatattctattatatattatttctgtcattacagatctcctcagtgcttgtcttaatgacaattgtaagggaagagccttccagtagcaagacttgattatcacatggagaaaagtggcttgaagtatgagtatatacaggctcctcagcaggagggagtggcttttgctgattgatcaaggttctagaaggtataatatttgaaaaccagggacaagaagctctcaagaaaatgtatatggacacatctatgagaaaagccagagagcakgtgactattaatgagtctataacacggaagaaattcttaaaatattttagattactagaatgactcatcttatggatgtaagtctatttctgctcagtcatctatttctgttcagtgctgattcagtgaacagagcaaccctggaaacaaaggcagaaaacgtatatgaatccaccacgattagttctctttaaactcagatccctgatgagttaatcacacctccgaatgaccaactttgtgccctagagactaatgctgaacaatttatatagcatcattcctaaatacacaatcatttctttggtggcaattaaatcatattggaccatttcttagagggaacaggtgatatttgaattacctcttaccatggatatgggcttgtctttcctgtccacagtgcaactgctagcattactaaca

SEQ ID NO: 60046 - DNA, 1792 bp, Homo sapiens
attcctatgctttgttgttttaataatagggactattttcatgtactttatatcacattagtagtagaaaaccaacaactcaatagatgtagaaaaattttagtgaatgcaatttgacattattcttaatcaaaaccaactaataatctaaaagtattttttaattgtaataatgaaatattttcaaaatgcatcaaagaagtactcacaatttgtaaaatgctcctggcatacaacagggccctaaaaaagaccaagtgctataaaacacattttatatatttagcatcatagaatttaggagattattttatttaggagcttgcaataggaaaacattcattaagaaggaatgcctcaaataaaggaaagagacctgagattaaatagacacaggtagaccaatgagtcatgtgtaagacttatgggatttgcaacaaaggttagagatggttcttttatctgagacattctggaaaggtggaggcagatcttatcttagaatacataagaacagcgtggtccttgtgatgacagtttcctagaacacaaaagagtggagaaatttcttaatcattgatattttctggaagcacagggctcagatgaagttcaacattgtcaatgtcttacctggaacattacatgactatgcgactaaagttatctaccatgagcttggcattataagatccatcagatcgtgtaaccagatagccacagtgaccactgaaaatgcaaatggtatattttgaattgggtctaataagctccaaacttacaagtaagttgtatatatgggtggctcaaattctcatgttacctagttctattgtatctatgcttcttcctcaagtcaaattgtgatcttatgaagacattcatatgatcaacttgcaaagaaggaaaaaaaatcaggactggttaaaatataagtgtactacattgttctaattattgactaatacatataattttttaaaaatttattggcagatgcatgaatgcaagcacatagatacatttatctgtctaaataatacactttaatatattaaattatgttatttatatattatataatactatatattctatattctattatatattatttctgtcattacagatctcctcagtgcttgtcttaatgacaattgtaagggaagagccttccagtagcaagacttgattatcacatggagaaaagtggcttgaagtatgagtatatacaggctcctcagcaggagggagtggcttttgctgattgatcaaggttctagaaggtataatatttgaaaaccagggacaagaagctctcaagaaaatgtatatggacacatctatgagaaaagccagagagcatgtgactattaatgagtctataacayggaagaaattcttaaaatattttagattactagaatgactcatcttatggatgtaagtctatttctgctcagtcatctatttctgttcagtgctgattcagtgaacagagcaaccctggaaacaaaggcagaaaacgtatatgaatccaccacgattagttctctttaaactcagatccctgatgagttaatcacacctccgaatgaccaactttgtgccctagagactaatgctgaacaatttatatagcatcattcctaaatacacaatcatttctttggtggcaattaaatcatattggaccatttcttagagggaacaggtgatatttgaattacctcttaccatggatatgggcttgtctttcctgtccacagtgcaactgctagcattactaaca

SEQ ID NO: 60047 - DNA, 510 bp, Homo sapiens
gatcactggagtcagttcaaggaatgaaagcagaaacgccgaaacaggagaggacacatagtaatgcactgggtttttgcacacacttcacctgcttttctcccaatgttcaggatcctaaatcaaaccaaaattgtgataaagaaatgtaaaaacattattagttaattgagttcgaccagagtggattaattacaataaagagatgacaattaattacaataaaaaaaaagttttttttaaagactaatgagattaggccaggtgcggtggctcacacctgtaatcccagcactttgggaggccaaggtgggtgggtcacctgaggtcaggagttcgagaccagcctgaccaacatggagaaaccccatctctactaaaaatacaaaattagctgggcatggtggcacacgyctgtaatcccagctacttgggaagctgaggtgggagaatcgcttgaacctgggacgcagaggttgtggtgagctgaaatcgcaccattgcactcca

SEQ ID NO: 60048 - DNA, 579 bp, Homo sapiens
agcaaatacaaggtttctgcaccaaagatcagtcccattattttttaaaacaataatgacacaagtttcccatgcccccttctcttcctcaaggtgacgtgatgagggaagatgaactctgtacatatagagagagtctctaggagaagagaggatcactaagattatacatttcgcagcttatatagaaacagctgcacagcagcccctctttctctccagagagaagaaattctgtttctaacaaacatatcctctccgagggaggcgagaaaaatccctagatgtttgcaaccctttggaatgtaaataaatggctccaggggagatgggtcgtaggcctgtttaccattcaaacatctcttaatcctgattcccagtaatttttgcttagaaagccctgattgtacagaatatgagatattagttgtttctcaacaacagatacatgatagtcttagtttactttccctgtatattatacttaggtcatttctgaatccccctgggttatttttctataaasagtaacactgttcagagtcaggctctctctactgagcttctatgctcctctaa

SEQ ID NO: 60049 - DNA, 983 bp, Homo sapiens
ttataaaactgatacttttataggtctgaaatgactggcaaggctaacatcaaaattataaagaacttccatagttcaatgtactgtattaatttttgtatgtatatatcartagcaatatatagagaataaagtttataattaatagatttatgattacatcgaaaatatcaaatccttagaaataagcctaataagaagtgtgcaaaccttcttaactaaaaaaagtacttatatttatatatttataaataataaagaaagaactgcttgtgtgtatagagagaatgacataatgaaagagagagagaaaagagagagagaaataatttaaatctccaaataattgagggatagttatcttcatgacctaagactaggcaaagatttcttaagaaggacatgagaaaacagtaacaataaagtgtgcgtgtatgtgagcatttatattaagatataaggtgtctctttattaaaagccatcattaaaaattgtaaatgtagcttacgtattgggagaagatacgtggaatacactagattacatccaacatgtattacatgcaacgcatccaaccaaagactagcatcaaaattatataaagaacttctataagtcaataagaaaaaggcagattttttgactattggacaaaagacataaacagattcttctcaaaagaagatatctaaatctccaataaatgtttgaaaatatattatctattaatatcttattatttagtgggaaaatacagattaaaataatgatttaccccatatatgaaaaagaatggctaaaatgaaaaagatagtcctcaccaaaaaaaaatgttggtggaaatgtgaagcaaccagaactcactctcatacactgctgattggagtataaatcggtatacttattttggaatactgacactaccttctaaaggtaaacataggtctaccctatgacccaacaattcgactctttggtacac

SEQ ID NO: 60050 - DNA, 983 bp, Homo sapiens
ttataaaactgatacttttataggtctgaaatgactggcaaggctaacatcaaaattataaagaacttccatagttcaatgtactgtattaatttttgtatgtatatatcaatagcaatatatagagaataaagtttataattaatagatttatgattacatcgaaaatatcaaatccttagaaataagcctaataagaagtgtgcaaaccttcttaactaaaaaaagtacttatatttatatatttataaataataaagaaagaactgcttgtgtgtatagagagaatgacataatgaaagagagagagaaaagagagagagaaataatttaaatctccaaataattgagggatagttatcttcatgacctaagactaggcaaagatttcttaagaaggacatgagaaaacagtaacaataaagtgtgcgtgtatgtragcatttatattaagatataaggtgtctctttattaaaagccatcattaaaaattgtaaatgtagcttacgtattgggagaagatacgtggaatacactagattacatccaacatgtattacatgcaacgcatccaaccaaagactagcatcaaaattatataaagaacttctataagtcaataagaaaaaggcagattttttgactattggacaaaagacataaacagattcttctcaaaagaagatatctaaatctccaataaatgtttgaaaatatattatctattaatatcttattatttagtgggaaaatacagattaaaataatgatttaccccatatatgaaaaagaatggctaaaatgaaaaagatagtcctcaccaaaaaaaaatgttggtggaaatgtgaagcaaccagaactcactctcatacactgctgattggagtataaatcggtatacttattttggaatactgacactaccttctaaaggtaaacataggtctaccctatgacccaacaattcgactctttggtacac

SEQ ID NO: 60051 - DNA, 983 bp, Homo sapiens
ttataaaactgatacttttataggtctgaaatgactggcaaggctaacatcaaaattataaagaacttccatagttcaatgtactgtattaatttttgtatgtatatatcaatagcaatatatagagaataaagtttataattaatagatttatgattacatcgaaaatatcaaatccttagaaataagcctaataagaagtgtgcaaaccttcttaactaaaaaaagtacttatatttatatatttataaataataaagaaagaactgcttgtgtgtatagagagaatgacataatgaaagagagagagaaaagagagagagaaataatttaaatctccaaataattgagggatagttatcttcatgacctaagactaggcaaagatttcttaagaaggacatgagaaaacagtaacaataaagtgtgcgtgtatgtgagcatttatattaagatataaggtgtctctttattaaaagccatcattaaaaattgtaaatgtagcttacgtattgggagaagatacgtggaatacactagattacatccaacatgtattacatgcaacgcatccaaccaaagactagcatcaaaattatataaagaacttctataagtcaataagaaaaaggcagattttttgactattggacaaaagacataaacagattcttctcaaaagaagatatctaaatctccaataaatgtttgaaaatatattatctattaatatcttattatttagtgggaaaatacagattaaaataatgatttaccccatatatgaaaaagaatggctaaaatgaaaaagatagtcctcaccaaaaaaaaatgttggtggaaatgtgaagcaaccagaactcactctcatacactgctgattggagtataaatcggtatacttattttggaatactgacactaccttctaaaggtaaacataggtctaccctatgacccaacaattcractctttggtacac

SEQ ID NO: 60052 - DNA, 1652 bp, Homo sapiens
gagaaggcagaatgttgaaagaaattaaaggcctcaatttgaagaatctgcagggaatttggagagaaggtgaagtataatagtaaaggcagtgagcaagtggtttagtctacaaactacagggttggcaaaggagacaacacatcttactgaaaatactggagtggtagtgatggtggttggagtcatgcttctcaagctgtgatccaaaaaatacctacttgagattcacttggatttctatcaagcaagcatttaccaatgcccttctcctccctttcaacgtgactgagtcagaatgctgagtagtgaaagatttcaggaaatgtgcttctttaacaaacagccaggaggattctgatatccatcaaattttgataatttctgacttagatattcctagttaactggtctcttgtttttgtccatcccactgaagttggtaacatggataataaatgtcggaacagacaagagacaataggagattgtacaatttcttatgctattgattatttgaaagttaacatttctatcttttgtatattaattattttaacttttttgtgcccctagggcttaaaaatatactcatggtctaatatcatgcatcagcttttgttttttataatgtttcaaaggtacacatatacaaatgaggaatatttatataatttttattctataacttctgtgcagaaaaaaagggaggatattataagaggtattaagtaactattacacaatcctgtgtttctgtatttatacattatttaagaaatgaaaaaccctggaattaaatgatattgttcacataatattttgctttataaaatcttttaagattaatagaagtgaatatagataaaaattgtgggggtgtttttatccagactataacaacaagtcttgcttgttttgaatctttttgacatattttaagaaagagttcatctgattttgctcaaattaatctttctcttgcttagcaaagtcaattgattagggacctcaattacattacataatctcttttacataacataataatgtgaatatttcatcatattcataagtaccactcacactcaaggggaggttattatagaaggtatgtacataatgctgcaggaaacttggggatcatctcagaattctgcataccacaggaaggaatcaaaataaaagggtgctagttgcaaactcagaagtggctttagattcgcacaagtaagttgcctgagcaggttttcccaatgtccaagaatgactcaaccaagagtgactttaacagaggaggatcttaataatctggtagacaagttgaccagttccatagatgtcaatcagcttcttttccaagtcttaacccgtgcagtggtctaattagcaaagcgttcatgtcagtagggttggaggttaaactcgggctaaataatatkgacttctacacaccacagatgatctactaatagccactgcttcgtatctaatctgccaatcacagagaccaacactgtcacctgaatatagaaaaattttcttggagggatcagcttgctacctagtataagtgtgattacattggacaaaattcattctggaaagaatagcactgtgctcgcacttcaacaggcatttatacaagatat

SEQ ID NO: 60053 - DNA, 1652 bp, Homo sapiens
gagaaggcagaatgttgaaagaaattaaaggcctcaatttgaagaatctgcagggaatttggagagaaggtgaagtataatagtaaaggcagtgagcaagtggtttagtctacaaactacagggttggcaaaggagacaacacatcttactgaaaatactggagtggtagtgatggtggttggagtcatgcttctcaagctgtgatccaaaaaatacctacttgagattcacttggatttctatcaagcaagcatttaccaatgcccttctcctccctttcaacgtgactgagtcagaatgctgagtagtgaaagatttcaggaaatgtgcttctttaacaaacagccaggaggattctgatatccatcaaattttgataatttctgacttagatattcctagttaactggtctcttgtttttgtccatcccactgaagttggtaacatggataataaatgtcggaacagacaagagacaataggagattgtacaatttcttatgctattgattatttgaaagttaacatttctatcttttgtatattaattattttaacttttttgtgcccctagggcttaaaaatatactcatggtctaatatcatgcatcagcttttgttttttataatgtttcaaaggtacacatatacaaatgaggaatatttatataatttttattctataacttctgtgcagaaaaaaagggaggatattataagaggtattaagtaactattacacaatcctgtgtttctgtatttatacattatttaagaaatgaaaaaccctggaattaaatgatattgttcacataatattttgctttataaaatcttttaagattaatagaagtgaatatagataaaaattgtgggggtgtttttatccagactataacaacaagtcttgcttgttttgaatctttttgacatattttaagaaagagttcatctgattttgctcaaattaatctttctcttgcttagcaaagtcaattgattagggacctcaattacattacataatctcttttacataacataataatgtgaatatttcatcatattcataagtaccactcacactcaaggggaggttattatagaaggtatgtacataatgctgcaggaaacttggggatcatctcagaattctgcataccacaggaaggaatcaaaataaaagggtgctagttgcaaactcagaagtggctttagattcgcacaagtaagttgcctgagcaggttttcccaatgtccaagaatgactcaaccaagagtgactttaacagaggaggatcttaataatctggtagacaagttgaccagttccatagatgtcaatcagcttcttttccaagtcttaacccgtgcagtggtctaattagcaaagcgttcatgtcagtagggttggaggttaaactcgggctaaataatatgkacttctacacaccacagatgatctactaatagccactgcttcgtatctaatctgccaatcacagagaccaacactgtcacctgaatatagaaaaattttcttggagggatcagcttgctacctagtataagtgtgattacattggacaaaattcattctggaaagaatagcactgtgctcgcacttcaacaggcatttatacaagatat

SEQ ID NO: 60054 - DNA, 1093 bp, Homo sapiens
tacttgaaacaagtgaaaagacggaaaatctcagcgaaaaagaagatataaaaaagaaccagaaaaacttaagcaaaaaaaaaaaaaaaaaaaaaaaaaagaaaggaaagaaaaaaagaaaaattcaccacatggtgaattatcttagtaactgagaggacaagtagacataaaatcagaaagaatataagataaacaaaattaccattgaccacccagatctcactaatactcagagaacattccacccaaaagcagcagaataatcatactacccaagtgtacatgcaatatttaccaccaatcacattccaagaccatgggttgggggtggtgggggaactctaacaactgtaaaataaaaatcatacaatgtgtttttgggatcagtaaggaattaaacaagtaaatgtgaagatagattaacagattatccaatggaaacaacaggggaaaataaaacagaaaaaaaaaacactcttatgggacaacgaaacctctaaaaatcacgtcacaggagactaagaaacaaagaagaaaataacatgccatttttaaataaataatggccacacccccaaaaagaattggcaaatgacataaacagattcagaaacccaaaaagttttttgtttttgctgttgttgctatttttttgtttgtttgtttgcttttgagacagagtctcgctctgtcacccaggttggagtgcaatggcgtgatctcggctcattgcaacctctgcctcccaggttcaagcgattctcctgcctcagcctcccaagtagctggcattacaggcacacaccaccacaccaggctaaacattttttatggtatttttagtagacacgggattttgccacgttggccaggctggtctcgaatgcctgacctcaggtgatccacccacctctgcctcccaaagtgctgggattacaggcgtgagccatcacgcctgacccaaaaactattttttttaatccctgcctggaaacataatcaaactgcagaaagctaaagaacaraagccatctggaaagctgccagagcaaacaatacatcctgcacagggaaacaatgaattctacac

SEQ ID NO: 60055 - DNA, 634 bp, Homo sapiens
catcgtggtctccaggaagtggctctcagctcaggcagaccaggccctcagagtcaacaaaaccacccagttcacctgccccagtgggcggaggctcctccacaggcctcagaagtactgactaacactggcctggagcagatgtttggagatgtgggctgtgctggaaaaatccactgctggtgctgttgctaagctacctgggaaggaggcagagggccggtgggcaagcccagctgccagggtggcctggggcacccactgccaccatcggtgcggctgtcctactgtccggctagtgggagccggctttctcactcccttttccaggcagtctgagctctgaatgtattcagcaactcgtagcagccattctacatgaatttcatgttagaaataaacaaagctccccacatgatgtccatgttacacaatttgatgaaagggcacgttctcgctgtagggacatgtctctctgcaaagccccagaaagcaccaggacgcagctcagcctcagaggcaccaggcagagcwctggctgctggcaccgtgggctccagactcctgaacggagctggctcagggcagaaggtgctgttcagatggaagcagcaacacccagacaccatgggat

SEQ ID NO: 60056 - DNA, 634 bp, Homo sapiens
catcgtggtctccaggaagtggctctcagctcaggcagaccaggccctcagagtcaacaaaaccacccagttcacctgccccagtgggcggaggctcctccacaggcctcagaagtactgactaacactggcctggagcagatgtttggagatgtgggctgtgctggaaaaatccactgctggtgctgttgctaagctacctgggaaggaggcagagggccggtgggcaagcccagctgccagggtggcctggggcacccactgccaccatcggtgcggctgtcctactgtccggctagtgggagccggctttctcactcccttttccaggcagtctgagctctgaatgtattcagcaactcgtagcagccattctacatgaatttcatgttagaaataaacaaagctccccacatgatgtccatgttacacaatttgatgaaagggcacgttctcgctgtagggacatgtctctctgcaaagccccagaaagcaccaggacgcagctcagcctcagaggcaccaggcagagcactggctgctggcaccgtgggctccagactcctgaacggagctggctcagggcagaaggtgctgttcrgatggaagcagcaacacccagacaccatgggat

SEQ ID NO: 60057 - DNA, 662 bp, Homo sapiens
ccttgccacagcatttctgagctacctgtggtgaaaattcaatagctaagaccctcacgggtctttcttagaggttggaaccctgggcaaaggtgcccccaggcccaggtggcccctggaaaaggatatgattctccagcagatgcccagcttgctgtggatctccaggcctcgggcttcccgccgctcttcctccagctgcttggggtttgcaaattgccccttctccccaggggactccgggaaactctcaaagttgaacttgtccacttgaatagccattctacgagaaaggggaaaacacagcagagaattcatcagtagggcaatttctgccggctgttggagaatcagcacatgccagcgtgagacactataatgaatcattatcgttagtaattcataacggattcattccaagaaaatgaaataatagaytcctaaggtggccctgacttcagagctggttcaacacacaatttggagctgaagacacagtcattgcttcaaacctctgggaagacctgtgttaccccagataaaaatttcaattccataacacagcaaggcaggaaagaaccagtgtgccatagatagtgagctggatggcgacttaaactcctgtgcagtcatggagaacgctgacaattatttaaccctgg

SEQ ID NO: 60058 - DNA, 799 bp, Homo sapiens
tttgcaccagcaaactttccttgaaacttatagtcagcagcattcttctcatacttctccttcagcttggccatcttagggatgtaaggctgcttttcattgtcacttaggttattccacatctcacccagttttcttttttttgccatgtcaccaaaagagttgccrgggtttgtggattttatcttggggctgaattcttaacagaacaggaagaatgcagtcgatggccttttgggggcattagggtccttcttcttgtctcacttagctggtccataatccttcatttcccaatcatagcatactttatccgcctttgccacttcaccaaatttaggcttctctttcccagactctgtcttctacctctcagagcacttcttggaaaattctgtaaaattgacagggagacctctgggtttttcttcttatgttcttctctgcacatctgcgccaaagaaggcataagcagacatgttgccctttttgctcggggttatcgttagccatcctgactatagtgttcactagtctaagcagtgcagggcatgacacgcagctcggcgctccccagccgcctcacactagctgcctccacgagagccacctattccctattcctttctttcttttgttttcttttgttttctatttttatttttattttttttatttagacaaagcctcactctgtcacccagggtggagtgcagtggtgtgatcttagctcactgcaacctctgcctcccgggttcaagcgattctcctgcctcagtctcctgagtagctgagacta

SEQ ID NO: 60059 - DNA, 999 bp, Homo sapiens
attggtggagaatattttattcttctttttttttctgagaagaattgaaccgataagccacatttgatgaatgttatgaataattcagctgggtatgtttgagcatcaragacatataattttttaaaaagccagaactttatcaatatatcaatatacagtggtgatgacataacaaagttattttaagggtacacaggaatagggacttaggtttggtacaacatccaaacatcatgaaaacaagagcatatttcatgaagaatccagggcagccttgagatcttctccttgtttctctagtgctaggggagagaaattcttcaaagtaaaccagaagtacaatatgcacagaggccacaagtagtctgggtgttatattttgctgcaacctgaggaggaacaggtagtcatattttcatgcccatatccaccattggagtagctcaattacctctgtatatctgctaatgtctgccttgtatcaaatgtcttctagtgacattctttttcccctcttgacttccacttggcccataattttctcttccctgtgattttgactcaccaggagcccagaggccatcagttacctcataggatcctttcagcttctacttgcactccagcaactttcattcacagttcatattcccaggagagatgagctgattgatccaccccatcttttcatatcaatccgtggcacaatttctgactggcctttgggtcagatgccactttcagtccaatcgtttgttaatgggaaagtcacatggttcataacagggaatttaggtgaggaactttcattcacaagaattgggtcttgatatattatgagaccactctcagtgactatggaaatctaagcaagtcattaactagctttaagcactctgtgcctgtctcaccagatttttgtaatcatgatatgaaataatttatgtgagagccctttgtaacttctaaagtaaactatcatgatatgaatatgca

SEQ ID NO: 60060 - DNA, 776 bp, Homo sapiens
ctcaatgggtcaaaatcaagctgttagtagggttgcattctttctagaagctcttggggagaataggtgaccttgccttttccagcttctagagactgcccctgtgggatcatggcccctttaattttaagccaggagtgtagtatcatagaaactcactgactcttctgcttgcctcttctacctattaacatccttataattgcattgagtctacctgaataatcaacggtaatcatcttctctaaatgtcatcagattagcaatcttcattccatctgcagcatcatttccctttcgccaaataacctaacatagtcacagtttctggggaagtcgatacaggagatgttattttgtgtacaatccttgataaataatttaaaattttaatacatactttatttatgcctacaaattaaatattgacatataccatataaatgtattttagctcttataatttacaaattagatgaattaatcatacaagagatctatatcgttgtaaacttgactgcttttcataatctatattatagatgaaattcatgatttagttatccaggtttttttttttttcaggtccctcaaaacacctaatatagcatgtattagacacttcttgaagaaaggtactctgatattggacaatagtgatgtctggccttgctgagtgatgcctggcttggctaatttggttgkatagcagactattccctccaaaatttagtattctaaatacaactccaaaattttaacccaaagataattat

SEQ ID NO: 60061 - DNA, 2389 bp, Homo sapiens
gcatgtttttttatttaattatgaaatcaaaaaaatacaaatcttgagccattttaatatgttacttgggtaaaaaattcaacttaatctttccaaacatctaatggaatcccaggcatagtgatttattaaaataccaagttaaatatttaagagaaaattaaatcactaataatgaaatgagttgattttctaagaaaaacaagtatgtaattaaggagtcagtaggagacaccctcaaaagcattacaacatttaaaagcaatcaacattacaactcttacgctgtgctttaaactccccataacctaaacacatacattcattaattatttacttgcatgatccacaatgaaggatgaattagaaaaaccagagtcattattttttaaatgacagtatttggtactgcagcaagaaaataagtagccagtggaatgaaagactccatctggctttatctcggcaatgctttgaagtacatgcaataaatgactttgcattgtttgatcttcttaatcctttacagccatctctttgagatgtcataatgcacaagttcattcagacaaaatcacattatgaaatgcaaatcacctcatatgacttatatggaaaatgtgcttgtacttacttgtaccatctcaagctctaagagcccaaacggaaatgtacatagtggtgaatttcctttctgaagttaaaatagtctgaaatcggggtgaaaaaatgatacaaataacaaaaatgtgtattctaaatgaaaattggaattttcatcgaaatagtagcagtaacaattaggagacaggagatggaatgtagatgctaagaagatatccacargaaagcacaagactctaaacgctcttgctactaaaagagagattcaaggtttaccaactgcaatattctgctaccaagcacagcttgtacgtggccactggtaccgtctaaaatgaggatacatattaagaaatcatcaaaacgaactgcatggcagaaacttttctgatatcaagagatcaatttaactacagttatttacaggtgccaatttcctctggagtaaactgttacagtgggcctcatgcaccagttagataatacaagccacactttactgcacagaatcctggactatgcattttggctttgcagaattgagagcagaaatgtaaaaataggatagtgatattacttttgtctatgggaattgctgagtcaaataacaaaaatcatctatttgggaaaaacctaacttcatgattacactcaggcacaccgactattaatatgaatgaggtaacaaccataaatacaatcataaccaaagaacaacagtaattcaagtttcctcagttcataaatgttcttagaatgttttcttagtatgttaggtgctgttcccaagcctcagtataactccatgatcgccgttgatgcaaaggcaaacaccacactctcctcagttcaacgtctgccctaccagtctttctggcctctgactcttccctatactactatatatacatttgatatctacactgacatagctgggcgctgtacttgttgatgagaatatctcttccctcttagactaggcatgaccaaaaaagttaatctgggtccaaagattaatgagaatgaccactcagtttttattcaagatcaattttatttactgtgcaaacacaagttacattccagacaaacagatagaagtgaaaggacttatgctctgatgcctccttggctcttcaggatgcaaaacaagtcctgccagcaagtccctgcagcccaggcatagcaaaacattcggggaggaattgtgctgtacaaatgattttaccaaccttatcacattaagcagcattcaagggttttctgaccacaacttaggcaaatttcatgttatgctatagtaatgaacttacttgttctatttctaaacaaaacattgggttcacattggcctggacaaagctttccactccagtactatttacttgtccacttattctcaaaaatacaagatgaatgatgtgcaataccatggctgtggcacatgacttttctagacctggatcatttgtgtcccaatatttgactgattttggggtgggatgaaagcatgccttcagtttgtacttctatcatgcccattgctaccatacacttaatgacataatcatgttccaatgtgtcctcagaattactattcctagctggatatactaaggctttatatctaggtcagttcattgagtctgtgtcccctctactccctccatcgtccctccacagtatgaagcatcctcataggaagccttgtaagtagatctaaagatagaccccgcttggcctttcaccctcaaagatactcttc

SEQ ID NO: 60062 - DNA, 2389 bp, Homo sapiens
gcatgtttttttatttaattatgaaatcaaaaaaatacaaatcttgagccattttaatatgttacttgggtaaaaaattcaacttaatctttccaaacatctaatggaatcccaggcatagtgatttattaaaataccaagttaaatatttaagagaaaattaaatcactaataatgaaatgagttgattttctaagaaaaacaagtatgtaattaaggagtcagtaggagacaccctcaaaagcattacaacatttaaaagcaatcaacattacaactcttacgctgtgctttaaactccccataacctaaacacatacattcattaattatttacttgcatgatccacaatgaaggatgaattagaaaaaccagagtcattattttttaaatgacagtatttggtactgcagcaagaaaataagtagccagtggaatgaaagactccatctggctttatctcggcaatgctttgaagtacatgcaataaatgactttgcattgtttgatcttcttaatcctttacagccatctctttgagatgtcataatgcacaagttcattcagacaaaatcacattatgaaatgcaaatcacctcatatgacttatatggaaaatgtgcttgtacttacttgtaccatctcaagctctaagagcccaaacggaaatgtacatagtggtgaatttcctttctgaagttaaaatagtctgaaatcggggtgaaaaaatgatacaaataacaaaaatgtgtattctaaatgaaaattggaattttcatcgaaatagtagcagtaacaattaggagacaggagatggaatgtagatgctaagaagatatccacaagaaagcacaagactctaaacgctcttgctactaaaasagagattcaaggtttaccaactgcaatattctgctaccaagcacagcttgtacgtggccactggtaccgtctaaaatgaggatacatattaagaaatcatcaaaacgaactgcatggcagaaacttttctgatatcaagagatcaatttaactacagttatttacaggtgccaatttcctctggagtaaactgttacagtgggcctcatgcaccagttagataatacaagccacactttactgcacagaatcctggactatgcattttggctttgcagaattgagagcagaaatgtaaaaataggatagtgatattacttttgtctatgggaattgctgagtcaaataacaaaaatcatctatttgggaaaaacctaacttcatgattacactcaggcacaccgactattaatatgaatgaggtaacaaccataaatacaatcataaccaaagaacaacagtaattcaagtttcctcagttcataaatgttcttagaatgttttcttagtatgttaggtgctgttcccaagcctcagtataactccatgatcgccgttgatgcaaaggcaaacaccacactctcctcagttcaacgtctgccctaccagtctttctggcctctgactcttccctatactactatatatacatttgatatctacactgacatagctgggcgctgtacttgttgatgagaatatctcttccctcttagactaggcatgaccaaaaaagttaatctgggtccaaagattaatgagaatgaccactcagtttttattcaagatcaattttatttactgtgcaaacacaagttacattccagacaaacagatagaagtgaaaggacttatgctctgatgcctccttggctcttcaggatgcaaaacaagtcctgccagcaagtccctgcagcccaggcatagcaaaacattcggggaggaattgtgctgtacaaatgattttaccaaccttatcacattaagcagcattcaagggttttctgaccacaacttaggcaaatttcatgttatgctatagtaatgaacttacttgttctatttctaaacaaaacattgggttcacattggcctggacaaagctttccactccagtactatttacttgtccacttattctcaaaaatacaagatgaatgatgtgcaataccatggctgtggcacatgacttttctagacctggatcatttgtgtcccaatatttgactgattttggggtgggatgaaagcatgccttcagtttgtacttctatcatgcccattgctaccatacacttaatgacataatcatgttccaatgtgtcctcagaattactattcctagctggatatactaaggctttatatctaggtcagttcattgagtctgtgtcccctctactccctccatcgtccctccacagtatgaagcatcctcataggaagccttgtaagtagatctaaagatagaccccgcttggcctttcaccctcaaagatactcttc

SEQ ID NO: 60063 - DNA, 2389 bp, Homo sapiens
gcatgtttttttatttaattatgaaatcaaaaaaatacaaatcttgagccattttaatatgttacttgggtaaaaaattcaacttaatctttccaaacatctaatggaatcccaggcatagtgatttattaaaataccaagttaaatatttaagagaaaattaaatcactaataatgaaatgagttgattttctaagaaaaacaagtatgtaattaaggagtcagtaggagacaccctcaaaagcattacaacatttaaaagcaatcaacattacaactcttacgctgtgctttaaactccccataacctaaacacatacattcattaattatttacttgcatgatccacaatgaaggatgaattagaaaaaccagagtcattattttttaaatgacagtatttggtactgcagcaagaaaataagtagccagtggaatgaaagactccatctggctttatctcggcaatgctttgaagtacatgcaataaatgactttgcattgtttgatcttcttaatcctttacagccatctctttgagatgtcataatgcacaagttcattcagacaaaatcacattatgaaatgcaaatcacctcatatgacttatatggaaaatgtgcttgtacttacttgtaccatctcaagctctaagagcccaaacggaaatgtacatagtggtgaatttcctttctgaagttaaaatagtctgaaatcggggtgaaaaaatgatacaaataacaaaaatgtgtattctaaatgaaaattggaattttcatcgaaatagtagcagtaacaattaggagacaggagatggaatgtagatgctaagaagatatccacaagaaagcacaagactctaaacgctcttgctactaaaagagagattcaaggtttaccaactgcaatattctgctaccaagcacagcttgtacgtggccactggtacygtctaaaatgaggatacatattaagaaatcatcaaaacgaactgcatggcagaaacttttctgatatcaagagatcaatttaactacagttatttacaggtgccaatttcctctggagtaaactgttacagtgggcctcatgcaccagttagataatacaagccacactttactgcacagaatcctggactatgcattttggctttgcagaattgagagcagaaatgtaaaaataggatagtgatattacttttgtctatgggaattgctgagtcaaataacaaaaatcatctatttgggaaaaacctaacttcatgattacactcaggcacaccgactattaatatgaatgaggtaacaaccataaatacaatcataaccaaagaacaacagtaattcaagtttcctcagttcataaatgttcttagaatgttttcttagtatgttaggtgctgttcccaagcctcagtataactccatgatcgccgttgatgcaaaggcaaacaccacactctcctcagttcaacgtctgccctaccagtctttctggcctctgactcttccctatactactatatatacatttgatatctacactgacatagctgggcgctgtacttgttgatgagaatatctcttccctcttagactaggcatgaccaaaaaagttaatctgggtccaaagattaatgagaatgaccactcagtttttattcaagatcaattttatttactgtgcaaacacaagttacattccagacaaacagatagaagtgaaaggacttatgctctgatgcctccttggctcttcaggatgcaaaacaagtcctgccagcaagtccctgcagcccaggcatagcaaaacattcggggaggaattgtgctgtacaaatgattttaccaaccttatcacattaagcagcattcaagggttttctgaccacaacttaggcaaatttcatgttatgctatagtaatgaacttacttgttctatttctaaacaaaacattgggttcacattggcctggacaaagctttccactccagtactatttacttgtccacttattctcaaaaatacaagatgaatgatgtgcaataccatggctgtggcacatgacttttctagacctggatcatttgtgtcccaatatttgactgattttggggtgggatgaaagcatgccttcagtttgtacttctatcatgcccattgctaccatacacttaatgacataatcatgttccaatgtgtcctcagaattactattcctagctggatatactaaggctttatatctaggtcagttcattgagtctgtgtcccctctactccctccatcgtccctccacagtatgaagcatcctcataggaagccttgtaagtagatctaaagatagaccccgcttggcctttcaccctcaaagatactcttc

SEQ ID NO: 60064 - DNA, 855 bp, Homo sapiens
tatgtttgcatttctctttggtagatagaacatttaccactttgtagctattcacaaagttgctaccacttttgactatraagaataatacatatataagcatgtatgtataattttttgtgtggatagatgtttgcatttctctttggtatatgcctaagggtcaaattgttgggtcccactgggcattctattccaagcaagattatctataatgagatagaaacatcttttaaattatcaggttactttgctttataaaaatatattatgtgaccagaccacatactgaatacatgaactttgcatgtcttaaatattttatgatcgtactatcttgtgcaatttttctaagggcctattcttgagtctgtgtttttaaaagtgcaaagctaagactttgtaatcaatagcattttttttacagaaaagtaaaatatatgcacacatataaaaaagaattgaatccatagagtactcaacaattaattagcatggcagcacaagttaatttgcttgtggatctccaaagagtttaaattaatttatgtaactgaataagtgttgtggttgtgtttctgttttgttttgttaaatatgtttcaaacaatgaaaatcaaaccataatatgtgaagtcctaacaatcagtggaacatggtttggaaaccaacaattcactataagcaggccagtttcaccctgtacgctgacctccctgtgtaattaatggaaggaaagcagtccacactgtgcaagatacagctccatttacacttgtaacaggcaactttcctagattaatcttgtccaaactaatgcaacagcatgtacaatttcttacctttctttgcatt

SEQ ID NO: 60065 - DNA, 855 bp, Homo sapiens
tatgtttgcatttctctttggtagatagaacatttaccactttgtagctattcacaaagttgctaccacttttgactatgaagaataatacatatataagcatgtatgtataattttttgtgtggatagatgtttgcatttctctttggtatatgcctaagggtcaaattgttgggtcccactgggcattctattccaagcaagattatctataatgagatagaaacatcttttaaattatcaggttactttgctttataaaaatatattatgtgaccagaccacatactgaatacatgaactttgcatgtcttaaatattttatgatcgtactatcttgtgcaatttttctaagggcctattcttgagtctgtgtttttaaaagtgcaaagctaagactttgtaatcaatagyattttttttacagaaaagtaaaatatatgcacacatataaaaaagaattgaatccatagagtactcaacaattaattagcatggcagcacaagttaatttgcttgtggatctccaaagagtttaaattaatttatgtaactgaataagtgttgtggttgtgtttctgttttgttttgttaaatatgtttcaaacaatgaaaatcaaaccataatatgtgaagtcctaacaatcagtggaacatggtttggaaaccaacaattcactataagcaggccagtttcaccctgtacgctgacctccctgtgtaattaatggaaggaaagcagtccacactgtgcaagatacagctccatttacacttgtaacaggcaactttcctagattaatcttgtccaaactaatgcaacagcatgtacaatttcttacctttctttgcatt

SEQ ID NO: 60066 - DNA, 855 bp, Homo sapiens
tatgtttgcatttctctttggtagatagaacatttaccactttgtagctattcacaaagttgctaccacttttgactatgaagaataatacatatataagcatgtatgtataattttttgtgtggatagatgtttgcatttctctttggtatatgcctaagggtcaaattgttgggtcccactgggcattctattccaagcaagattatctataatgagatagaaacatcttttaaattatcaggttactttgctttataaaaatatattatgtgaccagaccacatactgaatacatgaactttgcatgtcttaaatattttatgatcgtactatcttgtgcaatttttctaagggcctattcttgagtctgtgtttttaaaagtgcaaagctaagactttgtaatcaatagcattttttttacagaaaagtaaaatatatgcacacatataaaaaagaattgaatccatagagtactcaacaattaattagcatggcagcacaagttaatttgcttgtggatctccaaagagtttaaattaatttatgtaactgaataagtgttgtggttgtgtttctgtyttgttttgttaaatatgtttcaaacaatgaaaatcaaaccataatatgtgaagtcctaacaatcagtggaacatggtttggaaaccaacaattcactataagcaggccagtttcaccctgtacgctgacctccctgtgtaattaatggaaggaaagcagtccacactgtgcaagatacagctccatttacacttgtaacaggcaactttcctagattaatcttgtccaaactaatgcaacagcatgtacaatttcttacctttctttgcatt

SEQ ID NO: 60067 - DNA, 855 bp, Homo sapiens
tatgtttgcatttctctttggtagatagaacatttaccactttgtagctattcacaaagttgctaccacttttgactatgaagaataatacatatataagcatgtatgtataattttttgtgtggatagatgtttgcatttctctttggtatatgcctaagggtcaaattgttgggtcccactgggcattctattccaagcaagattatctataatgagatagaaacatcttttaaattatcaggttactttgctttataaaaatatattatgtgaccagaccacatactgaatacatgaactttgcatgtcttaaatattttatgatcgtactatcttgtgcaatttttctaagggcctattcttgagtctgtgtttttaaaagtgcaaagctaagactttgtaatcaatagcattttttttacagaaaagtaaaatatatgcacacatataaaaaagaattgaatccatagagtactcaacaattaattagcatggcagcacaagttaatttgcttgtggatctccaaagagtttaaattaatttatgtaactgaataagtgttgtggttgtgtttctgttttgttttgttaaatatgtttcaaacaatgaaaatcaaaccataatatgtgaagtcctaacaatcagtggaacatggtttggaaaccaacaattcactataagcaggccagtttcaccctgtacgctgacctccctgtgtaattaatggaaggaaagcagtccacactgtgcaagatacagctccatttacacttgtaacaggcaactttsctagattaatcttgtccaaactaatgcaacagcatgtacaatttcttacctttctttgcatt

SEQ ID NO: 60068 - DNA, 632 bp, Homo sapiens
atgttctcccttcactttcctgagaaatgcaagtgtaatatggttgggcctctgtatttgtggattctgcatttatatattcaaccaaccgaagactgaatatatttggaaaaaatatttagaaaataaaaacaaaaccccacaataaacaataaagaataatagacattaaaagtagagtataacagcgatttacatagtatttacattgtatttggtattataagtaatctagagatgatttaaagtataggagaggatatgtgtaggttatttgcaaatactatgccattttacataaaggattgaacatctgtgaattttgatattctggaggatcctagaaccaatccctgtcagatactaaggagtgagtgtattcgatttgttattaaacatgcattttaggtttccttaacattcttcctggattttgtttttttgtttttgtttggttggttgttctctgttcttttttctttctttaatgtattacttttaaagtaaataaaagttttgatttacctcatagtataagttacaaaatcactgtascaagaccccacggactattatctctacactcaaagtcagaatgacttagccttggtttcgttcatggacccactttg

SEQ ID NO: 60069 - DNA, 687 bp, Homo sapiens
gcctggccttggaattggctctgggaggggtggggtggtttcagccccccatccccagtcacactttggatagggaggagtgagaaggatgagtctgagctatacatggggacccagaaaccgacatgaaataatcaaaagtggagccactgttgctaagatcagtgcccaartctgcacctggcagcctggagagaagaaaacttggagaagatgatctaagtcaataactgaggaaggattggagaggaaggaagaaagggaatgtccatggaatacctatgttctcagcactgtgcttgacgctgtccatctgctatgtcatgtcacctttctttacaacaaagtgaagaactcgacatgatcatcactggccttgaggactatgaaatgggtctcgaagtggaggaacacttgagatcacaggaccagtaagtagcagaggaaggatttaaacccagctctctctgattccaaagctgcactttcctctgtgccaggctgtcccctgcaggtggcataaagtaatggcaggactgggttccattgtcctttttgctctgagaggagctagctgtcctgtctgcagtgaggcaaggccaaatgtttagaaggagagactggttttgtgtctttccattacctcttggcttgtattctccttccatatctgatcagtcttcaatt

SEQ ID NO: 60070 - DNA, 1429 bp, Homo sapiens
gtcagagccatgggactgagaaacatctcttgagattctggtgagctccctagcatctcgtcctcattcatttcgtcccctagcagtggcaaggtagactttttaggcctggagggcatgtgcttagtgacgggtgacaatggttgatgacagttgtgccgcctcgtgcctggttcactgctccacatccttctacttaatccatctgagatagaaataacacttctcaaactctcaaaccactcccatccagtcggaggactttcaggaacacttgggtgggtccagcatctgagcccgggtgggccatcagcccaggctgccagagatgccagtgggctaaagtggggcagggcagacactggccagctgtccacccaacccatttccagttcatcctgagcacacggctagactgcattcttgcagctgagtgtggccaagcaacctaattctgatcaatgaaaagtgatagacgtgtgctcttctcaggcctgatggataaaacccttccacactccttctccttctggttaactccttctggttaacggtgctctccagcatgactttggaggccaatttaaagttggcatgcctgccatcagccaaaatctctgaaccactgcatggagaaggatgccctcacgctcaccatgtctgaccccaaactagaacagccctgcagtgttaaatgaggcatgacataaacttgcattatgtttgggtctgtttgttacaacagcaatactcactaatatagaagagcagggatcccctgcctgaggaggaccaatgcaggaaaggccaaagagcagttagaaatcagcatcccgagagaatgcaagatgttgtgaccaaggtgtctaaatatcaaacgcaagtctgttgggagtataaatggagttgagggttagcgtctaggcaaggcaaggtcagaaatacaaggagatgggttacaggtggctgttgaaagcagcgctgttgtgcccagcttgttctcctgggttaagcagatttgaaggttgaggtcaatactcttgttgttgggcctgtcccacatctcagcttttaccttctgtactcaatctgttgcctgaaaccctagggcctggtaactaggaccccgtgaccctcccctgggccctgggacaagattgatagctgatattttgtctgatggtccaacactgttttwcagatgaggaaaagcagacccagaataaatgaaggggctaattcataaagcccaaattgatctttccacctggtcttggccagggcacactgtttccagcaaaatcctgcctttttaatgccctggccagagcctccccaaaaggaccgcttctctcctccctcccattcttctggcaagctaggtttccaagcctggccattaagaatttaaaagagctggtttcttctg

SEQ ID NO: 60071 - DNA, 607 bp, Homo sapiens
tcatgctccccaaggacccagagaggctggggtgggggtaggggtgggggcaggctggccgcagcatcggctgagcctggagcctcccagtacagaggcagagccctttgaggaagctggtggggcaggggagcggggggcatctggaaaagccagaggggagcgcgagtggggacgcccggygtgacgccaaggccagaggcattcaggtctcagctgcagaagggcaggactttaaaagggggcagggccggacttttaaaagagggcggggcctgagttttaaagggggtggggcctgaccttaaaagggggcggggccggacgggagggagtttatttccttttccagggagtactgaggcccggcccatcaatgcccacgctacacgaggcatactagacagtcgctgcctaagccaaagtcagatcaccgatattcttccaggaaaaggctcctcttgccccctttcccacaagaaggagaaagcctggaggcccgggttggcacaccaccctcccaggagccaggggcaggagccagccgtgcggaggcctgcgtccaggggcacggtaatctcagggactgccgctgccacagtcaccc

SEQ ID NO: 60072 - DNA, 607 bp, Homo sapiens
tcatgctccccaaggacccagagaggctggggtgggggtaggggtgggggcaggctggccgcagcatcggctgagcctggagcctcccagtacagaggcagagccctttgaggaagctggtggggcaggggagcggggggcatctggaaaagccagaggggagcgcgagtggggacgcccggcgtgacgccaaggccagaggcattcaggtctcagctgcagaagggcaggactttaaaagggggcagggccggacttttaaaagagggcggggcctgagttttmaagggggtggggcctgaccttaaaagggggcggggccggacgggagggagtttatttccttttccagggagtactgaggcccggcccatcaatgcccacgctacacgaggcatactagacagtcgctgcctaagccaaagtcagatcaccgatattcttccaggaaaaggctcctcttgccccctttcccacaagaaggagaaagcctggaggcccgggttggcacaccaccctcccaggagccaggggcaggagccagccgtgcggaggcctgcgtccaggggcacggtaatctcagggactgccgctgccacagtcaccc

SEQ ID NO: 60073 - DNA, 1279 bp, Homo sapiens
gtcaattataaaagagaattgggaacattgggaaatcccctcagtttctcagcttcttagaggtagaagtatgagatgagaaaaggcaatattcgatctaaaattaatgcagccacctttagtcctctataaaatgagagtagatatggtcttagtkttatccatcaccaacattcttggattctaaaatttggaacttggtgtaaatgagaaattacaaatcgagttttagtaaaggagagaagaaaggccaccataaaatgagagctttgggcatgtgcagacctgggacgtaaaaagtggcactgagtgaggatgctgaaggtggcagagactacatttgacacattgctgaatccaagcatctctgaggattgaatcaaggccatgtgattatatgaacaaagatggaaataatgaaccatggtaaagaggatgctaacagtaataaaggtggctgggcagttcccaggtgagagcttgagtgtttcctaggaagtttggaagaccagtcttggaagagcacctgatcaatacactgtgaaaatgaagatttttcactcagatcagtattcagctccccagaatagctacaggaattgttaagccagaaagtgccaacttctagttgtgctactgtaccctctagggcagtggtagggagctttttaaaattagcaatgtccaggctccaaaccagaccaattaggtgagaagaagctgggcctgggcacaggcatcttgcaagcctcccaggtgactataatgggaagccatggctgagaaccactgttctgaggaaatgtagtgcagagtcctccaatcagtggccaaactgtgccccaaagaggagaccacacaggcctcgccctgagacatgtcatgcatgaaactctgactatggctccctttgtcagcagataaattcatctgctccggctgggcgcagtggctcacgtctgtaatcccagcactttgggaggccgagggggggggggggcagatcacctgaggtcaggagttcgagaccagcctggccaatatgaggaaacctcatctctgctaaaaatacaaaaataagctgagtgtggtgacgcgtgcctgtaatcccagctactcggaaggctgaggcaggagaattgctccaacctggagggcagaggttgcggtgagccgagattgcaccactgcattccagactaggcgacagatgagactccgtctcaaaaaaaaaatttaatctgttccaagtatagtgcagtgactgatggaacaatcc

SEQ ID NO: 60074 - DNA, 537 bp, Homo sapiens
ttcctcgtcctcactgagcctcaatttcctgatctctaaagtggaatgctgttaatcaccctgcccacattactagtgaagatgctttataaaatggcaaaatgtgttaagaagagtggtgagcactgtgcctctggcccagccatcaggcagacgatctgcttatataggaagtcgcatcatcatctacttgttktcggccccaaatcctccccatgcttcaatgccaaagtcacaatctccccttcctgtcagtcaggcagtgtctcctgtggtatagcagagatattcatgcacacatctgcctcctttatcaggctgccagctcccggggagaggagactggaggatgcagagcataggttcccatcagacatcactgggttgaaatccaaggtctaactcacactagctgtgtgatcttaggcaaggaatgcacttcccatctatgtttctacttcttcatctgtaaaatgaggataaagtagaacctacctcagagatgctcagaggattaatcatgtatgtaaaatgctt

SEQ ID NO: 60075 - DNA, 1431 bp, Homo sapiens
gcgttgaaacatattccaacatattgcaacagagaatgtctcaatctaaaggtcatactttactttgcaaagacccagtgtgaaggggttgtgtgtgtgtgtgcgggggtggggggcggtggctgaaaggggaatgttatggaggtgagggtcaggagataaaacattcatagcatttaaaaacaaatttcacaacctcccctggctaattgcattctagtctcagtccagacagggcattacatgtgctgccagtctttgttccaagacttgctggaattccttgggatagggtaacagccccagggggtggggtgagggggaggaaggggagctgagcctatcctgcagaagctaggagggtgtgaggtgatggggtgaggccaggatggagttcagaggcttcaactttcctgacttcttgttttctttgcttttagagtccttgggggaggaataaaaaaggacttagagatgtgaatcttgcttaaaataatcgttggcgattgcttgrgtgcagaaaaagagtaaaaagattgaagaaacttggatcaaagctggtttcacaagtacaaggaaacagtggctgccaccatggcgtggtttaaaaaaatgcctggagaagggacattctggatccactgctatgggttcactactgaggatccttaacagagtgttctactttgactcagtagatacttactgaacagctattatgtttctagtaatatatggggcatggaaagttcaatacctatctttgagaagcttactccaatttaatagatgggcatataccccacaagccactaaagaaagggtttttgtgctttcaaattataacgtctctttcacattttctcttttgccttccttccctatggccattaaacttgaaccctccagtgcatgcgtgttacatgcagtactaagagtagttcaacagtcatctctgagaagggtgatgaaaacccaaagaaaaacctgcaacttctcaatgtctgttagtgcaaatgccccagaaaacaggatgcatttttggtcttgggaggtggaaggcagggctgagactacatactggtgtttggaatctaccttggcaaacaagtccactgagataggaaccttaattcaatcgggtggcacacaggaagtgctaggatgctgtgggacatccctggtctccccagaacacattgactcaatgtcattaggctgaatcctattaaactgctaatgtttaactgattttgaactacaaaaacggcaattttagaggcttcaacctaatataaagcagaatttgaaagagccataatgaaagcaaacacaatcaaaagaaggagagaaaaaaaatatggtcagatttaggaatttatacttcttaaacctccatttctctttcgtcttccctttgtccttcccaga

SEQ ID NO: 60076 - DNA, 737 bp, Homo sapiens
gaaaccaggaggcagaggtttcagtgagccaagattctgccactgcactccagcctgggtgacagagcaagactccatctcaaaaaaaaaaaaaagtttataatcttaccttttcagaggaacatcattaggatgagagaaaggaagtttttttgttttgttttttgtttttgtttttttggcattaatgagaaactaagtagtccctcccaaacaaggaatccagcatttattattgtcaccattttggggttgaaaaatccagaagtcagagaaatcaagagactttttcaatgtaaaaaatcaataactggaaagatactattcaaaccccaggtattttgactggagtccagtctttttattttccattgtgtcatattgctctaaattttatttgcaattcrgaaacaagtaggggcaaaccctccctggttttaaaggttagaatcagcaatacatccaaggtcaaatgagcagtcagtgcttgaagtaacagacaaatctgaaaagtcagcagaaaaaaaataagtaatcccgagtccagatatgcagctcaaagaatgtgcaaatagctaagacaacagggtcaaaacctaggcaagagtcagataaataggttcagaacaggcatcaggtttacctaatatcaaatggcacaacacagtgaacctgatttttcaggcagagctctcatccaggaaaactttcaattaccatgaattgggttgactaca

SEQ ID NO: 60077 - DNA, 3396 bp, Homo sapiens
agcccattgggtctttgtccttaggacactgaagaataggaaataacacctgggtgagctagaatcatactcttatttaggtgcagaatgctcattgctagttcatctgcaaggctcatggctgggataaatcatcagacagcagtcttaactagggaagaacagcccagcaggtaacacacacagccagtaagctgccagcttattgacagccagtgyggtggatttcatattctatagggatgtcagcttccagagagtttaaacagaagccctagtgaaggcaaactccaagacagtaattttgcctgtcaggaatgctatgccagacggatttagcagtggcttgacacgtccagactctaaaggacattttgaaaggactggaaaatcatccagtcttccttttccagccattgtcagccatccccacccatcagaaaccacggccttaaaatcaggaaggtcttagcagtagaataaagggtcacaggaagagaaatttccatgtggtagcggcagcctttactcacttcaagttagctatcttcattttgtaccagaattcccttacccctctaagtgctccttatggcaggcaaatccactctcacctaagctcacaagatattccaccgtaaatttgtatataatgcatagatttctagaaaccgcttttgtctaaaaggggctggaaacaaacaagaaaagtcttccaaatgaaaagaaagggataattgccctgcactaaaacttatattcaccctacaaatacagaagatatccttagtttcttttaccaccttaatcatatttgagagagagtgagagtatttaaagtgcttgactattaaaagcaattaataaaattgcagtgaacagccttgcttccctagagttattattgacttaaagcttttacttcactgtgattagcaaataagaataactgtataaacagcaatgaaatggatttttcttccctcataaagagaaattgtcaaattgtcatatagatggcaacttagtggagtgattgtgattgtcctagactgtttttttttgtttgttttttttttagagacagtcttgctctgtcacccaggctggagtgcagtggcacgatcttggctcactgcaacatctgtcccccaggttcaagcaattctcctgctcagcctcccgagtagctgggattacaggcacatgccgccatgcctggctaattttgtgtgtgtgtgtgtgtgtgtgtgtgtgtgtgtgtgtgtgtgtgtgtatgttttagtagagatggggtttcaccgtgttgcccaggctggtctcgaactacagagctcaggcaatccacctgcctcggcctcccaaagtgctgatattacaggagtgagccaccgtgcccggcattgtcctagactctttatgtaaagtatctgccttaatcaaatcaaccaagttctgcaaacatgatctatctacttgaatttggaggccattttctaatatagaaacttcaatataatgactgtagttgttataaggcattgccaatatatctataaaggaggtgtttttttttattttcctatgcaggtttttagtagatagaaacatagtcagaaaataggtagatgggcattggtagagatataggtattgctagatggagtgataacaatttctcatattttacatgccattagtatgtaggtcctatatttgaatctggaacaatcaagtgagactatttgtaacatcagccctgaacaccagcagcattctatcctcacctttgcaattacccactctggcctttcttataaggcataagcaatatcatatattctcattcaaatcttgccttctttagaatttaaaccctggaggataacaaccttttccccaagagggccagagggagatatggcaaaaatgtcatgtcacttcaggaattccatcaaatggcccaacttcagagcagaggtattctaatcttgatactgtctaagcaaccaagtcctaaaatgtccagtttgctgagaaccatctttgcatttacttactatgaatattttattcatgtatttatttttaatgattgacccactgttctgtacctgcatggagtcaatgttagtttgtaaattcctataggtcagagaatatgttattttaactctatcttatccccatctcatctttcaattttgtatttaaagaatgagtacttaataaataatgctgtcaatgggttcagtaaaataccttagtaagcttttggagcacactatattcttctaccttagttaactgccaatacattaaactctctttttatttatcttgaattgatcatttccccccatttcctataaaatacttagcaaaaggcttgctaatagcaaggggcccaatatatgttaatcattcttttgagaaggtatccagttcttggacttcagattctgtcatttctatattataaacctgaccatatcactcttggtcgtttgagcttgggcaagtcatttaatctgtctacagataatagtacatttttcatagcctttgctatgaattaatgcatgtaaaccacttagcatagttcttgccacataacacaaacttaaaaaaaatactaccattctaattacttttggcaggtcatttgacactagcattccctttggagactcatgcaaactttgccctttcttggcataacctggcctctttgctctctttctgcctacgtccacccactgttactctgctgcacatatttttcttcctcccctgactctttaaaggtgaatatgcttcaaagtttctgatctgagaatgttattacttttacaatacattctagacttagactatctcatttactctcaaaggtttgcacttttatctcatcacttcagtgtatggcattgcctcataattttcagagtaaaaaaagaggccataaggcaggaataccttcatcttgccactgtcaaatctctaaacccacctgtatctgtcctgtcctcgttgtttcacctcttttgcaacataggatgcatctttcctacaaaaacaaaggccgattccttcacctttaccccagattacccactttacccctgtacctcagcttcagcctggttcaggacttttgtcatacctgttttcctctcttttcctacttagtctctccctttctgaattcttcccctaggcattcaatatgcttaacagttcctatatgtaaaaccacaagcaacaataagaatgccttccattttgcccacatctttctgtttactgctctaattttttttctccgctttacaatcaagcttccaaaagcattgtccatgtgctgtcaatcaagcttccagaaagcattgtcca

SEQ ID NO: 60078 - DNA, 970 bp, Homo sapiens
ctgggattaggataggtggcagttagaaatactgcaatactgtaaaaagtgccattcttgcaaaattttcaacctaatttaaacctatccattcttgataccttatgagaaatatgtagtatcatggggcttacagcccaattttctgaccaaacaagttcagatattttctaaaaagcttctgataagcaacttcaaagttgtgcccaaacctctgactctagaggtccttccaaccacaataaactcttggaaatgtcttaatctttggttaaccagcctttgattatctctgtgtagatcggggtgtccaatcttttggcttccctgggccacagtggaagaagaagaattgtgttggaccacacataaaatacatgaacattaaccatagcagatgagctaaaaaaattgcaaaaatacctcataatgttttaagaaagtttatacatttgtgttgggctacattcaaagccrttctaggccgcatgcagccctcaggccgtgggttgaacaagcttggtgtaaatggttaatgccactcagcaggcttctgagctaccttcctccatgatgactgggtggtataagctcagagaattgctagttttatttttattactaatatagatttatgttttttactagtttaagcacaattaggggtaaatttgttataaaaatcacatagtaaattccaatggcaaatgtaaatgatgctcacagtttgcaacatttttcattatttgtaatactgcctctatttacacagaattcaattcaacaaacatttatttaacgcatactgtttatgtcaaatcctatgccaagagtggactctgtacatttcagcaccttatttatttagactagaaatgccaacttatttccccatggtcaaataaaaaagtacagaggcatttgttgttttggctgtgctgcttagttctggtctctataaatgggacag

SEQ ID NO: 60079 - DNA, 714 bp, Homo sapiens
ttatttaatcagaccccagctaaatacttggctttaagtcttttgtcaagataagcaataccactacagacacccttgtacatgccccttttgcacgtgggcaatgcacagttatatctggaggacaaactagaagcagagcggctggatcaaagggcrcctgtgttctatcacctgactgatagaacaaatccccctgcagggcggggcagaacctcctccctctactctagtcaccccgtgtcctcatcaaacgttgtgatctttgccagcctactgaatgaaaaatagctcttgttttattttgcatttctttgattttgatggaggctgggtattttttcatctgtttcaaagtcacctgtattcctttttctgtgaacggactgctttcaagcccttcggccatttctctatgaagtatggaacaaatatttattgatatccagttacatgccagataagtcagagatgatccctgcccaccctccataattggacttcattctcccttattaaccgttagccgttacctgccctccccaaagcgtgactctaatcaggtcccttgggagtttcacagactcgcttggccatctggagtcaacaaggcaaaggcattcgtgtgtgtgtgtgaacacgagagatgagaatatctcccttttgtattatcatccttcaatatctactataactaattacgaaagtaatgca

SEQ ID NO: 60080 - DNA, 714 bp, Homo sapiens
ttatttaatcagaccccagctaaatacttggctttaagtcttttgtcaagataagcaataccactacagacacccttgtacatgccccttttgcacgtgggcaatgcacagttatatctggaggacaaactagaagcagagcggctggatcaaagggcacctgtgttctatcacctgactgatagaacaaatccccctgcagggcggggcagaacctcctccctctactctagtcaccccgtgtcctcatcaaacgttgtgatctttgccagcctactgaatgaaaaatagctcttgttttattttgcatttctttgattttgatggaggctgggtattttttcatctgtttcaaagtcacctgtattcctttttctgtgarcggactgctttcaagcccttcggccatttctctatgaagtatggaacaaatatttattgatatccagttacatgccagataagtcagagatgatccctgcccaccctccataattggacttcattctcccttattaaccgttagccgttacctgccctccccaaagcgtgactctaatcaggtcccttgggagtttcacagactcgcttggccatctggagtcaacaaggcaaaggcattcgtgtgtgtgtgtgaacacgagagatgagaatatctcccttttgtattatcatccttcaatatctactataactaattacgaaagtaatgca

SEQ ID NO: 60081 - DNA, 714 bp, Homo sapiens
ttatttaatcagaccccagctaaatacttggctttaagtcttttgtcaagataagcaataccactacagacacccttgtacatgccccttttgcacgtgggcaatgcacagttatatctggaggacaaactagaagcagagcggctggatcaaagggcacctgtgttctatcacctgactgatagaacaaatccccctgcagggcggggcagaacctcctccctctactctagtcaccccgtgtcctcatcaaacgttgtgatctttgccagcctactgaatgaaaaatagctcttgttttattttgcatttctttgattttgatggaggctgggtattttttcatctgtttcaaagtcacctgtattcctttttctgtgaacggactgctttcaagcccttcggccatttctctatgaagtatggaacaaatatttattgatatccagttacatgccagataagtcagagatgatccctgcccaccctccataattggacttcattctcccttattaaccgttagccgttacctgccctccccaaascgtgactctaatcaggtcccttgggagtttcacagactcgcttggccatctggagtcaacaaggcaaaggcattcgtgtgtgtgtgtgaacacgagagatgagaatatctcccttttgtattatcatccttcaatatctactataactaattacgaaagtaatgca

SEQ ID NO: 60082 - DNA, 714 bp, Homo sapiens
ttatttaatcagaccccagctaaatacttggctttaagtcttttgtcaagataagcaataccactacagacacccttgtacatgccccttttgcacgtgggcaatgcacagttatatctggaggacaaactagaagcagagcggctggatcaaagggcacctgtgttctatcacctgactgatagaacaaatccccctgcagggcggggcagaacctcctccctctactctagtcaccccgtgtcctcatcaaacgttgtgatctttgccagcctactgaatgaaaaatagctcttgttttattttgcatttctttgattttgatggaggctgggtattttttcatctgtttcaaagtcacctgtattcctttttctgtgaacggactgctttcaagcccttcggccatttctctatgaagtatggaacaaatatttattgatatccagttacatgccagataagtcagagatgatccctgcccaccctccataattggacttcattctcccttattaaccgttagccgttacctgccctccccaaagcgtgactctaatcaggtcccttgggagtttcacagactcgcttggccatctggagtcaacaaggcaaaggcattygtgtgtgtgtgtgaacacgagagatgagaatatctcccttttgtattatcatccttcaatatctactataactaattacgaaagtaatgca

SEQ ID NO: 60083 - DNA, 997 bp, Homo sapiens
tgcatatctcatgtgagtttgttctccagggatgatcagagcaccatgcctattgtctgaagtggccggctgagttctagaacatagccatctttaatgcgagtctgaattagatgatctctaaagttccttactatcccagcttctagaatcccaaaaattcttcatgaaaaaaagcaaaaccataggccaggagtaagatgccatggaatctcttttgcccctctgagcctcagtttccctgtatctccaatggtagagttggaactaagagtatttgtggtctgacagtctgggattttgtgatctgcaggaggcaagaggtcctcggcagagctggtgcctgatcaaatcacgacatccatagagttttacttctgcccctgtccttcccctgctctttctgccagctggctccaggtgccagggctctcacctgcccaggttccttcagacagagcatgaaacagcatcaaccaacagcttagtttattcacactgtgatccatgagccttaatatgttttcccccttcagaaaaatatacctttggaaagatgaacctggagaggataatgcttgactctcctaggtctatcaataatggaggaactccaggccttgtaggagaaatgtacggcttcatctcatttcacactcaagggggagctctttattctgtgtatggtcaggatgtccttgctggggatgggagcagatcgggagggaggggcttgaggttggagcggacagrtgttgaaggatatccttccttgtgaagctcttttggatgagagagagagcagtgctggttgaggttcatgtctctctgtttcatggtctggctcccagggaccagccagtgtggaccaggacccggggcatcttgtcctacatttcctctcagcctgagccctccacaagagttctctggacaagccttgcttatgagtgcccctgagagcttcctttggtgtggccaatgtcccttctacaac

SEQ ID NO: 60084 - DNA, 1022 bp, Homo sapiens
tgtcaccttgagagattccccaggccctgtgcattctgttactcagccccttactttctgattatttttttcccactatattgtgagtctcttgagggcaaggaccaaagcttagttttctttagctctgacatctggggtcagagaataaatatttattgaatgaatggatgaataaaagaatggtttactccaaaaaatgattctgtcatttcttaaagggtttttggaattttttttaatccagtgataaaccccattggaagaacagccctttcatcctagttataaatgttgcctctgctagctttcaggaaaggtctgagaggggactgggtggccctctggagatatgctggctgttaacagctgctatgaacatatttgaatattgtagctgcaagtatggctgcactgttgcatacagcaactgaatattagttctggaaacaggtaaaattattatcaccctgtctgacaggtaagcaaactgagacccagacagactaagaagtttgcctctggacacacagctaacaagcagcagtgccaggtttgaatccaggcaggctggcttgagaatccaggccgtatttcctctcccaatgatcactacctttattaagtatttaacatacccgtgctgccaggcactgtcctaagcactttctttatatgcatgcartcctcacaacaattctatgaaatacatactctcattattcccactttaccaatgaagaaattgagccaacctgaggcttagttacttgcccagggtcatgcagctggcagggagaggggtccggattgaacccctggctgcagagtttgtgccccaaccctcactggcatgcggcaacgaggtcaggaccctcattcccagttccacagagcttatattgtgggattacaggacctggccccttgttcattcacccagccggtacctagaaagcacttgggccttgtaaggctctgactgtgacagatactatgagggacagaaaggtggatggatc

SEQ ID NO: 60085 - DNA, 1022 bp, Homo sapiens
tgtcaccttgagagattccccaggccctgtgcattctgttactcagccccttactttctgattatttttttcccactatattgtgagtctcttgagggcaaggaccaaagcttagttttctttagctctgacatctggggtcagagaataaatatttattgaatgaatggatgaataaaagaatggtttactccaaaaaatgattctgtcatttcttaaagggtttttggaattttttttaatccagtgataaaccccattggaagaacagccctttcatcctagttataaatgttgcctctgctagctttcaggaaaggtctgagaggggactgggtggccctctggagatatgctggctgttaacagctgctatgaacatatttgaatattgtagctgcaagtatggctgcactgttgcatacagcaactgaatattagttctggaaacaggtaaaattattatcaccctgtctgacaggtaagcaaactgagacccagacagactaagaagtttgcctctggacacacagctaacaagcagcagtgccaggtttgaatccaggcaggctggcttgagaatccaggccgtatttcctctcccaatgatcactacctttattaagtatttaacatacccgtgctgccaggcactgtcctaagcactttctttatatgcatgcaatcctcacaacaattctatgaaatacatactctcattattcccactttaccaatgaagaaattgagccaacctgaggcttagttacttgcccagggtcatgcagctggcagggagaggggtccggattgaacccctggctgcagagtttgtgccccaaccctcactggcatgcggcaaygaggtcaggaccctcattcccagttccacagagcttatattgtgggattacaggacctggccccttgttcattcacccagccggtacctagaaagcacttgggccttgtaaggctctgactgtgacagatactatgagggacagaaaggtggatggatc

SEQ ID NO: 60086 - DNA, 598 bp, Homo sapiens
tttacctcctttccctgaaattacattatatgtttatttgtttccttttaaaactatatgcctgctatcaaaataatggaagcttcatgggtggaaggayactatataacttgttcattatctcatttctcaagcctagaataatatttggcatgtaagtttctaaaacatttattgaataaaagaataaagaaccctgtttaattttcataaaatcattgttgagactacacctctacgtgttattacatgaataacagaatgttgaaatgaaagttttggccagggaaccaagacacagtggatagtacactggaaaggtggtatgcatttacaatggaggtggtcatccgtggttgttcataacctcttaacacaacaaaggcaaaaatggaccagagaagagttgcgaagatttttttttttttggacagagttttactatgagtcccacttttaagtgaagttgtgggtggtattacatcctgactctcaattttgtagagagtagcttcaagatgattattagatttttgagcaactgtcagtgggttgtgacttactatcttcaactccaaggggaaggagaattgcagaa

SEQ ID NO: 60087 - DNA, 874 bp, Homo sapiens
tgtttattttttggacatattaatcacagatattttggagtctttttctgctacttgtaatattttgagtttacctgtgtatcttttttctatttttgacttttctttctcttgattattggttacatgaccccataaaattaaatatctattacattttwaaataaatgatagatattgtgattaaaatgatcataaagactctggtgatactaccttccttgggaagatccacctttttctttattaagtaggtagaatgagggactgttcccctgattccagtcaggatgagtaattcaatcaggaagcagcttaaggatgaatttaagctttgataagacttagttgacttctgggtctctcctgctagggctcagcttttcatagtttacaaaagagaactggcatttccttagcccaggcactctaaacatttccacccttcttttagccttttcttaaacttgactctttagcattctgcccagagcagctccagttatttccaaatgtcttgtggagcagactggctattgagtaactatctaaaccactcctggtttttctttgttccagttttgccttgtgcttgagacacacccagacctttagcctccagcctgcagaaattggtagatttcttctgtgaaaagccaggagcaaattttcagctcaattctgcaagtttcaatctgcactggaattttaatccatcatcttctatttttatataactttcttatgtcttcaaaaatgtgacttttatgattattttgtttttctacctattttcagtgggaacattgggttgccatagagtactcagttatacctagaagtgaaatatttattttaaaaatatgtacatgca

SEQ ID NO: 60088 - DNA, 750 bp, Homo sapiens
atagagattatacaggtgaaacccttgcaacagagcctgatgcatggccaagacaccttatgtgttagatattatttttatcattgatttatatcagacatcacgctgaaaagctgcaagtggcagaaaaaaacccaagtcaaacaaaacaaataaagcaaaaagaaagaaaataaaaacagacattgaatttgctttaagggtagtttttttttaattttattgttattatacgttaagttttaggctacatgtgcacaaygtgcaggtttgttacatatgtaaacatatgccatgttggtgtgctgcacccattaactcgtcatttagcattaggtatatctcctaatgctatcccttccccctccccccaccccacaatagtcctcagtgtgtgatgttccctttcctgggtccatgtgttctcattgttcaattcccacttatgagtgagaatatgcggtgtttggttttttgtccttgtgatagtttgctaagaatgatggtttccagtttcatccatgtccctacaaaggacatgaactcatccttttttatggctgcatagtattccatggtgtatatgtgccacattttcttaatccagtctatcattgttggacatttgggttggttccaagtctttgctattgtgaatagtgccacaataaacatgcgtgtgcatgtgtctttatagcagcatgatttataatcctttgggtatatacccagtaataggatggctgggtc

SEQ ID NO: 60089 - DNA, 490 bp, Homo sapiens
aaaagtgttggcctttgtccttgttgtagtgctggttttggtgttgttatttctgttttacagatgcgtggaggctccactggatcattcatgagcatgtggcttgcaaatgacacagggtggttcaaacggctgatrctgtctgcagcaaagcaggggtacctgggcaacacgagacacagtggcatgtttttcttagaagtcctggctgctggttctgccatgtgaactagatttaaacatgggctagaaggcatcttttcaaaatcttttcttagttttccatagctgtatagggaaagaaataagaatattttgaacgacctacaaggctcctatgatctgtcccctgcccacctctcctgcctcagcttctaggatgttcttctcatactcagctgcaatcatatttgatttcagttccttgaacatgttaggagccttcttgctctagggtatttgtgcatgccagcccctctttctggagtaa

SEQ ID NO: 60090 - DNA, 1952 bp, Homo sapiens
gttaaaatatttcttacaatatcaccttagggtcaataaactgtggtaaattgcctaacatcacacatctgctaactggtagaacttgggtgcaaacataggattttacaacaaaaagctgggggattgttcccaagctaggacagcacctagcatagaatggaagtcctgtaaatatatactaagcatcagaatatgtgtcctatacatatacattttgtattgcatattatagcatatgatgtcccaaaccacacaccacatatatgcgtgtgtatgtataatttgctttccaggtcaatttctattttgggacttctctaaaataatcctgaagcaagaaatagttatttacatatttttgacaaaatamattctaggaataattttgttaatgaaaggtagagataaaagcaaattaagttgtggtagttgctgttcctggaaagattattttcagcaccgaggctgtgaaatgtaccagtcctcgcatcctggaggtgaccaagcctgatcaatgtcacccatgccaagggactccattgcctagattgttatgggctaatatttccgttctttaaaacgcgtacaggaataacttcaagcaaaataaaaatatcagtttgtaatggccaaattctctgaggtttataaaatgttgggactgatttgctgagttatagtaaaactaaagtagaccttgaaaggcactcaagttgacataaaacttgaacagtttaactagtaagagaaagactaacaaattaggttgaccagataatttatatttggaacaaatagcatttttaaaagaactgtttttgcgagaacccactgtgtgtgctggtaatgaggaaagtgccggccctgccttcaaatattctcaaagcccctgtgccaggcaggagccccaaagatgctgtgctaattccctggttgttaaatctgtgcccacgttactcgtcgtcactgatactcactttacctacattgtagagagctttagggattaccaaacactcccacactgagtcatcttggagcatcctagaaacttctaggtggatggcatttgatcttcctattatagatggaaaaaaggcacctgagagaggtcagcggctcctccaaagacccagaaacactggggaagcagttaattatttttcagccaaatttcagaaaatcaagataaagaaaatgcccattttggtgctttcaaaattaccaaagttatcaataactatactaattatatcccggaagcacacagagatgagaatgacggctgtacagtttgcaaactgcattcacatgcatgggtttattttacctttcacaccgcactcagaggtcagtagacagggatgcctctcccccttctcattttagcataatgggaactgaggcccagcggtgtaatcaacatattaggaggcgcaaggccaggagaccaactctcctttgcaggccaggtgtctttccccacctcctcacacacactcccactctcagatgcgagagcatgttaccatagcctcggtaatcctcaaatccggctttgtttgatagggatgagaataaggattcgggagatttgaccagctatctttcactttagtaccacttgagctaagagggagactttggggatgacagaaaatatgatctcaagtggaatttaaccagagcacatgaactgagagctccttaggagaggaggggactgtaaggaatgtttgtgggaagccgctctgcaccaggaccctttataaatgcctcatgccgcatcaccgggaagcagctgtggttacagcttaaatgcctgacccaaagttatcagccatgcagggctgagctactgctttcaagttgaagtgctggccgtttaccgctctttatttcatgtcaggctgttcccaaggagccacctctctctagctgcacttctg

SEQ ID NO: 60091 - DNA, 776 bp, Homo sapiens
caaaasgtggcaccttaaattcaaatggggaaaatctttctttgacaatttaatttgcacaaggtgcacttaccaccatggagaggaagacctattttgacatcttgtctgcattctcagaaagggtcggctgcctttcctttccattggagaattctaaacctcagaattctcactttccctcttggccagtgttcctcctcccactatattcaactgaggtgggctctgtctagtgggattctcccatgcaaacaggaattttctgtcctggggcccagtggtggattgcactctcctgctataaaatgacttagcagggagacacatgtcaccagtccacatgttggctctcactggagaatgatgcacaggacatcactacccttctgtttctatacccaccctatgaacctttgggcccactgatgcctaagtctctgcctgagccgtgatttctcagccttggcatgtcccagacatgagtagcatctctgccatttctttctccccagtagtgagttaaacctctatcctccctttaatcatttcagagaaaccagctagttgtagagctctggatgagcacacctggccttgacctgcacctgagcttgaacatttctcttcccggagggcacacagtagccaaccactctgcagacaaatagcagtacatgagccttcccctcatgtgtgcagaaaggccttatctctactagtccaatctttgcttctatcatgcttgtttaggaagagccatgcctgcccctgga

SEQ ID NO: 60092 - DNA, 776 bp, Homo sapiens
caaaaggtggcaccttaaattcaaatggggaaaatctttctttgacaatttaatttgcacaaggtgcacttaccaccatggagaggaagacctattttgacatcttgtctgcattctcagaaagggtcggctgcctttcctttccattggagaattmtaaacctcagaattctcactttccctcttggccagtgttcctcctcccactatattcaactgaggtgggctctgtctagtgggattctcccatgcaaacaggaattttctgtcctggggcccagtggtggattgcactctcctgctataaaatgacttagcagggagacacatgtcaccagtccacatgttggctctcactggagaatgatgcacaggacatcactacccttctgtttctatacccaccctatgaacctttgggcccactgatgcctaagtctctgcctgagccgtgatttctcagccttggcatgtcccagacatgagtagcatctctgccatttctttctccccagtagtgagttaaacctctatcctccctttaatcatttcagagaaaccagctagttgtagagctctggatgagcacacctggccttgacctgcacctgagcttgaacatttctcttcccggagggcacacagtagccaaccactctgcagacaaatagcagtacatgagccttcccctcatgtgtgcagaaaggccttatctctactagtccaatctttgcttctatcatgcttgtttaggaagagccatgcctgcccctgga

SEQ ID NO: 60093 - DNA, 776 bp, Homo sapiens
caaaaggtggcaccttaaattcaaatggggaaaatctttctttgacaatttaatttgcacaaggtgcacttaccaccatggagaggaagacctattttgacatcttgtctgcattctcagaaagggtcggctgcctttcctttccattggagaattctaaacctcagaattctcactttccctcttggccagtgttcctcctcccactatattcaacygaggtgggctctgtctagtgggattctcccatgcaaacaggaattttctgtcctggggcccagtggtggattgcactctcctgctataaaatgacttagcagggagacacatgtcaccagtccacatgttggctctcactggagaatgatgcacaggacatcactacccttctgtttctatacccaccctatgaacctttgggcccactgatgcctaagtctctgcctgagccgtgatttctcagccttggcatgtcccagacatgagtagcatctctgccatttctttctccccagtagtgagttaaacctctatcctccctttaatcatttcagagaaaccagctagttgtagagctctggatgagcacacctggccttgacctgcacctgagcttgaacatttctcttcccggagggcacacagtagccaaccactctgcagacaaatagcagtacatgagccttcccctcatgtgtgcagaaaggccttatctctactagtccaatctttgcttctatcatgcttgtttaggaagagccatgcctgcccctgga

SEQ ID NO: 60094 - DNA, 1601 bp, Homo sapiens
ctgagcagacatttcatttattagggactgagactgagcaggaagtgatgacctgaacagtgaagccagcctctgagggttagaatccacttctgtggcattccagcctccctgctttttcccagacacctccctgctttttcccagacacctcacctgtcttcacaactccagggttaatggttgctccatcgtgcctggtgtttgcccaacccaatctcctcctagaccacagacatgagtggaaagtcctactgtacaggaactcaattctgtctgagagctctgggctggtgacaggaggctcattctgctgtacactgggctgtgcactcttggttagggtttcaacaccagtgttttcacactatggtcatgacctgctggaggttcatgaaatcagctgagtacaactggcgtttcaaaacaacaaaacagaatattataaaatagaaaatatcagatttaaacacccacatttggaaggaatgttgttttgggcaacttttgtttagtttatctgtcacatagctagctagctgtaaatatgtttggtaaaacttctgtttctcattttgcctatatatgtatctggctatttctctatctgtttatgtgtctgtatctagtttgtctgtctgtctatcgttccatgcatatatttggactggattgtagttaaatgcatatcttactatgcattgaggttgaaaaagtttaaattcacttctctgaatctctctgaaagtttaggtttctttctttcttttctttctataaaaaaggttatataaagatataacctaatgggttgttgtgaggttcaagtgagatgtatattaaaggactttgtaaagtctgatttctcacaaacaggctgtttactaccaagaaaagattggcatcgcatgccactcagagttccagatttgaacccctacttctctgttcctcagagaaggcctccatttcctcatgactgtctaataaacatggagctgctctggggagatgcaattgtgaggaaatggatacaaggcagaaaacaaattccaaggctgttggagaccccagtgctaaggactggagtgagatccactcaatggggtaacactgagacccaggactgtggaaatgtaataagatgactcagcagaattcaggctgacatctccacggacaaatcatacattttcttataagttgggccttcagaagtaatattcttttcaaaaagttaataataagcgaggctcttctattctagccagaatccagtgtgaatatttgaaacaaatgactttcacagatatatagagggaaaaaagaattcaaagctagcatcttatcttggagatgaaaaaagtgggggtgggaggagagagccacagtcacacaatgcctctgtgagagcagttagattataatccaggtctatcccaggactggaaaaaatacacactcagtggttctcactggtgatggatttatgggtaactgattttcttctttgttgtttcaaatttcaaaagggaatgtaaattatttttacagyctgattttttttaatttttcaataagtcattaaaaaatagaatgca

SEQ ID NO: 60095 - DNA, 1666 bp, Homo sapiens
tcatgtgtggtcccttcctcccaagtaccgatgctcagtttgggttcagaattttctattctttcacttagggaaagttccctgaaagatatcactttcaagattgcaaaacctggctttacctttgtgtgcatgtatgtattacatgtaggcatttctttttatgtctgtgtcccctacacgtgccagtttcagaggtgatacttcaaagagagtggaggacatgccagctgcaattcctattttcattctcactttaagagtatttatggctataatgtcggaattctatgtaagacattttttaaatggtgatacagttaaggtgctaaaaaggtttgtgtatttttctttgtctgcatattgaaagcttcccatttatcatatataagagagaatttggataattttcttcctgaaagcagaaggatatattatcattatttcctacagggtatggcaaggcacctttcttcccagtacctttcttgcaacacttgatctcacaatcctataatcccattatatactgcaccttttccatgaaacatcatccttgaagttatagtttttccttttaataaaataactactactgcatttttattaacctctcacatttcccaagccactttgtgggagacaaacatacaagataggccacacatacgtgtttgcttttcagaaaaattacacactggtaagaagcttagaatcaacacagaattatggctacaagtaaacacagtcgaagattaaattaaatgcctacatccaagggttaataggatcagacccaagtgtctgagaccatcagaatctaccaatgcaaagttaggatgtatcctcactgtataatatatttcaaaaacaattcaggatcctgtgttagaaatacaaaattcaaatgctggctcaatagcttaaatgaggaactttgataacatccctgggcttctgcatctgtgtcctcayttgcaaaataaattttatttatttctatggcacttttagttctactgtgatcaatgcttaaggcagagatttatcgctcagatcaagtttcgggtaagggcctcttccttgacgctagacagcacccaccgttggccttcaccttctccttagcagaaaactgcgagaccacctgcaccttgttagtctgtagcaccgatgagatatttagttcaatgttcctcacatctaaggcccaaccattcccctttactcttctctactgcaagaagagtccaagtagatggaaaagaaatgagctggcccttgaaatggcatcagttttaggataagtaccaaagattaaatacattcaggctatattttgaagcacttcacatgggccaagtgtggaccaggtgctgggggagatgatacagagacaaataaaatcctggtccttccagctgagtgcaggactcagatacacagaggtgggtataaggacaacacaggagagggacagttaagggagcctctgggagttccgggtgggtcatgagatatctgattgagagagagagactaggagaagagctaggtttggagaggaaattagtgtatttagtctctctcagatgtctcaggtttgagtttgagaaagtatcaattaattgaacacagtgtaatattatataataaagattaattc

SEQ ID NO: 60096 - DNA, 705 bp, Homo sapiens
gtggtacaatcttggctcactgcaacctctgcctcccaggttcaagcaattcttctgcctcaacctcccaagtagctgggattacaggcacccaccaccattcctggctaatttttgtatttttagtagagacgggatttcaccatgttggccaggctggtcttgaactcctgacctcaggtgatctgcccgcctcggcctcccaaagtgctgggattacaggtaaatactttttaaataagggaccaattaagggtttgaagaggaaactggaaagacaaaaaagtgtcagtattgagatctgagcagagaggataaactagtgaagtcaagtgtctagacagaaggaaggagagggtgacagaaaatcagggtgacaggagcacaggaactgtggggggaagtggtrtaacagttcagaaatgtgggaagggtcaaatcagttagagattggcaagttggttcggattttaagaattctaggaagtctttggttataaattggggagtgtgacatgagctgatttatattttgaaaagctcactcttgcagctatgtagagaatgcaagcagtttggatgctactggaatcttccaggcagatgatagtggaggcttgaattgggatgattgaggtagacaaagaaagaagagaggatttggaagctatttcaggaataatgcctacatcattctcagggaaa

SEQ ID NO: 60097 - DNA, 641 bp, Homo sapiens
cccgagaaactccagccagccagtgcactggggtggaaccacagaagttcatgctgtttgcagtggggaggagcctggcccctcttcttcctggatggaacctgggattcaatctgcagggtgggaagcactctagaagggacgctggccttgtggagagtccctgtttcccccttttcttcactttcactcaataaaacctgttttactcaccattcaaatagtctgtgaggcaaaattttcatggctgtgtaacaaggaccccacctttagctgaactaaggaaaagtcctgcaacaattgaacttaacactaatttgtgctttatttctgttcactcagaaaatatttcttcagggtttaatatatgttagagactactttacatgtctttttcctttccagacatcattatcatactagataaccttatataatttcactaaatggtttctaaggtataaaactgacaactcattccctttggcttctccatggctctgagacattagttaatgcaygtatcacctggtttgcttgttaaatacagatattctgcaaaaacaagacccccaaaatagatgaatatgtttcatcaaaattaaaaaattttatgcttcaaaaaacaccatccaaaaaat

SEQ ID NO: 60098 - DNA, 505 bp, Homo sapiens
tcctcctccctatgttcacctctatgtcgctttcttactcaacagctctcaatgaatggttgccctttgccccatcagcaaaattaacacactttactatgatatttagtgtccttggtaatctgaatataactaccttttcagtcttatttttccactactcatttgccataacttggatatattctaagcccccaaaccactactcgcatatcccacctttataattttgttcattccacctgaaatgcccttctcctaaacttaaaaaaaaatacctttttttttttttttttttgcagctgggtgcgatggctcacgcctgtaatcccagcactttgggaggccgaggcgggtggatcacaaggtcaggagatygagaccatcctggccaacatggcaagaccccgtctttactaaaaatacaaaaattagctgggcgtggtagtgcgtgcctgtaatcccagctattcaggaggctgaggcaggagaattgcttgaaccc

SEQ ID NO: 60099 - DNA, 1026 bp, Homo sapiens
aaaaataataacactttacccacgaggtgaaaatagacttctctttcttcctgaacttcactcttctcaacttgtctgtgtaccacgttggaacagtgcagagttagaagtcaattaacagtgaaggccagtattccagttttagctcagccagtgagtcattttgtgaccttaggcaagtcattcagcttggattaggactcagtgatttataaggatcctccagtttacagaagaccatgttttagaagaaagcagctctagtatatgatctacactctactacttagtagtaattgaactggcaagtggctcagtcactctctgcctcaatttcctcaactgaaaaagtatgtaaccctcatggagtttgtgaagattaaatgagataaggtttctgaagagcttaaaatggcacctggcatttaataagcacgcaatggctttttgctcttattgttacaatgatgcttcatcatctcccatagtagtaatttcctgtgtgcctggtaggtgtctttagccagccactttactaacagactgattggataagtaatgatttggaacaatcagcactggaggcaggtttgggaaggagagtctggctgattgctgttgtgttgtttttctttcttttatgacccgtaaccagtacttactggagcaatatatattcacaaattgtagtcccagagagttggaaggaaagttgctatttaaaggctgctcacaatgtcttgattggcattttgtggttactacacagaaatgaactgttggagaaggattgatttacctagtayggttggttttgctgtctccaaactatgccaggttatactagggatagatcaaacaaaattaataaatatgtagataaatgaaaaggtaaaatgttttaaagtgcttaaggtttagtcaggtatacgaaatgcattcacaattgaaataatgatgttttactaaaaaataggtatctttacttgtgatattattgagtttatcatattctaattacattgg

SEQ ID NO: 60100 - DNA, 807 bp, Homo sapiens
tttttttgttttactcttgggaaagcaaattatttgttttctcacatcttttggggtccaattttgatgattctgatcttttttagttgcttgacctgtagaccctctacagaacattgcagggcctcttctcagaggagcagcggtgatgagcttagtttcctaggctgggactgttgcrctggacttgacaggtgaactgaaaattgcagggataagtacacctattgagaacaaacatcccatctctttatcaaagctcttcattggctttggaaaactgctgtaggcctaaggaaactaaactttctagggatattctaggttttaaacatatgagaaagagaaagacgtcggttcttatttaagagagtttatgagaccttatccttgaaatagtcaaatttataaatgacataaggctgtatgtgtagttaataaaacaggaattcatagccactcaaatgttctaaactttcaaaaatgatttggggttctgttttgggattaaggaacactgaactttgaaccatttcaacccacttctaattctgaggtctagagatacaatatgtagcatggcagagttacggcatcagctgatgaatatccattgaagtgaaatgattataaagttacaccaaaaaataacaccatccatgcttgcagagttgggatgacagaatacttatgaggtatttgctttttagttatatattgcattataggctaaagatttgggtctatttgctgaaagtcactaatctaataatattttcattattaaaagtggaggcaatattaggg

SEQ ID NO: 60101 - DNA, 807 bp, Homo sapiens
tttttttgttttactcttgggaaagcaaattatttgttttctcacatcttttggggtccaattttgatgattctgatcttttttagttgcttgacctgtagaccctctacagaacattgcagggcctcttctcagaggagcagcggtgatgagcttagtttcctaggctgggactgttgcgctggacttgacaggtgaactgaaaattgcagggataagtacacctattgagaacaaacatcccatctctttatcaaagctcttcattggctttggaaaactgctgtaggcctaaggaaactaaactttctagggatattctaggttttaaacatatgagaaagagaaagacgtcggttcttatttaagagagtttatgagaccttatccttgaaatagtcaaatttataaatgacataaggctgtatgtgtagttaataaaacaggaattcatagccactcaaatgttctaaactttcaaaaatgatttggggttctgttttgggattaaggaacactgaactttgaaccatttcaacccacttctaattctgaggtctagakatacaatatgtagcatggcagagttacggcatcagctgatgaatatccattgaagtgaaatgattataaagttacaccaaaaaataacaccatccatgcttgcagagttgggatgacagaatacttatgaggtatttgctttttagttatatattgcattataggctaaagatttgggtctatttgctgaaagtcactaatctaataatattttcattattaaaagtggaggcaatattaggg

SEQ ID NO: 60102 - DNA, 807 bp, Homo sapiens
tttttttgttttactcttgggaaagcaaattatttgttttctcacatcttttggggtccaattttgatgattctgatcttttttagttgcttgacctgtagaccctctacagaacattgcagggcctcttctcagaggagcagcggtgatgagcttagtttcctaggctgggactgttgcgctggacttgacaggtgaactgaaaattgcagggataagtacacctattgagaacaaacatcccatctctttatcaaagctcttcattggctttggaaaactgctgtaggcctaaggaaactaaactttctagggatattctaggttttaaacatatgagaaagagaaagacgtcggttcttatttaagagagtttatgagaccttatccttgaaatagtcaaatttataaatgacataaggctgtatgtgtagttaataaaacaggaattcatagccactcaaatgttctaaactttcaaaaatgatttggggttctgttttgggattaaggaacactgaactttgaaccatttcaacccacttctaattctgaggtctagagatacaatatgtagcatggcagagttacggcatcagctgatgaatatccattgaagtgaaatgattataaagttacaccaaaaaataacaccatccatgcttgcagagttgggatgacagaatacttatgaggtatttgctttttagttatatattgyattataggctaaagatttgggtctatttgctgaaagtcactaatctaataatattttcattattaaaagtggaggcaatattaggg

SEQ ID NO: 60103 - DNA, 878 bp, Homo sapiens
ggatcctttctacaccagggtgagaaaacagtccttatcaccagagacggagctggaggcaatacacatgtaaaactaataaaatttgtatacttttctctggttaaccacaggtcaatgtggtttttagatccagctgaagagcacactaagagctaaaagagaggttggaggttatctctggctcccataccatgtataagaaaccagtaataaaagtcagggaacatccatgggagatgtggatggaaaggaggcttactcttcactatatatataaatataaatatatatatatatttttttttcgagacagggtctcactctgtcgcccaggctggagtgcagtgacatgatcacagctcactgcagccttgacctcttaggctcaagcaatcctcccacctcagcctcccaagtatctaggactatgtctagttaattttattttaattttaatttttgtagagacaaggcctcactatgttgcccaggctggtctcgaactcctgggcacaagcagtcctcctgcctcacaatatactctttttaataccttttgacctttagaatgttgcactwtatgaatatattttctattaaacaaacaaataaataaaatcagaaaaaaaagaaaatggtctaccaaatcctcctcctgacatttgtagttggagtggactagaatttttcctgtcaggaaagaataggcaaggggtagctgagaataacccaaaatgttctgagatccttccaggaggagcctctgggtaaaagtaaacacagtgaagtaagaggcaaggaaagaggatctgggagctcagcaggaacacttttcacacaggtcagactgtcctacccaatggcctctcctcaat

SEQ ID NO: 60104 - DNA, 628 bp, Homo sapiens
tccagtccacaggtgagttgatgacactcagagcaagattcagcacacctatgaggctgtgacttcactaattagacaaagtccacaggaggagttgaggcgctcaggcacaattttagtccaccgttgagattataactcctgttcttagacacaacatatagaaggggttaacctcctatacctaaaatmatgacatgtatgggattgctagtatcatccctggaccttcctgcagatttaactgtgacattttcctctccccagcacctgagtaatctgactctcttccctgggaccagcccacagatgggatagtgaatattgctgaacccagatctgagatatgactctattcttatgcattggtgctgcttgcagaggacattgtgacatatcgctgggccctgcacttaggtgatgtgagtctcctctcctgccttggcactgcccatagggggcattgtgacatatctctgggcctacacccaggttatatgactgtcatgcctgtgccccgaccacataagcaattgtgacatattgctgggtccaacacctggtaatgtaattctactgcctaggttctagaacatcatgacatatctcttcacccgtcacccagatg

SEQ ID NO: 60105 - DNA, 668 bp, Homo sapiens
ctgtaatcctagcactttgggaggcccaggcaggcagatcatgagttcaggagtttgagaccagcctggccaacatggcgaaactctgtctctactaaaaatacaaaaaattagccaggtgtggtggcaggcacctgtgatcctggctactcaggaggctgaggcaggagaatcacttgaaccaggaggtggaggttgcagcgagctgaggtgacgccactgcatgctagcctgggcgacagtgtgagactccatcttaaaaaaaaaaaaraaagaaagaaaagaaaaaagaaaaaaaaaagagtggtgactctctatgacctttgcaaatagaggagactcgggattatgtttgtttttctaaggctagctaagagagggtgtatctcttttattatctggttcgaggtatgagaattattacagcaactgtaagtggggacaagacatatgtcacaattacatctctgggtagggagggggcaagagagtcacacctggggctagttcagagatatgtcacaatattttttaagggcaaggaccaagcaggagagtcatatcacctaggtgcttggcgagggatgtattaaaatctctgcctgtaagatgggcgcaggcagcaagtcacatcacctgggtgctgggcctagtgatatgttacaatg

SEQ ID NO: 60106 - DNA, 686 bp, Homo sapiens
atttaaaatccgttgtatttgaccaaaatttctactctaaagtattcccctatgctaacttctgttcattatagaatattaaaaaaattaaagtggtaaaaacatgagatagagaacttataatcacactatacaactgtactaaaatttttggtgtattttcttttaattttagttatttggtggtcatggtggtcctaagtatcttcaaagttgtaatactaaataaaaatcaatgccycaccttcaaaaaactgatgatgcagagaagaaaatagataatctatcaatcgtgtagaaatgaaaactatggactcaagtctgactgctgaggactggatcttagtattaataccttatttgtcagctgcatggccttgaacaaacctgctaatctgtctaatctttgatttgcaaatcactaaaagttcatcattatcatcattattagcagcatcatataatacaaacttgaatcagataataaaggttaaagcaaagtttagtggaaacatgaagggaaagaaaggggattaatttcaactgaatagatcatagaaggttttgaattgccggttgagacttactttatataccccaaggtaatagcaatatttaaagagctatttctattctcaatgtggttatgtaagcattttaataaaaaatgcttatttagagaactt

SEQ ID NO: 60107 - DNA, 686 bp, Homo sapiens
atttaaaatccgttgtatttgaccaaaatttctactctaaagtattcccctatgctaacttctgttcattatagaatattaaaaaaattaaagtggtaaaaacatgagatagagaacttataatcacactatacaactgtactaaaatttttggtgtattttcttttaattttagttatttggtggtcatggtggtcctaagtatcttcaaagttgtaatactaaataaaaatcaatgcctcaccttcaaaaaactgatgatgcagagaagaaaatagataatctatcaatcgtgtagaaatgaaaactatggmctcaagtctgactgctgaggactggatcttagtattaataccttatttgtcagctgcatggccttgaacaaacctgctaatctgtctaatctttgatttgcaaatcactaaaagttcatcattatcatcattattagcagcatcatataatacaaacttgaatcagataataaaggttaaagcaaagtttagtggaaacatgaagggaaagaaaggggattaatttcaactgaatagatcatagaaggttttgaattgccggttgagacttactttatataccccaaggtaatagcaatatttaaagagctatttctattctcaatgtggttatgtaagcattttaataaaaaatgcttatttagagaactt

SEQ ID NO: 60108 - DNA, 582 bp, Homo sapiens
ccttatatttggttcatgtcctaacttgggagtttcagctctgctcaggcagaggtgctgtgtacactaacttcatgaaataaaaaccaacaaaggcatcagaggcttggcactatattctctaatgaacataatatttcaaaaccactggaaaaagaatgcctccaaattttaaattaccagtacaaacttatcaataggttaattgtgattttgatgagcatttgaaatggtagatgtaaagccctagcataggctctgcctgtagcacttaataagttatatatagatccttgttagcattattgagcatatcagcatatgaaatctaatktgtatcagtgtgaaaccatcatctgactattcattttaaaggatcaggataaagtctcacatatgtctctgtacaacagtctcgggctgtcattgtttaggcttgcagaatttatgtaatgatgaagatccacttttaggtttggacagtatttgagcctaatttgttaaacaaaacaaaacaaaacaaaacaatctagcttctggtcactgaaaatttaatcctacaaggatagtttactgggtaat

SEQ ID NO: 60109 - DNA, 578 bp, Homo sapiens
gcttagagatgactcttattaacatcagagtataatttgggcaacatgctaaaagagaaaatcagagttcttctgaattccagaatattgaaaacataaatgaagataaatgaagtgtgattcaacattgcaaattcagagcatggaaatagagtggttggttagcatgtgactaaaaagattctgagatttagcagctaatttagccattaggaatagatgtctattgctagactattagttcatagaaataatgatggactttgcatttttccctgctttatcctcagcacctagtatgttgttcaatacgtgctcagtaagcatcttttgacatttctaagcaattgtcttaattcacgccccattcatcawctcatttagaattcgactatcccatccaccagttttggccctcatttcctcatctctatactttattctatagatcagctccaagctgttatcttcctggctatagcattagctcttctctacaaataatttctgactttctaccggcaatgctgctagatttagccatatctgataattccaggtcttcaatatggcctcag

SEQ ID NO: 60110 - DNA, 956 bp, Homo sapiens
agaacttggtccctagtaggttcttagtgaatgttagtccttttctactctcctttcctcatctgatagctaggaacactaaactttcttgcaaacctatgcaaagcaattatatttatctctgtgaaattctccccataagaagatgaatccctacagagaagatgagcacatttccataatctacaattggtctcaggtattaggctcctgtttatagttttgtataaatgataagtcaatattcaatagtgggaataatctgaaaaaataaactgatactcccttaacaataaaaaggaggagctctctatttccagcaaggaacatacacaagagcaggaattttaaatttatacagtttgcttcatttgcagctttggtggtttccacattcatagtcatttaatactccttacgttccaagaggaagtgaggaacttggggatctgttgaaggcttggcgagtctcagtcattcctttcttagttcaagagggtattttatacctgaaacatacattttcctttccaggtctaaaaaattgcaagatataaagaaagcagttaaagccataatgcacatggagtacaaacactgtttgaagatgagtaaatcattcagaaatacctgaacagcatttaaaaaatactttttcttattgatggctgtagatcacaagattggatacctttatagaaatctaactgtgctagaaacactaggcagagttacctctccaaatgtagtaatayagccccagaataattctccttcaagttttcagatctcaagttcataggatctggtttaggtgggtccttagaaatgatttaaatcccctaataacataaccatataatagtctttccacttgtgtttgcacatctccagcaatagagaagagcattcttcccagggcagttgagttgaaattaagtcaatacatatgcatc

SEQ ID NO: 60111 - DNA, 669 bp, Homo sapiens
ttctgccatcgtaattagaagaatatgccttggcaaatccgttgatccaaggaagattagagacacatgtaatacagccccagtcttcagcttgattccaagggtagccaaattcagctccttaatcagccagcttccagctgacctgcaagcacacgaacttgaacaagtgattgttgtaagccactagtttttagggagtttttctcttccaagacattattgctgcaattggtggtttatgtacatacgttcaagaaatgccttcaaaactcttgtatgttagacactaacctagatgttgattaaatagtagatgaaagaatagtgatatatgttctcataaactaccrtttagagagtgatagagacaagttgatggataataaaatataatatgggtaaatgttttgatcagagcatggtgttgtgggaatatatgagcctggtgcctcatttatacctgtgggtttgccttaactctccataagaagtcatgactatgtcaacagtgggactggtaaaaactgtataaaggaatgacatttactccaaatagagttagcagtgtgagtgatcagagggcatagagtactcgatgagctggaaggagatgagattggctatagtgaatgttggaggaagagtggagggagaagcttgtaatgt

SEQ ID NO: 60112 - DNA, 1167 bp, Homo sapiens
tggaagactgaagtaatgatttgaaaaatcccacagagctagagcatagtgtacttagtaggaatgggtaggtgatggggctggagaaatagatggggacagattgtaaaagctcatatctgaagctaaggagtttaggctttagcctgaaagctgcagagaaccatttcaggtttctatgcaggaaagcaacatgaaagctgtggtagttctattttgtttgtttaataaattttgtcaaagtataatagggacacaaaataagtgttcaacttactgaattttacaaagtgaacatatgtccatctcaggcctctggtcagccaggtaaccagtaattgggtcaagaaacataacattgccaacttcccaaaagaccactccccaccgcatgctcctctcctgtcataacctcccaccccaacaagggaacaattaccctgatttctaatactgttgcttagatttgctgattttgaacttcatatgaatggaacaatatggtatatgtactttagtgtttggcttttttggctcaatattaatgtttgtaagattttatctacattgtgatgtagattgaattcattcattcccattgatgtatggtatcccattatacgaatataccataatttatcagttctaatgttgrggtaggcatctggcttattttcagatttggacgattaacaaacactgttaccatgaacacttcatacaagacttttgataaatatgtgtgcttactcctgctgagtatatgtagtaggagtagatttgctggatcaaagggtatgctgatattcaactttagtagatactgctaaacatttctctaaaacatgcaattcacactccccccagcagtctatgaagtaccagttcctccacatcctcaccaaccttggtactattatcttttccatttttgcctttatcagggcatatggtagtatcctgcagtttattttgaagacagtgatagtgaagagagattagaggttgaacggccagttagggaactatggcaataatccaagagtgaaggcatggatccaggacagtgtcagtatttggaagccagctcctgccaatgctggtatttgtcaggtgtcatacacatccagtgaaaaaggtcatatgcaataatatgaagcttagttt

SEQ ID NO: 60113 - DNA, 724 bp, Homo sapiens
tccttttgcccttccgcatccatcatgtgtgggcacaacaagaaggccctcaccagacaccaaatgttggtgccttgatgttggtatttccagcctccaaaacagtgaaaaaataaattttgttatttataacttacccagtctcaggtattttgttacagcagcacagagtaagacaggtcctcagcaggaatctagctgtgcagcttctctgtgtctctctcctggtatttgtggagactgggaatattaagtctcagaggcgcaagtcagataagagggctgtgggccaaactytcctccaacaaggccagaatgccctctgcagcacacaaccagtgatccagaagcttgctcatggtatcttattcattcaatttgccctaccatcttagaagaaagatacttattacttcaattttatagatgaggaaactgaagatccaagagattgaatatgcttcctagcaccataagttacatgtggagaattaggattctcttttccactttcctctccactgcctctcatttcccctgtgatccagcccttccaaaccacgtggtgctgaaccagtcagaccactgtataaccacaggctttccctcttgagaaacttgcaagcaagcaaaaaagagatgcatgtgggccacttccttttccacattttcccaaaatagcctaaaattcctgtgaaacagagagcatttcaggcccaaggca

SEQ ID NO: 60114 - DNA, 810 bp, Homo sapiens
ggatcctggaaatctttggttttggccccatgattcctcggtaaaggtgaggtcaagctgggacagggtctcccttcgcaggattgaaagagtgtgtgggcactcagagtcctgaactctgatctggaccttttctttccttcgggtcagcaggaggcatccccagccctagattcagattccctctcagcaaggtgwtgcttgcatgaacgggcagtaaagctggcaaccaggcctgcggtcctctgggtgagcactgtgtgccacctgccctctgagaggctgacggtgccaggccacagccatgggtgcctgtcccctgtctctgcagagagtggttctgggggcctctccctccacacattacttttttgctgttctgatatgtctcccattctcccagcatttccatccacttgctctttcatctcatctcctgccgcatttgctgtcaaatgaggaatgttggagttagcggagctgccaggcttcgcagagccacccgtggatgctgggtcttgggctctggagccctggtgggacccagctagaaggagccagggaagggcagaccataaaggctgagggcctttgagcaaatgagtgccagtgggctggccttgggaccctgggacgtgccatcctcaggccacagacacaccagtcttaggtcaggtcccagtctctaggtggggtcctgacacaagcgggcagccatccccaagccaggactgtggttctcactttggaatttcatcaaactgccagagatacagtaagctggggtcaggtccagcagggacagctgcc

SEQ ID NO: 60115 - DNA, 1527 bp, Homo sapiens
ggggtgaacaggggcaggtgggccctcagagacctgctggacaacagccccgaggctggaccaggcgtctcctcaccctgtggccacaacccttggatctcactggggttgtctccaagtgaacagggccagaccctcaggctgcccccctcctcttgtgctaactcggagacagaactgctgagagcccaggggcctgacctagccccctctccattcccacccactccctagatgggccccgcaccactggcctaacaacaacctcaggctggacctgcaggggagccagggaggagttctgatcctggaaaggaggttggcccgacctgggcagacatgttctgcttcagaaagtcccttctaaaagyaaacccatccctaagctgaaataagtgctttaggggctgaggggagcacagaggactcactgcagaatcccaaagcgatcagtgctgctgtagattccaacaggctttaggccccgtgtctgctggcagcccagctcggtgtccctgtaatccagagggagccttgatgaggggtccaaggtaacgggtgcaagggtctgggggtagtggccacccgtccctgccctgtgctcctagggagcccaggatcctttgagcagggcacactggaagaggcctccctccagggagcagacggacctgtacgttctcatacttcataatgatgtcctctcactcctgcaaagtatccacatcctctaccatgtccatcctgtgagacaaaatcatctaaatgttacactgtacctgagaccttcggagaatacctaaaccgctcccacctggctcccagattctgcctggcggtgtaaccccccttccaccactgccctcaggtgaaaaggggccagacccagtggcccacacctgcatgggtctctggagtctcaagccccaagcaggggtgggcatcttcccaaggacttgagaatactgggacctggacagagaatcctgttgtccccaaatgccatgaaacgggtacacacctgccccagcatgttgaatggtgtccacctgccaaggttgaagggcccatgatgggctattccagggatgtggaggcagactggggtcagggaccagaggtctctgtacagtcggcctcctgggatgctcagggaccacagagatgcccagtttcctacgggaacaagacctctcctgactgctcggttctactccactcatcacttgggctactgtggcccttcagtctcaccagtgaagccactttaggaacaacgccagttaagcaggagggtgtttggtttgggggatgaaaataatctactgtctccaaagcagcccctatgctcgtggaaaccacatctctcggggagggacggtggactccaccattctgagctatccatacaggagggggcttcattttcctgggtcactgaggaagaacagtgggtccttggttctggagaacacctagatggaccatccctcctgggaacactcagggcaaaaggagggtgaggcc

SEQ ID NO: 60116 - DNA, 1527 bp, Homo sapiens
ggggtgaacaggggcaggtgggccctcagagacctgctggacaacagccccgaggctggaccaggcgtctcctcaccctgtggccacaacccttggatctcactggggttgtctccaagtgaacagggccagaccctcaggctgcccccctcctcttgtgctaactcggagacagaactgctgagagcccaggggcctgacctagccccctctccattcccacccactccctagatgggccccgcaccactggcctaacaacaacctcaggctggacctgcaggggagccagggaggagttctgatcctggaaaggaggttggcccgacctgggcagacatgttctgcttcagaaagtcccttctaaaagtaaacccatccctaagctgaaataagtgctttaggggctgaggggagcacagaggactcactgcagaatcccaaagcgatcagtgctgctgtagattccaacaggctttaggccccgtgtctgctggcagcccagctcggtgtccctgtaatccagagggagccttgatgaggggtccaaggtaacgggtgcaagggtctgggkgtagtggccacccgtccctgccctgtgctcctagggagcccaggatcctttgagcagggcacactggaagaggcctccctccagggagcagacggacctgtacgttctcatacttcataatgatgtcctctcactcctgcaaagtatccacatcctctaccatgtccatcctgtgagacaaaatcatctaaatgttacactgtacctgagaccttcggagaatacctaaaccgctcccacctggctcccagattctgcctggcggtgtaaccccccttccaccactgccctcaggtgaaaaggggccagacccagtggcccacacctgcatgggtctctggagtctcaagccccaagcaggggtgggcatcttcccaaggacttgagaatactgggacctggacagagaatcctgttgtccccaaatgccatgaaacgggtacacacctgccccagcatgttgaatggtgtccacctgccaaggttgaagggcccatgatgggctattccagggatgtggaggcagactggggtcagggaccagaggtctctgtacagtcggcctcctgggatgctcagggaccacagagatgcccagtttcctacgggaacaagacctctcctgactgctcggttctactccactcatcacttgggctactgtggcccttcagtctcaccagtgaagccactttaggaacaacgccagttaagcaggagggtgtttggtttgggggatgaaaataatctactgtctccaaagcagcccctatgctcgtggaaaccacatctctcggggagggacggtggactccaccattctgagctatccatacaggagggggcttcattttcctgggtcactgaggaagaacagtgggtccttggttctggagaacacctagatggaccatccctcctgggaacactcagggcaaaaggagggtgaggcc

SEQ ID NO: 60117 - DNA, 560 bp, Homo sapiens
atctcagtggctctgccatggcgaggctctgccccatcccagtggggatcagaaaccctggacagatttgggatctggggcaaggaggccgcagggttcaggcctgaagtccaacatggcacagggcagggccaagagcaaaacccagggtcctgttgggattcccaggccagttaccgcctctctgaccccagacatctcacctgtcaaatgggtacatgcgggagccaccatgaggatgaaagagacaactgtccacacgggcagcgtagaacgggcacccggtgagtgytcagggatgaccctcctcagcacgtgcccagaggccagcaccacccacaccattagccactgtccccaagtcagcatggagggaagagagcaggtcacactcacctgattctgatgaatcagctggcctgggttacgcctctcagggagaaaacctttgagtccacagagctgctcacagataccactgtctgtgtgtagctgctgtagaacacagaggcagggcagagagcggacgggtgctaagcaccagtgacattctgagataa

SEQ ID NO: 60118 - DNA, 516 bp, Homo sapiens
aagcccaagctacaagtagagcaggcagcaagctccctggagtggaggcattccgaggctgggtggccccttggcaggaatgcctttggaggatttccagaaacagctggactagatagactttgagagtcctctgactcacagattgatgattctcacaggaggagttttctggaacaaaaggaggcttaagaacatcagttcctcgaggttctagggggtgaagggaggggacacagagggcatgtaagaggaacttgactcctgccccaacaaagcagtgcagagcttckgggagaggagtcccatctccaaacctcttagtgaggtccaaggatctggggtggaggtgggggagacagacaacagcaggctggagctgggcaggtggggcacgtcagggaattcagctgagtaggatgagggaccagcaggggctatagatcagctagccagaggtggagtccagggaaagtagacaaaagcacagtgcacccagcacccagttcatgagct

SEQ ID NO: 60119 - DNA, 1104 bp, Homo sapiens
gatccctttgctataaaaaatgttctcgggctgggcgtgggctcacacctgtaatcccagcactttgtgaggccaaggcaggaggatcacttgagcccaggaggtcgaggctgcagtaagctgtgatggtgcaactgaaaaaaagaaaaagaaaaaagaatattttggaacagttggtgaaacctgaatgaaatctgaggatttaattatagtaatgtatcagcatgaatttcctgattttaatagttgatgtagtagaaagtccctgtttttaggaaacacacactaaagtatatttggaggcgatgggcatcatatcagcaaatgtattctcacatagtttagcaaaaaggttttttgtactgtacttrcaattttctacaaacctaaagatgttttaaaaaatttttaaatatagcccttcaaaaattctgattggccctgctggggtcacatatttaccctaggccagttgctttgcccaagggtctgaggtcttctgaatggccatttagatgtgtgcccactcctgagacagggaacccaggttgagggtgggcagtgggagtgacagcttaccaggatcagatggactgaaaaacagccgtttcctgacacagggaattcaggacagaccaaaaaaggaacagctgtgtactccacttagattagactatgattattaactttgggaaaatggtcatttaaaagcacataacctttgactgagtaattccacttcctggtaatctatttcaagaaaataaccccaatacagaggaggggaagctctatattcaaagacgttggttccaatgttatctatggtactaaaaaactaaaaggcactgatgagtccccatatggaagaaaggttgaggaacgtggctagagggctgaccatctctgaggacattcgcacacagctggtgggcttctgggcttcctaaccataggcttccattttcccccattcaagtgagaccatcttggtccacctgacttgtctgagccacctcctggcattaggttcctggtcctcatgccactgtcacctttccctcatccagggcaggtgtctctctaggttataaagaaggcaag

SEQ ID NO: 60120 - DNA, 1104 bp, Homo sapiens
gatccctttgctataaaaaatgttctcgggctgggcgtgggctcacacctgtaatcccagcactttgtgaggccaaggcaggaggatcacttgagcccaggaggtcgaggctgcagtaagctgtgatggtgcaactgaaaaaaagaaaaagaaaaaagaatattttggaacagttggtgaaacctgaatgaaatctgaggatttaattatagtaatgtatcagcatgaatttcctgattttaatagttgatgtagtagaaagtccctgtttttaggaaacacacactaaagtatatttggaggcgatgggcatcatatcagcaaatgtattctcacatagtttagcaaaaaggttttttgtactgtacttgcaattttctacaaacctaaagatgttttaaaaaatttttaaatatagccctycaaaaattctgattggccctgctggggtcacatatttaccctaggccagttgctttgcccaagggtctgaggtcttctgaatggccatttagatgtgtgcccactcctgagacagggaacccaggttgagggtgggcagtgggagtgacagcttaccaggatcagatggactgaaaaacagccgtttcctgacacagggaattcaggacagaccaaaaaaggaacagctgtgtactccacttagattagactatgattattaactttgggaaaatggtcatttaaaagcacataacctttgactgagtaattccacttcctggtaatctatttcaagaaaataaccccaatacagaggaggggaagctctatattcaaagacgttggttccaatgttatctatggtactaaaaaactaaaaggcactgatgagtccccatatggaagaaaggttgaggaacgtggctagagggctgaccatctctgaggacattcgcacacagctggtgggcttctgggcttcctaaccataggcttccattttcccccattcaagtgagaccatcttggtccacctgacttgtctgagccacctcctggcattaggttcctggtcctcatgccactgtcacctttccctcatccagggcaggtgtctctctaggttataaagaaggcaag

SEQ ID NO: 60121 - DNA, 175 bp, Homo sapiens
ggtttcctcatgttggccaggtggtctcgaatctgacttcaagtggtcaccrccttggctcccaaagtggtgggattacaggtgtaatctttatcaacttcactccttatgatacaacttcattaacgtgatacaacttcactccttatgttgtgcataatcctctaggttgcaa

SEQ ID NO: 60122 - DNA, 1275 bp, Homo sapiens
ctagagactgaaattccccagggctgctgggattggctcaggagaggagcatagagttcaggaggagaaacctcttccaggcaaacatctctgtttgtccaacttgtcccgaagacatcaggtcctcggggttgggacaatgctgactctctctctgctactcctggctcctggcctgcgtgggggctgataaatattaactggtgctgatgggaacgctccctgtcaagggacagcccattgtgtgcccacacacggcaaacactggttcctttctatccctgcgtgtggagcaggaggggctccctctctgggtctggcctaatccagccaagatacgcctccactgcctccacctccaagaaggcctctgagctgggtggttctaacagggctgctcctttgtcagctggaggtgcrgagagtcttgtctgggctggcactgaggagagctctccatgcaaactccctgtgggcttctggccctaagctccttctgtccccagtgggttcaaagtttggcttgcaccagggatccagcccagcccttctaacggaggactgtagtttaggagcagccataactgccaggctgggacccttctagtaacaaacactgtccctctgacaaataaatgcctggcaagtaggagacaagatacatgaacccaggaagctaaatgcacatgggacccccccttacccttgtccccgacctgaccagttcccccacctcctgaccttcacctgaccctagtgaccccatagctcgctcacagccctggccagaggaggcttggggagtccagtcctcgtcagcttctctgatggggccagctggcccgtcaaagctctgtccttcctcctaaggcctggaggcaccatggacaggtgggtgtatttgcggagctgagccaggacatgttcgtcctgagtggggagaggtggaccgggacacagtaacccgctggctgggccaccgtgaggggtcctggggcagctttctttagtctaggcattgttctcctggggacacttcaaatgaaggagattgtggcaacgaggcttggcagaaggggacattcccacaggcggagagtcctctgggacaggaacccagggtgcttggattctggggaagctggagttcggatttggatttttttttttttcttgtgatggagtcttgctctgtcacctaggctggagtacagtggtgcaatcttggctcactgcaacctccgcctcctggattcaagcgattctcctgcctca

SEQ ID NO: 60123 - DNA, 606 bp, Homo sapiens
caacgagcaagactccgtctcaaaaataaataaataaataaaagagactgtatgtgtgggtgcttgcaacaggtcctgacacaaaatgagccctgacagatgctgcccgttcttctgttgcmcctctctggcagaggcagcatggggggtgttgaagtgaggggcaggcccccagggtctgggctcgtggtagcctgggcatcacctgtgtgtgctctgctcccctggggctgtactggccttgcagaggcaattgctcgttgtcaggaaggtgtcccctttgggcatccaagggcagatgatggcgagcctgacccgacatgggaaagctgaagaggacaggaatgggctctggctccgagacctacctccagtgggacctgggccctggactccggcctctggcccctcccatctcttgcccacatcctgaggcgacgagggctagattcagagcccagaagggctttgttaactctgatcgacaaaggggttaactttgttaaccttcctgagggttgacctcatcagggcccggggttcccaggtgaccgtgggcctccctctggggaccttgcagatggtggttctcatggacccaatgga

SEQ ID NO: 60124 - DNA, 748 bp, Homo sapiens
ccacgctgatgggccggacccgaagcgccacctgggagggaaaaccaagcccctgggattagagggagaggaccatgctgggcctcagagagacctcaagcaagcccctggcttctctagcattcagccatctcaggcctcccttgtcctaagtaaaactctacctaggtcagagggcagcaggtccacagagtgttggactgtgtctgagttgatgagtctccccaggagccctggcctccgggagagccccaggggagagagctgtctgctcctccagcctgcctcagcctcacgcccaaataaaacactcgcagctcccctgggcttgaacttggggccctggcactggagcagcctctctgtgtttccgcgaatgacgtgctgcagaggaaggtgcaggcacggctctgggatgaggcctggtaggtgggatggagcagggaatgtcccccatcatcccaacagcctgtgaccacattcctacaccgaggagagtgtcacctagagcgcccacccccatctgcctgtcctccagccagtgtgaaatgggtctcatcctgtgcgtggatctccctaaagaacagggtggagtggggagcacgtcttgtgctgatcaaagkgcaacagctgctgggtgtggggatagaatgaacggccctctggccgagtgaagactccttcaggcctggcgtggtggctcacgcctgtaatcccagcactttaggaggccgaggtgggcggatcc

SEQ ID NO: 60125 - DNA, 3248 bp, Homo sapiens
  misc_feature (1)...(3248): n = A,T,C or G
aaggcagcctcagtccctgccctgacgtgggccctgctcactactaggaaaggaccatggagcccaggtccttgaggctaaagagacccaggcgtgagagcacaggctaagggggcagtgttggctaagacggccagaggctttcatgcacggacccatgtttcttagctgctcaacagagtcaggcccagagaaggaggaaagcctaatgcttgctcgtttggtgaccagatggtgagttggtggctgctgtctgtctcctctgctgagtgctgaggacggggcagaaggtggcctcaggcagcctggctattttccccacactctggagctggccaggccctcgtctctctctgatgatggcatcctgcccagctctttgtcccaggtccacgggtagggatactcacgaggccaggagacacttggagcgcttggccagtcccaggcaggcaatgaggcagatgaccaggtccaggataaagagcaggaggtaggagagccacctgggtagaggggcagggatggtcaggagcagcagggtggaacttctgacctgctggccacgtgagaggctgcacggcagccctgggacacactggaccctctactatggacatgctgcccagagccagcaagcacccagcatgcgtgggctgaagcctcgggagctgcacccccactgctgcctggacaaagctgtcaattcacaccccctgccttcacctctaggctgagtgtcaaaaccagcactgtgcactagaactttccccagtggaggagctgttctaaatccctgctgtccactctcttctttgccactacccacaggtggctaccgagaacttgaaatatgcttgtgcaactgaagaaatacattttaaactttacttaattttaattaatttcaatagccacacatggctggggctaccaccctggacagcacagctctgaagtgtctttctgcggcctcccagcaggcatcgcctaggaccctgcttccctttgcttctagaactctcagacagcatcagaccagccaaggcctgatgtttatagccacagatctaacacagcccctaaggtgcctgcctctttgacaaacactcagcctggctccccaaggcctcccatcttgcccccttgctggatgggatccataacttaagacttttaggttcaggacaggcgcagtggctcacgcctgtaatcccagcactttgggaggccaagacgggcagatcacttgaggccaggagttcgagaccagcctggccaacgtggtgaaacctcatctctacaaaatatacaaaaattagccaggtgtggtggcgggcacctgtagtcccagctactcgggaggctgatgcaggagaatcacttgaamccaggagacagaggttgcagtgagccaagatcacgccactgcactcccagctgngcacagagtgagactccatctcaaaaacaacaacaacaaaaaacttcagttcaattttaaacaacaattttgccaggcactgagcttggcaccaagggatacccaaggtgagtgggctcgtttctgaccatcagagggctcagtgtggaacccgggagtccaggtcagggtacctacagccctgcagacctccagcctcctccaagcccttcattcctctggcctttttgtccccagggctggactgatggggaaaggcagtcacaccccagctgggagaccttggtaagccacttcaccccttgagaccttggtttccatatctgtagagggagctggaacccctcatctcacagggccagaggaaggattaagtgcttgctaaatataaaggttgatggggcaaggcagccaaggacttcaacagccctgccctcctgcttctccagagaacaggctgaagaatcaaagtatcttaagccaacggacactgagaagacccccaaacacaagtgccctcgtcctttcccttccacacaggtccccaacggtgtcctcacaaggcccagtgtactcacatgacagccatgccctttaccctgtgctgggcaccaggggagagtggacagaggaggggcgggcacagagacaggggcttccccgtccccaaagagggaagtatttggatcattatttctcttgctgcaagagccaagtaaagtcgctgacctctcctctccagcaatggttttctgcttcactgacatcataaaggggaagacggagtttggagcgtgggcagggagtgccctggagctggcagaaagtggcaaagaggctccgagggagagaggggagggagcaagctggaggcctggcagccaagggaggttctttctgactccccgaattgaggcttactgccaaaagaaggggactaatcaaagtccttgtctctgcacgagcagggggcagcacacactaggtctctggggttccccggaatggagccgggggctttggggagtgggcagagcctgctgccaccaagaagccagtttccttagacttagctcagagctggaaggaacctcgcaaaccatctagtgtttggatcacattcttatttttacacgcacgcacacacacacacacacacacacacacacacacacacacacgtattataaataccgggtctgtctatgttgtccaggctggtctcaaactcctggactcaagagatcctcctgcctcagcctcccaaagtgctgggatcataggtgtgagctggatcccattctacagattagtacagattagaaagccaaggcccctggtggggagagcctggcccagaaattccacattgtctacatcaagcttcctgcaagggacacagccagctacagggcacctctcgaaatacccagttcatgtttcaaacttaaagatttcttctcaccactcgcctccgctctgcagagcagcaggaaatccagttaggggtgcttctaacccactctctgtggctgtgattcaatgtattttccctgcctccacgcctcatgttgtcaggggttcctggaaacatctcctctaggcggatgtgttttcccagaggagctgggcgaggactgggggatgtattcctaaccaagaactcggctctgcctgccagagccactcccaccctggctccctcttccctcaaccgtagcctctcaaagagaggagccccttggctttttatctcctccaatacttcgccccgccttgtataaaaatgctaggaaatatttgc

SEQ ID NO: 60126 - DNA, 3248 bp, Homo sapiens
  misc_feature (1)...(3248): n = A,T,C or G
aaggcagcctcagtccctgccctgacgtgggccctgctcactactaggaaaggaccatggagcccaggtccttgaggctaaagagacccaggcgtgagagcacaggctaagggggcagtgttggctaagacggccagaggctttcatgcacggacccatgtttcttagctgctcaacagagtcaggcccagagaaggaggaaagcctaatgcttgctcgtttggtgaccagatggtgagttggtggctgctgtctgtctcctctgctgagtgctgaggacggggcagaaggtggcctcaggcagcctggctattttccccacactctggagctggccaggccctcgtctctctctgatgatggcatcctgcccagctctttgtcccaggtccacgggtagggatactcacgaggccaggagacacttggagcgcttggccagtcccaggcaggcaatgaggcagatgaccaggtccaggataaagagcaggaggtaggagagccacctgggtagaggggcagggatggtcaggagcagcagggtggaacttctgacctgctggccacgtgagaggctgcacggcagccctgggacacactggaccctctactatggacatgctgcccagagccagcaagcacccagcatgcgtgggctgaagcctcgggagctgcacccccactgctgcctggacaaagctgtcaattcacaccccctgccttcacctctaggctgagtgtcaaaaccagcactgtgcactagaactttccccagtggaggagctgttctaaatccctgctgtccactctcttctttgccactacccacaggtggctaccgagaacttgaaatatgcttgtgcaactgaagaaatacattttaaactttacttaattttaattaatttcaatagccacacatggctggggctaccaccctggacagcacagctctgaagtgtctttctgcggcctcccagcaggcatcgcctaggaccctgcttccctttgcttctagaactctcagacagcatcagaccagccaaggcctgatgtttatagccacagatctaacacagcccctaaggtgcctgcctctttgacaaacactcagcctggctccccaaggcctcccatcttgcccccttgctggatgggatccataacttaagacttttaggttcaggacaggcgcagtggctcacgcctgtaatcccagcactttgggaggccaagacgggcagatcacttgaggccaggagttcgagaccagcctggccaacgtggtgaaacctcatctctacaaaatatacaaaaattagccaggtgtggtggcgggcacctgtagtcccagctactcgggaggctgatgcaggagaatcacttgaacccaggagacagaggttgcagtgagcyaagatcacgccactgcactcccagctgngcacagagtgagactccatctcaaaaacaacaacaacaaaaaacttcagttcaattttaaacaacaattttgccaggcactgagcttggcaccaagggatacccaaggtgagtgggctcgtttctgaccatcagagggctcagtgtggaacccgggagtccaggtcagggtacctacagccctgcagacctccagcctcctccaagcccttcattcctctggcctttttgtccccagggctggactgatggggaaaggcagtcacaccccagctgggagaccttggtaagccacttcaccccttgagaccttggtttccatatctgtagagggagctggaacccctcatctcacagggccagaggaaggattaagtgcttgctaaatataaaggttgatggggcaaggcagccaaggacttcaacagccctgccctcctgcttctccagagaacaggctgaagaatcaaagtatcttaagccaacggacactgagaagacccccaaacacaagtgccctcgtcctttcccttccacacaggtccccaacggtgtcctcacaaggcccagtgtactcacatgacagccatgccctttaccctgtgctgggcaccaggggagagtggacagaggaggggcgggcacagagacaggggcttccccgtccccaaagagggaagtatttggatcattatttctcttgctgcaagagccaagtaaagtcgctgacctctcctctccagcaatggttttctgcttcactgacatcataaaggggaagacggagtttggagcgtgggcagggagtgccctggagctggcagaaagtggcaaagaggctccgagggagagaggggagggagcaagctggaggcctggcagccaagggaggttctttctgactccccgaattgaggcttactgccaaaagaaggggactaatcaaagtccttgtctctgcacgagcagggggcagcacacactaggtctctggggttccccggaatggagccgggggctttggggagtgggcagagcctgctgccaccaagaagccagtttccttagacttagctcagagctggaaggaacctcgcaaaccatctagtgtttggatcacattcttatttttacacgcacgcacacacacacacacacacacacacacacacacacacacacgtattataaataccgggtctgtctatgttgtccaggctggtctcaaactcctggactcaagagatcctcctgcctcagcctcccaaagtgctgggatcataggtgtgagctggatcccattctacagattagtacagattagaaagccaaggcccctggtggggagagcctggcccagaaattccacattgtctacatcaagcttcctgcaagggacacagccagctacagggcacctctcgaaatacccagttcatgtttcaaacttaaagatttcttctcaccactcgcctccgctctgcagagcagcaggaaatccagttaggggtgcttctaacccactctctgtggctgtgattcaatgtattttccctgcctccacgcctcatgttgtcaggggttcctggaaacatctcctctaggcggatgtgttttcccagaggagctgggcgaggactgggggatgtattcctaaccaagaactcggctctgcctgccagagccactcccaccctggctccctcttccctcaaccgtagcctctcaaagagaggagccccttggctttttatctcctccaatacttcgccccgccttgtataaaaatgctaggaaatatttgc

SEQ ID NO: 60127 - DNA, 3248 bp, Homo sapiens
  misc_feature (1)...(3248): n = A,T,C or G
aaggcagcctcagtccctgccctgacgtgggccctgctcactactaggaaaggaccatggagcccaggtccttgaggctaaagagacccaggcgtgagagcacaggctaagggggcagtgttggctaagacggccagaggctttcatgcacggacccatgtttcttagctgctcaacagagtcaggcccagagaaggaggaaagcctaatgcttgctcgtttggtgaccagatggtgagttggtggctgctgtctgtctcctctgctgagtgctgaggacggggcagaaggtggcctcaggcagcctggctattttccccacactctggagctggccaggccctcgtctctctctgatgatggcatcctgcccagctctttgtcccaggtccacgggtagggatactcacgaggccaggagacacttggagcgcttggccagtcccaggcaggcaatgaggcagatgaccaggtccaggataaagagcaggaggtaggagagccacctgggtagaggggcagggatggtcaggagcagcagggtggaacttctgacctgctggccacgtgagaggctgcacggcagccctgggacacactggaccctctactatggacatgctgcccagagccagcaagcacccagcatgcgtgggctgaagcctcgggagctgcacccccactgctgcctggacaaagctgtcaattcacaccccctgccttcacctctaggctgagtgtcaaaaccagcactgtgcactagaactttccccagtggaggagctgttctaaatccctgctgtccactctcttctttgccactacccacaggtggctaccgagaacttgaaatatgcttgtgcaactgaagaaatacattttaaactttacttaattttaattaatttcaatagccacacatggctggggctaccaccctggacagcacagctctgaagtgtctttctgcggcctcccagcaggcatcgcctaggaccctgcttccctttgcttctagaactctcagacagcatcagaccagccaaggcctgatgtttatagccacagatctaacacagcccctaaggtgcctgcctctttgacaaacactcagcctggctccccaaggcctcccatcttgcccccttgctggatgggatccataacttaagacttttaggttcaggacaggcgcagtggctcacgcctgtaatcccagcactttgggaggccaagacgggcagatcacttgaggccaggagttcgagaccagcctggccaacgtggtgaaacctcatctctacaaaatatacaaaaattagccaggtgtggtggcgggcacctgtagtcccagctactcgggaggctgatgcaggagaatcacttgaacccaggagacagaggttgcagtgagccragatcacgccactgcactcccagctgngcacagagtgagactccatctcaaaaacaacaacaacaaaaaacttcagttcaattttaaacaacaattttgccaggcactgagcttggcaccaagggatacccaaggtgagtgggctcgtttctgaccatcagagggctcagtgtggaacccgggagtccaggtcagggtacctacagccctgcagacctccagcctcctccaagcccttcattcctctggcctttttgtccccagggctggactgatggggaaaggcagtcacaccccagctgggagaccttggtaagccacttcaccccttgagaccttggtttccatatctgtagagggagctggaacccctcatctcacagggccagaggaaggattaagtgcttgctaaatataaaggttgatggggcaaggcagccaaggacttcaacagccctgccctcctgcttctccagagaacaggctgaagaatcaaagtatcttaagccaacggacactgagaagacccccaaacacaagtgccctcgtcctttcccttccacacaggtccccaacggtgtcctcacaaggcccagtgtactcacatgacagccatgccctttaccctgtgctgggcaccaggggagagtggacagaggaggggcgggcacagagacaggggcttccccgtccccaaagagggaagtatttggatcattatttctcttgctgcaagagccaagtaaagtcgctgacctctcctctccagcaatggttttctgcttcactgacatcataaaggggaagacggagtttggagcgtgggcagggagtgccctggagctggcagaaagtggcaaagaggctccgagggagagaggggagggagcaagctggaggcctggcagccaagggaggttctttctgactccccgaattgaggcttactgccaaaagaaggggactaatcaaagtccttgtctctgcacgagcagggggcagcacacactaggtctctggggttccccggaatggagccgggggctttggggagtgggcagagcctgctgccaccaagaagccagtttccttagacttagctcagagctggaaggaacctcgcaaaccatctagtgtttggatcacattcttatttttacacgcacgcacacacacacacacacacacacacacacacacacacacacgtattataaataccgggtctgtctatgttgtccaggctggtctcaaactcctggactcaagagatcctcctgcctcagcctcccaaagtgctgggatcataggtgtgagctggatcccattctacagattagtacagattagaaagccaaggcccctggtggggagagcctggcccagaaattccacattgtctacatcaagcttcctgcaagggacacagccagctacagggcacctctcgaaatacccagttcatgtttcaaacttaaagatttcttctcaccactcgcctccgctctgcagagcagcaggaaatccagttaggggtgcttctaacccactctctgtggctgtgattcaatgtattttccctgcctccacgcctcatgttgtcaggggttcctggaaacatctcctctaggcggatgtgttttcccagaggagctgggcgaggactgggggatgtattcctaaccaagaactcggctctgcctgccagagccactcccaccctggctccctcttccctcaaccgtagcctctcaaagagaggagccccttggctttttatctcctccaatacttcgccccgccttgtataaaaatgctaggaaatatttgc

SEQ ID NO: 60128 - DNA, 3248 bp, Homo sapiens
  misc_feature (1)...(3248): n = A,T,C or G
aaggcagcctcagtccctgccctgacgtgggccctgctcactactaggaaaggaccatggagcccaggtccttgaggctaaagagacccaggcgtgagagcacaggctaagggggcagtgttggctaagacggccagaggctttcatgcacggacccatgtttcttagctgctcaacagagtcaggcccagagaaggaggaaagcctaatgcttgctcgtttggtgaccagatggtgagttggtggctgctgtctgtctcctctgctgagtgctgaggacggggcagaaggtggcctcaggcagcctggctattttccccacactctggagctggccaggccctcgtctctctctgatgatggcatcctgcccagctctttgtcccaggtccacgggtagggatactcacgaggccaggagacacttggagcgcttggccagtcccaggcaggcaatgaggcagatgaccaggtccaggataaagagcaggaggtaggagagccacctgggtagaggggcagggatggtcaggagcagcagggtggaacttctgacctgctggccacgtgagaggctgcacggcagccctgggacacactggaccctctactatggacatgctgcccagagccagcaagcacccagcatgcgtgggctgaagcctcgggagctgcacccccactgctgcctggacaaagctgtcaattcacaccccctgccttcacctctaggctgagtgtcaaaaccagcactgtgcactagaactttccccagtggaggagctgttctaaatccctgctgtccactctcttctttgccactacccacaggtggctaccgagaacttgaaatatgcttgtgcaactgaagaaatacattttaaactttacttaattttaattaatttcaatagccacacatggctggggctaccaccctggacagcacagctctgaagtgtctttctgcggcctcccagcaggcatcgcctaggaccctgcttccctttgcttctagaactctcagacagcatcagaccagccaaggcctgatgtttatagccacagatctaacacagcccctaaggtgcctgcctctttgacaaacactcagcctggctccccaaggcctcccatcttgcccccttgctggatgggatccataacttaagacttttaggttcaggacaggcgcagtggctcacgcctgtaatcccagcactttgggaggccaagacgggcagatcacttgaggccaggagttcgagaccagcctggccaacgtggtgaaacctcatctctacaaaatatacaaaaattagccaggtgtggtggcgggcacctgtagtcccagctactcgggaggctgatgcaggagaatcacttgaacccaggagacagaggttgcagtgagccaagatsacgccactgcactcccagctgngcacagagtgagactccatctcaaaaacaacaacaacaaaaaacttcagttcaattttaaacaacaattttgccaggcactgagcttggcaccaagggatacccaaggtgagtgggctcgtttctgaccatcagagggctcagtgtggaacccgggagtccaggtcagggtacctacagccctgcagacctccagcctcctccaagcccttcattcctctggcctttttgtccccagggctggactgatggggaaaggcagtcacaccccagctgggagaccttggtaagccacttcaccccttgagaccttggtttccatatctgtagagggagctggaacccctcatctcacagggccagaggaaggattaagtgcttgctaaatataaaggttgatggggcaaggcagccaaggacttcaacagccctgccctcctgcttctccagagaacaggctgaagaatcaaagtatcttaagccaacggacactgagaagacccccaaacacaagtgccctcgtcctttcccttccacacaggtccccaacggtgtcctcacaaggcccagtgtactcacatgacagccatgccctttaccctgtgctgggcaccaggggagagtggacagaggaggggcgggcacagagacaggggcttccccgtccccaaagagggaagtatttggatcattatttctcttgctgcaagagccaagtaaagtcgctgacctctcctctccagcaatggttttctgcttcactgacatcataaaggggaagacggagtttggagcgtgggcagggagtgccctggagctggcagaaagtggcaaagaggctccgagggagagaggggagggagcaagctggaggcctggcagccaagggaggttctttctgactccccgaattgaggcttactgccaaaagaaggggactaatcaaagtccttgtctctgcacgagcagggggcagcacacactaggtctctggggttccccggaatggagccgggggctttggggagtgggcagagcctgctgccaccaagaagccagtttccttagacttagctcagagctggaaggaacctcgcaaaccatctagtgtttggatcacattcttatttttacacgcacgcacacacacacacacacacacacacacacacacacacacacgtattataaataccgggtctgtctatgttgtccaggctggtctcaaactcctggactcaagagatcctcctgcctcagcctcccaaagtgctgggatcataggtgtgagctggatcccattctacagattagtacagattagaaagccaaggcccctggtggggagagcctggcccagaaattccacattgtctacatcaagcttcctgcaagggacacagccagctacagggcacctctcgaaatacccagttcatgtttcaaacttaaagatttcttctcaccactcgcctccgctctgcagagcagcaggaaatccagttaggggtgcttctaacccactctctgtggctgtgattcaatgtattttccctgcctccacgcctcatgttgtcaggggttcctggaaacatctcctctaggcggatgtgttttcccagaggagctgggcgaggactgggggatgtattcctaaccaagaactcggctctgcctgccagagccactcccaccctggctccctcttccctcaaccgtagcctctcaaagagaggagccccttggctttttatctcctccaatacttcgccccgccttgtataaaaatgctaggaaatatttgc

SEQ ID NO: 60129 - DNA, 3248 bp, Homo sapiens
  misc_feature (1)...(3248): n = A,T,C or G
aaggcagcctcagtccctgccctgacgtgggccctgctcactactaggaaaggaccatggagcccaggtccttgaggctaaagagacccaggcgtgagagcacaggctaagggggcagtgttggctaagacggccagaggctttcatgcacggacccatgtttcttagctgctcaacagagtcaggcccagagaaggaggaaagcctaatgcttgctcgtttggtgaccagatggtgagttggtggctgctgtctgtctcctctgctgagtgctgaggacggggcagaaggtggcctcaggcagcctggctattttccccacactctggagctggccaggccctcgtctctctctgatgatggcatcctgcccagctctttgtcccaggtccacgggtagggatactcacgaggccaggagacacttggagcgcttggccagtcccaggcaggcaatgaggcagatgaccaggtccaggataaagagcaggaggtaggagagccacctgggtagaggggcagggatggtcaggagcagcagggtggaacttctgacctgctggccacgtgagaggctgcacggcagccctgggacacactggaccctctactatggacatgctgcccagagccagcaagcacccagcatgcgtgggctgaagcctcgggagctgcacccccactgctgcctggacaaagctgtcaattcacaccccctgccttcacctctaggctgagtgtcaaaaccagcactgtgcactagaactttccccagtggaggagctgttctaaatccctgctgtccactctcttctttgccactacccacaggtggctaccgagaacttgaaatatgcttgtgcaactgaagaaatacattttaaactttacttaattttaattaatttcaatagccacacatggctggggctaccaccctggacagcacagctctgaagtgtctttctgcggcctcccagcaggcatcgcctaggaccctgcttccctttgcttctagaactctcagacagcatcagaccagccaaggcctgatgtttatagccacagatctaacacagcccctaaggtgcctgcctctttgacaaacactcagcctggctccccaaggcctcccatcttgcccccttgctggatgggatccataacttaagacttttaggttcaggacaggcgcagtggctcacgcctgtaatcccagcactttgggaggccaagacgggcagatcacttgaggccaggagttcgagaccagcctggccaacgtggtgaaacctcatctctacaaaatatacaaaaattagccaggtgtggtggcgggcacctgtagtcccagctactcgggaggctgatgcaggagaatcacttgaacccaggagacagaggttgcagtgagccaagatcrcgccactgcactcccagctgngcacagagtgagactccatctcaaaaacaacaacaacaaaaaacttcagttcaattttaaacaacaattttgccaggcactgagcttggcaccaagggatacccaaggtgagtgggctcgtttctgaccatcagagggctcagtgtggaacccgggagtccaggtcagggtacctacagccctgcagacctccagcctcctccaagcccttcattcctctggcctttttgtccccagggctggactgatggggaaaggcagtcacaccccagctgggagaccttggtaagccacttcaccccttgagaccttggtttccatatctgtagagggagctggaacccctcatctcacagggccagaggaaggattaagtgcttgctaaatataaaggttgatggggcaaggcagccaaggacttcaacagccctgccctcctgcttctccagagaacaggctgaagaatcaaagtatcttaagccaacggacactgagaagacccccaaacacaagtgccctcgtcctttcccttccacacaggtccccaacggtgtcctcacaaggcccagtgtactcacatgacagccatgccctttaccctgtgctgggcaccaggggagagtggacagaggaggggcgggcacagagacaggggcttccccgtccccaaagagggaagtatttggatcattatttctcttgctgcaagagccaagtaaagtcgctgacctctcctctccagcaatggttttctgcttcactgacatcataaaggggaagacggagtttggagcgtgggcagggagtgccctggagctggcagaaagtggcaaagaggctccgagggagagaggggagggagcaagctggaggcctggcagccaagggaggttctttctgactccccgaattgaggcttactgccaaaagaaggggactaatcaaagtccttgtctctgcacgagcagggggcagcacacactaggtctctggggttccccggaatggagccgggggctttggggagtgggcagagcctgctgccaccaagaagccagtttccttagacttagctcagagctggaaggaacctcgcaaaccatctagtgtttggatcacattcttatttttacacgcacgcacacacacacacacacacacacacacacacacacacacacgtattataaataccgggtctgtctatgttgtccaggctggtctcaaactcctggactcaagagatcctcctgcctcagcctcccaaagtgctgggatcataggtgtgagctggatcccattctacagattagtacagattagaaagccaaggcccctggtggggagagcctggcccagaaattccacattgtctacatcaagcttcctgcaagggacacagccagctacagggcacctctcgaaatacccagttcatgtttcaaacttaaagatttcttctcaccactcgcctccgctctgcagagcagcaggaaatccagttaggggtgcttctaacccactctctgtggctgtgattcaatgtattttccctgcctccacgcctcatgttgtcaggggttcctggaaacatctcctctaggcggatgtgttttcccagaggagctgggcgaggactgggggatgtattcctaaccaagaactcggctctgcctgccagagccactcccaccctggctccctcttccctcaaccgtagcctctcaaagagaggagccccttggctttttatctcctccaatacttcgccccgccttgtataaaaatgctaggaaatatttgc

SEQ ID NO: 60130 - DNA, 3248 bp, Homo sapiens
  misc_feature (1)...(3248): n = A,T,C or G
aaggcagcctcagtccctgccctgacgtgggccctgctcactactaggaaaggaccatggagcccaggtccttgaggctaaagagacccaggcgtgagagcacaggctaagggggcagtgttggctaagacggccagaggctttcatgcacggacccatgtttcttagctgctcaacagagtcaggcccagagaaggaggaaagcctaatgcttgctcgtttggtgaccagatggtgagttggtggctgctgtctgtctcctctgctgagtgctgaggacggggcagaaggtggcctcaggcagcctggctattttccccacactctggagctggccaggccctcgtctctctctgatgatggcatcctgcccagctctttgtcccaggtccacgggtagggatactcacgaggccaggagacacttggagcgcttggccagtcccaggcaggcaatgaggcagatgaccaggtccaggataaagagcaggaggtaggagagccacctgggtagaggggcagggatggtcaggagcagcagggtggaacttctgacctgctggccacgtgagaggctgcacggcagccctgggacacactggaccctctactatggacatgctgcccagagccagcaagcacccagcatgcgtgggctgaagcctcgggagctgcacccccactgctgcctggacaaagctgtcaattcacaccccctgccttcacctctaggctgagtgtcaaaaccagcactgtgcactagaactttccccagtggaggagctgttctaaatccctgctgtccactctcttctttgccactacccacaggtggctaccgagaacttgaaatatgcttgtgcaactgaagaaatacattttaaactttacttaattttaattaatttcaatagccacacatggctggggctaccaccctggacagcacagctctgaagtgtctttctgcggcctcccagcaggcatcgcctaggaccctgcttccctttgcttctagaactctcagacagcatcagaccagccaaggcctgatgtttatagccacagatctaacacagcccctaaggtgcctgcctctttgacaaacactcagcctggctccccaaggcctcccatcttgcccccttgctggatgggatccataacttaagacttttaggttcaggacaggcgcagtggctcacgcctgtaatcccagcactttgggaggccaagacgggcagatcacttgaggccaggagttcgagaccagcctggccaacgtggtgaaacctcatctctacaaaatatacaaaaattagccaggtgtggtggcgggcacctgtagtcccagctactcgggaggctgatgcaggagaatcacttgaacccaggagacagaggttgcagtgagccaagatcacgccaytgcactcccagctgngcacagagtgagactccatctcaaaaacaacaacaacaaaaaacttcagttcaattttaaacaacaattttgccaggcactgagcttggcaccaagggatacccaaggtgagtgggctcgtttctgaccatcagagggctcagtgtggaacccgggagtccaggtcagggtacctacagccctgcagacctccagcctcctccaagcccttcattcctctggcctttttgtccccagggctggactgatggggaaaggcagtcacaccccagctgggagaccttggtaagccacttcaccccttgagaccttggtttccatatctgtagagggagctggaacccctcatctcacagggccagaggaaggattaagtgcttgctaaatataaaggttgatggggcaaggcagccaaggacttcaacagccctgccctcctgcttctccagagaacaggctgaagaatcaaagtatcttaagccaacggacactgagaagacccccaaacacaagtgccctcgtcctttcccttccacacaggtccccaacggtgtcctcacaaggcccagtgtactcacatgacagccatgccctttaccctgtgctgggcaccaggggagagtggacagaggaggggcgggcacagagacaggggcttccccgtccccaaagagggaagtatttggatcattatttctcttgctgcaagagccaagtaaagtcgctgacctctcctctccagcaatggttttctgcttcactgacatcataaaggggaagacggagtttggagcgtgggcagggagtgccctggagctggcagaaagtggcaaagaggctccgagggagagaggggagggagcaagctggaggcctggcagccaagggaggttctttctgactccccgaattgaggcttactgccaaaagaaggggactaatcaaagtccttgtctctgcacgagcagggggcagcacacactaggtctctggggttccccggaatggagccgggggctttggggagtgggcagagcctgctgccaccaagaagccagtttccttagacttagctcagagctggaaggaacctcgcaaaccatctagtgtttggatcacattcttatttttacacgcacgcacacacacacacacacacacacacacacacacacacacacgtattataaataccgggtctgtctatgttgtccaggctggtctcaaactcctggactcaagagatcctcctgcctcagcctcccaaagtgctgggatcataggtgtgagctggatcccattctacagattagtacagattagaaagccaaggcccctggtggggagagcctggcccagaaattccacattgtctacatcaagcttcctgcaagggacacagccagctacagggcacctctcgaaatacccagttcatgtttcaaacttaaagatttcttctcaccactcgcctccgctctgcagagcagcaggaaatccagttaggggtgcttctaacccactctctgtggctgtgattcaatgtattttccctgcctccacgcctcatgttgtcaggggttcctggaaacatctcctctaggcggatgtgttttcccagaggagctgggcgaggactgggggatgtattcctaaccaagaactcggctctgcctgccagagccactcccaccctggctccctcttccctcaaccgtagcctctcaaagagaggagccccttggctttttatctcctccaatacttcgccccgccttgtataaaaatgctaggaaatatttgc

SEQ ID NO: 60131 - DNA, 3248 bp, Homo sapiens
  misc_feature (1)...(3248): n = A,T,C or G
aaggcagcctcagtccctgccctgacgtgggccctgctcactactaggaaaggaccatggagcccaggtccttgaggctaaagagacccaggcgtgagagcacaggctaagggggcagtgttggctaagacggccagaggctttcatgcacggacccatgtttcttagctgctcaacagagtcaggcccagagaaggaggaaagcctaatgcttgctcgtttggtgaccagatggtgagttggtggctgctgtctgtctcctctgctgagtgctgaggacggggcagaaggtggcctcaggcagcctggctattttccccacactctggagctggccaggccctcgtctctctctgatgatggcatcctgcccagctctttgtcccaggtccacgggtagggatactcacgaggccaggagacacttggagcgcttggccagtcccaggcaggcaatgaggcagatgaccaggtccaggataaagagcaggaggtaggagagccacctgggtagaggggcagggatggtcaggagcagcagggtggaacttctgacctgctggccacgtgagaggctgcacggcagccctgggacacactggaccctctactatggacatgctgcccagagccagcaagcacccagcatgcgtgggctgaagcctcgggagctgcacccccactgctgcctggacaaagctgtcaattcacaccccctgccttcacctctaggctgagtgtcaaaaccagcactgtgcactagaactttccccagtggaggagctgttctaaatccctgctgtccactctcttctttgccactacccacaggtggctaccgagaacttgaaatatgcttgtgcaactgaagaaatacattttaaactttacttaattttaattaatttcaatagccacacatggctggggctaccaccctggacagcacagctctgaagtgtctttctgcggcctcccagcaggcatcgcctaggaccctgcttccctttgcttctagaactctcagacagcatcagaccagccaaggcctgatgtttatagccacagatctaacacagcccctaaggtgcctgcctctttgacaaacactcagcctggctccccaaggcctcccatcttgcccccttgctggatgggatccataacttaagacttttaggttcaggacaggcgcagtggctcacgcctgtaatcccagcactttgggaggccaagacgggcagatcacttgaggccaggagttcgagaccagcctggccaacgtggtgaaacctcatctctacaaaatatacaaaaattagccaggtgtggtggcgggcacctgtagtcccagctactcgggaggctgatgcaggagaatcacttgaacccaggagacagaggttgcagtgagccaagatcacgccactgcactcccagctgngcacagagtgagactccatctcaaaaacaacaacaacaaaaaacttcagttcaattttaaacaacaattttgccaggcactgagcttggcaccaagggatacccaaggtgagtgggctcgtttctgaccatcagagggctcagtgtggaacccgggagtccaggtcagggtacctacagccctgcagacctccagcctcctccaagcccttcattcctctggcctttttgtccccagggctggactgatggggaaaggcagtcacaccccagctgggagaccttggtaagccacttcaccccttgagaccttggtttccatatctgtagagggagctggaacccctcatctcacagggccagaggaaggattaagtgcttgctaaatataaaggttgatggggcaaggcagccaaggacttcaacagccctgccctcctgcttctccagagaacaggctgaagaatcaaagtatcttaagccaacggacactgagaagacccccaaacacaagtgccctcgtcctttcccttccacacaggtccccaacggtgtcctcacaaggcccagtgtactcacatgacagccatgccctttaccctgtgctgggcaccaggggagagtggacagaggaggggcgggcacagagacaggggcttccccgtccccaaagagggaagtatttggatcattatttctcttgctgcaagagccaagtaaagtcgctgacctctcctctccagcaatggttttctgcttcactgacatcataaaggggaagacggagtttggagcgtgggcagggagtgccctggagctggcagaaagtggcaaagaggctccgagggagagaggggagggagcaagctggaggcctggcagccaagggaggttctttctgactccccgaattgaggcttactgccaaaagaaggggactaatcaaagtccttgtctctgcacgagcagggggcagcacacactaggtctctggggttccccggaatggagccgggggctttggggagtgggcagagcctgctgccaccaagaagccagtttccttagacttagctcagagctggaaggaacctcgcaaaccatctagtgtttggatcacattcttatttttacacgcacgyacacacacacacacacacacacacacacacacacacacacgtattataaataccgggtctgtctatgttgtccaggctggtctcaaactcctggactcaagagatcctcctgcctcagcctcccaaagtgctgggatcataggtgtgagctggatcccattctacagattagtacagattagaaagccaaggcccctggtggggagagcctggcccagaaattccacattgtctacatcaagcttcctgcaagggacacagccagctacagggcacctctcgaaatacccagttcatgtttcaaacttaaagatttcttctcaccactcgcctccgctctgcagagcagcaggaaatccagttaggggtgcttctaacccactctctgtggctgtgattcaatgtattttccctgcctccacgcctcatgttgtcaggggttcctggaaacatctcctctaggcggatgtgttttcccagaggagctgggcgaggactgggggatgtattcctaaccaagaactcggctctgcctgccagagccactcccaccctggctccctcttccctcaaccgtagcctctcaaagagaggagccccttggctttttatctcctccaatacttcgccccgccttgtataaaaatgctaggaaatatttgc

SEQ ID NO: 60132 - DNA, 3248 bp, Homo sapiens
  misc_feature (1)...(3248): n = A,T,C or G
aaggcagcctcagtccctgccctgacgtgggccctgctcactactaggaaaggaccatggagcccaggtccttgaggctaaagagacccaggcgtgagagcacaggctaagggggcagtgttggctaagacggccagaggctttcatgcacggacccatgtttcttagctgctcaacagagtcaggcccagagaaggaggaaagcctaatgcttgctcgtttggtgaccagatggtgagttggtggctgctgtctgtctcctctgctgagtgctgaggacggggcagaaggtggcctcaggcagcctggctattttccccacactctggagctggccaggccctcgtctctctctgatgatggcatcctgcccagctctttgtcccaggtccacgggtagggatactcacgaggccaggagacacttggagcgcttggccagtcccaggcaggcaatgaggcagatgaccaggtccaggataaagagcaggaggtaggagagccacctgggtagaggggcagggatggtcaggagcagcagggtggaacttctgacctgctggccacgtgagaggctgcacggcagccctgggacacactggaccctctactatggacatgctgcccagagccagcaagcacccagcatgcgtgggctgaagcctcgggagctgcacccccactgctgcctggacaaagctgtcaattcacaccccctgccttcacctctaggctgagtgtcaaaaccagcactgtgcactagaactttccccagtggaggagctgttctaaatccctgctgtccactctcttctttgccactacccacaggtggctaccgagaacttgaaatatgcttgtgcaactgaagaaatacattttaaactttacttaattttaattaatttcaatagccacacatggctggggctaccaccctggacagcacagctctgaagtgtctttctgcggcctcccagcaggcatcgcctaggaccctgcttccctttgcttctagaactctcagacagcatcagaccagccaaggcctgatgtttatagccacagatctaacacagcccctaaggtgcctgcctctttgacaaacactcagcctggctccccaaggcctcccatcttgcccccttgctggatgggatccataacttaagacttttaggttcaggacaggcgcagtggctcacgcctgtaatcccagcactttgggaggccaagacgggcagatcacttgaggccaggagttcgagaccagcctggccaacgtggtgaaacctcatctctacaaaatatacaaaaattagccaggtgtggtggcgggcacctgtagtcccagctactcgggaggctgatgcaggagaatcacttgaacccaggagacagaggttgcagtgagccaagatcacgccactgcactcccagctgngcacagagtgagactccatctcaaaaacaacaacaacaaaaaacttcagttcaattttaaacaacaattttgccaggcactgagcttggcaccaagggatacccaaggtgagtgggctcgtttctgaccatcagagggctcagtgtggaacccgggagtccaggtcagggtacctacagccctgcagacctccagcctcctccaagcccttcattcctctggcctttttgtccccagggctggactgatggggaaaggcagtcacaccccagctgggagaccttggtaagccacttcaccccttgagaccttggtttccatatctgtagagggagctggaacccctcatctcacagggccagaggaaggattaagtgcttgctaaatataaaggttgatggggcaaggcagccaaggacttcaacagccctgccctcctgcttctccagagaacaggctgaagaatcaaagtatcttaagccaacggacactgagaagacccccaaacacaagtgccctcgtcctttcccttccacacaggtccccaacggtgtcctcacaaggcccagtgtactcacatgacagccatgccctttaccctgtgctgggcaccaggggagagtggacagaggaggggcgggcacagagacaggggcttccccgtccccaaagagggaagtatttggatcattatttctcttgctgcaagagccaagtaaagtcgctgacctctcctctccagcaatggttttctgcttcactgacatcataaaggggaagacggagtttggagcgtgggcagggagtgccctggagctggcagaaagtggcaaagaggctccgagggagagaggggagggagcaagctggaggcctggcagccaagggaggttctttctgactccccgaattgaggcttactgccaaaagaaggggactaatcaaagtccttgtctctgcacgagcagggggcagcacacactaggtctctggggttccccggaatggagccgggggctttggggagtgggcagagcctgctgccaccaagaagccagtttccttagacttagctcagagctggaaggaacctcgcaaaccatctagtgtttggatcacattcttatttttacacgcacgcacacrcacacacacacacacacacacacacacacacacacgtattataaataccgggtctgtctatgttgtccaggctggtctcaaactcctggactcaagagatcctcctgcctcagcctcccaaagtgctgggatcataggtgtgagctggatcccattctacagattagtacagattagaaagccaaggcccctggtggggagagcctggcccagaaattccacattgtctacatcaagcttcctgcaagggacacagccagctacagggcacctctcgaaatacccagttcatgtttcaaacttaaagatttcttctcaccactcgcctccgctctgcagagcagcaggaaatccagttaggggtgcttctaacccactctctgtggctgtgattcaatgtattttccctgcctccacgcctcatgttgtcaggggttcctggaaacatctcctctaggcggatgtgttttcccagaggagctgggcgaggactgggggatgtattcctaaccaagaactcggctctgcctgccagagccactcccaccctggctccctcttccctcaaccgtagcctctcaaagagaggagccccttggctttttatctcctccaatacttcgccccgccttgtataaaaatgctaggaaatatttgc

SEQ ID NO: 60133 - DNA, 3248 bp, Homo sapiens
  misc_feature (1)...(3248): n = A,T,C or G
aaggcagcctcagtccctgccctgacgtgggccctgctcactactaggaaaggaccatggagcccaggtccttgaggctaaagagacccaggcgtgagagcacaggctaagggggcagtgttggctaagacggccagaggctttcatgcacggacccatgtttcttagctgctcaacagagtcaggcccagagaaggaggaaagcctaatgcttgctcgtttggtgaccagatggtgagttggtggctgctgtctgtctcctctgctgagtgctgaggacggggcagaaggtggcctcaggcagcctggctattttccccacactctggagctggccaggccctcgtctctctctgatgatggcatcctgcccagctctttgtcccaggtccacgggtagggatactcacgaggccaggagacacttggagcgcttggccagtcccaggcaggcaatgaggcagatgaccaggtccaggataaagagcaggaggtaggagagccacctgggtagaggggcagggatggtcaggagcagcagggtggaacttctgacctgctggccacgtgagaggctgcacggcagccctgggacacactggaccctctactatggacatgctgcccagagccagcaagcacccagcatgcgtgggctgaagcctcgggagctgcacccccactgctgcctggacaaagctgtcaattcacaccccctgccttcacctctaggctgagtgtcaaaaccagcactgtgcactagaactttccccagtggaggagctgttctaaatccctgctgtccactctcttctttgccactacccacaggtggctaccgagaacttgaaatatgcttgtgcaactgaagaaatacattttaaactttacttaattttaattaatttcaatagccacacatggctggggctaccaccctggacagcacagctctgaagtgtctttctgcggcctcccagcaggcatcgcctaggaccctgcttccctttgcttctagaactctcagacagcatcagaccagccaaggcctgatgtttatagccacagatctaacacagcccctaaggtgcctgcctctttgacaaacactcagcctggctccccaaggcctcccatcttgcccccttgctggatgggatccataacttaagacttttaggttcaggacaggcgcagtggctcacgcctgtaatcccagcactttgggaggccaagacgggcagatcacttgaggccaggagttcgagaccagcctggccaacgtggtgaaacctcatctctacaaaatatacaaaaattagccaggtgtggtggcgggcacctgtagtcccagctactcgggaggctgatgcaggagaatcacttgaacccaggagacagaggttgcagtgagccaagatcacgccactgcactcccagctgngcacagagtgagactccatctcaaaaacaacaacaacaaaaaacttcagttcaattttaaacaacaattttgccaggcactgagcttggcaccaagggatacccaaggtgagtgggctcgtttctgaccatcagagggctcagtgtggaacccgggagtccaggtcagggtacctacagccctgcagacctccagcctcctccaagcccttcattcctctggcctttttgtccccagggctggactgatggggaaaggcagtcacaccccagctgggagaccttggtaagccacttcaccccttgagaccttggtttccatatctgtagagggagctggaacccctcatctcacagggccagaggaaggattaagtgcttgctaaatataaaggttgatggggcaaggcagccaaggacttcaacagccctgccctcctgcttctccagagaacaggctgaagaatcaaagtatcttaagccaacggacactgagaagacccccaaacacaagtgccctcgtcctttcccttccacacaggtccccaacggtgtcctcacaaggcccagtgtactcacatgacagccatgccctttaccctgtgctgggcaccaggggagagtggacagaggaggggcgggcacagagacaggggcttccccgtccccaaagagggaagtatttggatcattatttctcttgctgcaagagccaagtaaagtcgctgacctctcctctccagcaatggttttctgcttcactgacatcataaaggggaagacggagtttggagcgtgggcagggagtgccctggagctggcagaaagtggcaaagaggctccgagggagagaggggagggagcaagctggaggcctggcagccaagggaggttctttctgactccccgaattgaggcttactgccaaaagaaggggactaatcaaagtccttgtctctgcacgagcagggggcagcacacactaggtctctggggttccccggaatggagccgggggctttggggagtgggcagagcctgctgccaccaagaagccagtttccttagacttagctcagagctggaaggaacctcgcaaaccatctagtgtttggatcacattcttatttttacacgcacgcacacacacacacacacacacacacacacacacacacacacgtattataaataccgggtctgtctatgttgtccaggctggtctcaaactcctggactcaagagatcctcctgcctcagcctcccaaagtgctgggatcataggtgtgagctggatcccattctacagattagtacagattagaaagccaaggcccctggtggggagagcctggcccagaaattccacattgtctacatcaagcttcctgcaagggacacagccagctacagggcacctctcgaaatacccagttcatgtttcaaacttaaagatttcttctcaccactcgcctccgctctgcagagcagcaggaaatccagttaggggtgcttctaacccactctctgtggctgtgattcaatgtattttccctgcctccacgcctcatgttgtcaggggttcctggaaacatctcctctaggcggatgtgttttcccagaggagctgggcgaggactgggggatgtattcctaaccaagaactcggctctgcctgccagagccactcccacccyggctccctcttccctcaaccgtagcctctcaaagagaggagccccttggctttttatctcctccaatacttcgccccgccttgtataaaaatgctaggaaatatttgc

SEQ ID NO: 60134 - DNA, 763 bp, Homo sapiens
ctcagggatctgcttgcttcaaaacacccactgttctgggtcccgaccttttctccgagccatcagtggctgtgagatctggcttcactctgtcccctgtcttcaatgtgatctggggcaagacatttactttttcttggcccatctttaaaatatgaaggatcactgtgctgctgtaagctcacaggaatggtgagagtcgagaggcttggggccacctgttggagatcccagtctgctgtctggaacactggacatgagttgaattctgagttacatcaactcatactttacaggcatccttcaggaaatccttccataaagccagtgctctttttgcaatgaaaatatcctgcttctgatttctctgctggacattggaacttttctcatagcatagcaaaaccatgtcattaagtctccatagagcccttgctgtaagcccagatctgtgctggcctaatctgatagaattctctagtgagtatgttacagtcaccamacatttattaggggcctgatatattcaggggatgcagaaagaccttgctctagagggcctctctaacatgggttcccttttgcttcattgtgaatcaggatgtcagagctagcaaaggccttttgacaccctaaacaaagtaaaatggcaagctgtagtttgggagaagatatttgcaatacctgcaatctataaggattaatatccagaatatatttttaatcctacaaatcaataagatgaaacccaattcaaacacta

SEQ ID NO: 60135 - DNA, 1195 bp, Homo sapiens
agggaaaggtgagacttgagaccaaggtgggttcatattcataagtggggacaccgagacactacctctccatccctggtgacaggcccatgtttcctggagaagctggcagtgcccatgaggggctgagagctggaagagcaggtgggcaaggtggtgctagagctcctggmatgaaaacccaggaagtaggaggagaggcgccgaggctggggccttggaacctggagctgggcaggtgggaggggtgaagggcggtgctgctgcatctgcctgcacaccctgccccccgccccatggcaggccattgtgccactcaatgcctatgattgctttcaggctgggagccaggcactgatgaagagcatctgggcagcagccgggtggggagggagccagccctgctccccttcttatcctaccctcccagggtcagcggtctgtcttgctgcgaacggagctgggagcttgtttctggctcccaggaagaagggggaagtgggtctggggctccctggggatgaccctcccacagctactgggagctcttgtctgctggaaacaagagtcaaccagagctaatgacctgttcttcctgggagaagtctttgctctaggaagcaggaagggaaactgaggactccttagaagatcaggagactgggatttctcctatcatttcagaatctagggatatcagcctggaaggagatgtagggattgtctggtgtggtgagcttccttgacagattaagaaacccaggcccagagatggggagggatctgtccgtgactggtggcagagtggaacttggagccagtgtcccaaccccacactcagggttctctccctcatccccaccttcccttgggtgcactgtctaaattccccccgaggtggctcagccccacgtggctcagggagaaggcagggatcgtttgtgtgtgccgaggaagaaggttgtgttggtcctctctttgctctgtcctcccttctggtctagggaggagtctgaggggcaggagacatttctggggactttggtcagggctttgtggctttccgcatgcagcctgtgttttagggttagggttagggggtgtctcagctggtcaggacactcctctcctactcagggaattccaagtagttcaaaggtgggaggtgggacactcctgaaatattctgaatgca

SEQ ID NO: 60136 - DNA, 576 bp, Homo sapiens
ccataatgtaaagcatgttgacccctctcaaacttttggaagaactgagacttcagaggtccacacagtgcctcacatggagaaatcactccataaactaagctaatgctgaattttcttcttcctcttcttcttcctcttcttcttcttcttcctcttcctcttcttcttcttcttcctcttcctcttcctccttctcgtcctcctcctcttcttcttcttcttcctattattttttgagacagactctcgctgtcacccttgctggagtgcagtggggtgatctcagatcatttcaacctccgcctcccmggttcaagcaattctcctgcctcagcctccaaagtagcggtaactacaggcatgcgccaccatgcccaactaatttttgtatttttagtggagacggggtttcaccatgttggccaggctggtcttgaactcctgacctcaagtgatctgcccaactaggcctcccaaagtgctgggattacaggtgtgagccaccgtgcccagccgatcttattattttttaaatcacaattaacaggtgagggatgaatgaatgattttgtt

SEQ ID NO: 60137 - DNA, 675 bp, Homo sapiens
agttaggaaagctgagaagtcccacactctgccatctgcaggctggagaacgaggagagctggtagtgtaattcagttttaagtccaaaggcctgagaatcaggggtgctgagggccaaaggcagaagatggatgtcctagctcaagacagaaagagcaaattcactcttcctctgcctttttgttctactggagccctcagtggactgcatgatgcccgcccacactggtgagggtgattttttctttactcagtccaccaattcagttgctaacctcctgcagaaacagcctcatagacactccttgaaagaatattttaccaactatctgggcatcccttagtctcatcaactagtcacatgaaattaaccatcacacccttcaagactcatttttwaaaaaaaaaaatgttccccttttgaaggtgaattatttttctaattgatgcaaaaataggttatgctagattgtaaaaatgattccaaatatacatctagatatttttaataataaattagctattgctttcatccaaaccatgtgttcttgatcataaactttgaaagttcttctaccctggtatcctctggggttaatagcaactccatgactccagactcagatgaaagctggcaatcattaagtgaaaaaaaagatggtcaatgtctcaaa

SEQ ID NO: 60138 - DNA, 1105 bp, Homo sapiens
tccagtcagaagcaggaccagcatgcccagagccaatcacagtcatcagtttgctgctgcagagagggtcacgtgcctgcccggcaacgtgctaagcccttgattcatgtccctcttgttccactaggcaacggtacagtgttaattggaaaagcaaaggagagtgctgctgccgccgccttgaatgtcattttccctgacactccaccaggccatggtggagtggcaattagagaagactgggagggaagggcagctcccacaggccagtgctctgcctcaagccaagtgaacaagggaaggaaatgcagtatttcttccccattggcagccaaggaaaactctgtaaaaacggaccatgaaaaggtaagtgccacacaaggggagtagctacgggggtacatggggacctagagagagctaatggagcaataatgggaatagaaggcttgacatgcagcacatgtcccgcgctcactgtgagcctctggacacctgcggtgtcatgaagggaacacagcacatcagggccaacaccttggagcagccgccaggagggactgacgccagagacatggtttacagctagctcgtatttacaaaaagctttcaacatagagtatatgtggcatgtatacacaatggatactactcagccattaaaaagaatgaaatctggtcatttgcagcaacatggatgaaccaggaggacattctgtcaagcggaataagccaggcacagaacgagaaacactccatgtcctcactcacttgtggaatctataaacattgagctcatagacggacagggtggaatatgggttaccagaggccgagaagggtaggcagaggagacaatggggagagagattggtgaacacgtacacaagtacagttagatgggaagatgggaggaataagttccagtgttctatggcacagcacggtgactatagaaagtaatgttacygtgcgtatttcaacagaagaagattctgaatgttctcaccacaaaagaaaatgtcgaggtaatgattatgctaagtactatgatcatgacataacgtatacatgtatcaaaacatcatgctatttcccacagaaa

SEQ ID NO: 60139 - DNA, 967 bp, Homo sapiens
accagcttggacatgcctgatagttttcttagctccaagaacagttgtgaatttccaggttccttgcctgtgatgtaggccgatggcatcctctactcaggtagacttcctggcctcctggtccaggagagggaatgctgtcagctggttaccagcttcaaacggcctcccagaaggtcccttctcttgactcttattttctttctcaggggtagctgagtacttactacacgcctagggacactgtcataagcaaggagcaacattcatgctcacaggccaattacagggatgtacatgtgctcacagggagctggcctggcaggggcggggctagctgagggaccccaggagggtctcagaggagtcctgaggtttttggcctcaagcaaggggacctcagcagagaccccaatgcactgacaaaagtaaagtcaatacataaaaaagaatgcagagcaatgtcagtgccctcctrttgggagtgggggaagcattccaaggtgacttcttcccaggggcatgcacaccaggactcccatgtgagcgccatgtggcctgcactgtgcaccttccccagggtgtgctgggcaccgaatccgtgatggccagcagagcagcccagctcctgccctcagatcgcccatcacttatggactcaataaaataataacaaaaacacaggtacaaccccaacaatggcaactgacacagagagatataagaccctgaagtcctgccatcagagggtggaccctgtctgggagatcagcaagatgccactgtccaagctgagacctcaggatgtgagagagaatgaagcacagccagatgggaacggaaggaggatcagcacctgcaaaggtcctgtggtgagaaggccgacatgacaaaaccaggttgaaacaaccgcaaggctgaagcccaagctggaggtgcaccagctgggccatgagttagctggtgt

SEQ ID NO: 60140 - DNA, 967 bp, Homo sapiens
accagcttggacatgcctgatagttttcttagctccaagaacagttgtgaatttccaggttccttgcctgtgatgtaggccgatggcatcctctactcaggtagacttcctggcctcctggtccaggagagggaatgctgtcagctggttaccagcttcaaacggcctcccagaaggtcccttctcttgactcttattttctttctcaggggtagctgagtacttactacacgcctagggacactgtcataagcaaggagcaacattcatgctcacaggccaattacagggatgtacatgtgctcacagggagctggcctggcaggggcggggctagctgagggaccccaggagggtctcagaggagtcctgaggtttttggcctcaagcaaggggacctcagcagagaccccaatgcactgacaaaagtaaagtcaatacataaaaaagaatgcagagcaatgtcagtgccctcctgttgggagtgggggaagcattccaaggtgacttcttcccaggggcatgcacaccaggactcccatgtgagcgccatgtggcctgcactgtgcaccttccccagggtgtgctgggcaccgartccgtgatggccagcagagcagcccagctcctgccctcagatcgcccatcacttatggactcaataaaataataacaaaaacacaggtacaaccccaacaatggcaactgacacagagagatataagaccctgaagtcctgccatcagagggtggaccctgtctgggagatcagcaagatgccactgtccaagctgagacctcaggatgtgagagagaatgaagcacagccagatgggaacggaaggaggatcagcacctgcaaaggtcctgtggtgagaaggccgacatgacaaaaccaggttgaaacaaccgcaaggctgaagcccaagctggaggtgcaccagctgggccatgagttagctggtgt

SEQ ID NO: 60141 - DNA, 967 bp, Homo sapiens
accagcttggacatgcctgatagttttcttagctccaagaacagttgtgaatttccaggttccttgcctgtgatgtaggccgatggcatcctctactcaggtagacttcctggcctcctggtccaggagagggaatgctgtcagctggttaccagcttcaaacggcctcccagaaggtcccttctcttgactcttattttctttctcaggggtagctgagtacttactacacgcctagggacactgtcataagcaaggagcaacattcatgctcacaggccaattacagggatgtacatgtgctcacagggagctggcctggcaggggcggggctagctgagggaccccaggagggtctcagaggagtcctgaggtttttggcctcaagcaaggggacctcagcagagaccccaatgcactgacaaaagtaaagtcaatacataaaaaagaatgcagagcaatgtcagtgccctcctgttgggagtgggggaagcattccaaggtgacttcttcccaggggcatgcacaccaggactcccatgtgagcgccatgtggcctgcactgtgcaccttccccagggtgtgctgggcaccgaatccgtgatggccagcagagcagcccagctcctgccctcagatcgcccatcacttatggactcaataaaataataacaaaaacacaggtacaaccccaacaatggcaactgacacagagagatataagaccctgaagtcctgccatcagagggtggaccctgtctgggagatcagcaagatgccactgtccaagctgagacctcaggatgtgagagagaatgaagcacagccagatgggaacggaaggaggatcagcacctgcaaaggtcctgtggtgagaaggccgacatgacaaaaccaggttgaaacaacygcaaggctgaagcccaagctggaggtgcaccagctgggccatgagttagctggtgt

SEQ ID NO: 60142 - DNA, 745 bp, Homo sapiens
actcaaccctttatcttacttgtctgagcctctcagagggagatgaattaattcaccaattacaggtctcccttgagaatttgctatgtgtcacacactctaagtattgcaaacctaaaaagctgggccttataaataaaattggtacttgcaagacatggaagaaaatgatgaacaccccatctcatggatttagagcttcgaaagrcccaaagaaccaagattatggttccagatctggctaagcatcataaccatcaagaataccacagattaattttacagatggcccagacccaactcaaggcactgaatatgtctaggtttccattgaaaattacttttcatactaagaacctggaagatcccatattgaataagaagagaccaccagttgatgctaaggctgagatgacagagatgtcagaactttctgataaaggaaaaacgcaggatcataaaaatacttccatgagcagttgtaaacatgcttgaagcacacataaacaaaaacacagaaagcctcagcgaaaaaagagaaggcttaaagagaaactaagtagaatctcagaactgaaaaacacaaccaaaataagaagcttggtgaatgaattcaaaggcagaatggaggagaccgaggagagaatcagaaaacttgaagatagaacaatagaattacctagtgcagacagcagagaaaacaaaagagaagaaaaatgaacagtgcctaggaacctatgcaagg

SEQ ID NO: 60143 - DNA, 633 bp, Homo sapiens
attttgcattatgtcagaaacatgacagasaatcttacctaattctgaacacaaacagattgtattctaataattaacatgagtcttaatttatgcacacattcctagcaatagtgtcatgtccttggggatggctggaggtcaatcctcttttccaccgtttgaaagctatcatccctgaaggttccctttcctttcaaaattcaaggctgtatttattagagcatgtgttatttgtccttatcttgccagcactaagaagagaatctcaattccaaaatggaattcttgggctgccaagcccaaggaggagaaaacacaatgtgatattaatttccttagaacttaaacctgtgcatcatttaaggataacatctttaataatcaatcatcttctgtctcaagtctgactttatggtttaaaggatgtcacatgtactgtgatctcagccctgttcacggcccagtcataggagccattgctaccatacccatcggctagagaacattgttgaatctcagataatagaagccatttgaccttctaaaacacagagaggagtctggcctggaacacattttttgcccaacagttcaggagtctttcaaccaaacttgacttcccctgtatgt

SEQ ID NO: 60144 - DNA, 633 bp, Homo sapiens
attttgcattatgtcagaaacatgacagacaatcttacctaattctgaacacaaacagattgtattctaataattaacatgagtcttaatttatgcacacattcctagcaatagtgtcatgtccttggggatggctggaggtcaatcctcttttccaccstttgaaagctatcatccctgaaggttccctttcctttcaaaattcaaggctgtatttattagagcatgtgttatttgtccttatcttgccagcactaagaagagaatctcaattccaaaatggaattcttgggctgccaagcccaaggaggagaaaacacaatgtgatattaatttccttagaacttaaacctgtgcatcatttaaggataacatctttaataatcaatcatcttctgtctcaagtctgactttatggtttaaaggatgtcacatgtactgtgatctcagccctgttcacggcccagtcataggagccattgctaccatacccatcggctagagaacattgttgaatctcagataatagaagccatttgaccttctaaaacacagagaggagtctggcctggaacacattttttgcccaacagttcaggagtctttcaaccaaacttgacttcccctgtatgt

SEQ ID NO: 60145 - DNA, 633 bp, Homo sapiens
attttgcattatgtcagaaacatgacagacaatcttacctaattctgaacacaaacagattgtattctaataattaacatgagtcttaatttatgcacacattcctagcaatagtgtcatgtccttggggatggctggaggtcaatcctcttttccaccgtttgaaagctrtcatccctgaaggttccctttcctttcaaaattcaaggctgtatttattagagcatgtgttatttgtccttatcttgccagcactaagaagagaatctcaattccaaaatggaattcttgggctgccaagcccaaggaggagaaaacacaatgtgatattaatttccttagaacttaaacctgtgcatcatttaaggataacatctttaataatcaatcatcttctgtctcaagtctgactttatggtttaaaggatgtcacatgtactgtgatctcagccctgttcacggcccagtcataggagccattgctaccatacccatcggctagagaacattgttgaatctcagataatagaagccatttgaccttctaaaacacagagaggagtctggcctggaacacattttttgcccaacagttcaggagtctttcaaccaaacttgacttcccctgtatgt

SEQ ID NO: 60146 - DNA, 633 bp, Homo sapiens
attttgcattatgtcagaaacatgacagacaatcttacctaattctgaacacaaacagattgtattctaataattaacatgagtcttaatttatgcacacattcctagcaatagtgtcatgtccttggggatggctggaggtcaatcctcttttccaccgtttgaaagctatcatccctgaaggttccctttcctttcaaaattcaaggctgtatttattagagcatgtgtkatttgtccttatcttgccagcactaagaagagaatctcaattccaaaatggaattcttgggctgccaagcccaaggaggagaaaacacaatgtgatattaatttccttagaacttaaacctgtgcatcatttaaggataacatctttaataatcaatcatcttctgtctcaagtctgactttatggtttaaaggatgtcacatgtactgtgatctcagccctgttcacggcccagtcataggagccattgctaccatacccatcggctagagaacattgttgaatctcagataatagaagccatttgaccttctaaaacacagagaggagtctggcctggaacacattttttgcccaacagttcaggagtctttcaaccaaacttgacttcccctgtatgt

SEQ ID NO: 60147 - DNA, 633 bp, Homo sapiens
attttgcattatgtcagaaacatgacagacaatcttacctaattctgaacacaaacagattgtattctaataattaacatgagtcttaatttatgcacacattcctagcaatagtgtcatgtccttggggatggctggaggtcaatcctcttttccaccgtttgaaagctatcatccctgaaggttccctttcctttcaaaattcaaggctgtatttattagagcatgtgttatttgtccttatcttgccagcactaagaagagaatctcaattccaaaatggaattcttgggctgccaagcccaaggaggagaaaacacaatgtgatattaatttccttagaacttaaacctgtgcatcatttaaggataacatctttaataatcaatcatcttctgtctcaagtctgactttatggtttaaagkatgtcacatgtactgtgatctcagccctgttcacggcccagtcataggagccattgctaccatacccatcggctagagaacattgttgaatctcagataatagaagccatttgaccttctaaaacacagagaggagtctggcctggaacacattttttgcccaacagttcaggagtctttcaaccaaacttgacttcccctgtatgt

SEQ ID NO: 60148 - DNA, 633 bp, Homo sapiens
attttgcattatgtcagaaacatgacagacaatcttacctaattctgaacacaaacagattgtattctaataattaacatgagtcttaatttatgcacacattcctagcaatagtgtcatgtccttggggatggctggaggtcaatcctcttttccaccgtttgaaagctatcatccctgaaggttccctttcctttcaaaattcaaggctgtatttattagagcatgtgttatttgtccttatcttgccagcactaagaagagaatctcaattccaaaatggaattcttgggctgccaagcccaaggaggagaaaacacaatgtgatattaatttccttagaacttaaacctgtgcatcatttaaggataacatctttaataatcaatcatcttctgtctcaagtctgactttatggtttaaaggatgtcacatgtactgtgatctcagccctgttcacggcccagtcataggagccattgctaccatacccatcggctagagaacattgtygaatctcagataatagaagccatttgaccttctaaaacacagagaggagtctggcctggaacacattttttgcccaacagttcaggagtctttcaaccaaacttgacttcccctgtatgt

SEQ ID NO: 60149 - DNA, 2667 bp, Homo sapiens
ggagaggttgtgtgtaagtcaggacaggagtgagtacatgagaactctactttctcttcaatgttgcctacaactgctctacaacataaattttatagatttaaaaaatgaatgaactgcttatatatgcaccgatattgatgaatctcaaataattatggttagtggaagaatccaggcataaaaaagtacatacaaattatttcatttgtgtaaactctagagaagaaagtaatctgtagggacaggaagtgtgtatctcctgaagatagggaggaaggaagaggtgagaaggagaaatcatacatggccttacagaaacgtttgggggtgatggctaagttcactatcttaattgtggtgataattccacgtatgcatgaaaatgtcaaaactcaatgcttaattatgtgtcttttattttctgtcaattacatatcaacaaaactgtaagaatgtgctaatgcacactgtggagtgtcaacagcaattaaacgtaacatggctggatcctgaaaacatagtgctaaatacatagtctaagaaacaatatgaaaaagaagaaggaattaaaatacaatgcaatagtgacagctgagttagtaagggatacaaattgtgtktttctaatgtatgtacattccaggaaagaagtacaaattaattattaagtactgaagtctgcatattatagtttctagggaacaatgaagtaataaaaatagaatgcaaaacttaaaaacaaaatgtgggagggtaatgaaatgaacttctaaaaaattatacaaaacaagtcacattttagttggtgtttctgttaagcagatcacaaggtgaagatttgggtgaatgtagttcgctagcgacctggggaaactgcaggaaaaagtgcaagttgggggttgctattgaaacaaccatttccctgctcttctcaccttccctgcacaaggaaaagcaagcaccttcgggtgcaataaatctcctgagacaaaaatacaaaagaagatttcaaacaattttatgattacacttagaaaatatgagcgtaaattattgtaaaataatatttatttctaagtttggactaagacatttaatattttagaaatattgatttcaaagttatttaaattagaaaaataattcctattattcaataaattagcagattttaaaaagcaaataacattgataacatctgaaaagggttaggtaaacagcatgtttaagataaatatccataaacaaattgaaaggtaaaatcatctgctggatagtatctatggaaaacttaaagaaaacatcatacttgctatgtgcaggggtgcaccgtcgacttccccacttttgaggtttggggactcagactggcttccttgctcctcagcttgcagatggtctattgtgggacttcaccttgtgatcatgtgagtcaatactccttaatgaactcatatatatatatatatatatatatatatatatatattcttatctaatatgtatatatcttattagttctgttcctttagagagccatgactaatacaaatagtaacatggaaacacttactttcctaactggataaattatctatttttaagcaataataactaaaatagcatggatttggttcagagaaaaacaaaaataacaaaatagattaaaatataagatacaaaccaacgcatatatgtgcacaatatatgataatggtgacactgcaacccagtgagggaattacatttgtaaataaataataatgataaaaatttgttctccttataaaataacatgaaattcgactattgctttacatcataaacagcagcataaaagatacggtttgcctgcttccccacccaaatctcaccttgaattgtagctcccacagttcagttcccacatatcgtgggagggatccagtgggagataatcgaatcatgggggtgggtcattccatgctattcttgtgatagtgaataagtttcacgagatctgatggttttataaatgggagattgcctgcacaagttctcttgcctgcgccaggtaagacatgattttgctcctcattcacattccaccatgattaggaggccttcccagctgggcggaactgtgagtcaattaaacctctttccagccgggcgcagtggctcacgcctgtaatcccagcactttgggaggctgaggcgggtggatcacgaggtcaggagtcgagaccatcctggctaacacggtgaaaccccatctctactaaaaatacaaaaaattagccaggcgtggtggcgggcgcctgtagtcccagctactcgggaggctgaggcaggagaatggcgggaacccgggaggcggagctcgcagtgagccgagatcacaccactgcactccagcctggcgacagagcgagactccgtctcaaaacaaacaaacaaacaaaaacaaaaaacctctttcctttataaattacccagtcatgggtatggctttattagcagcgtgagaacagactaatgcaataaacagagacataaagacaaatatccttcacagcattctttaatatttggcctatatatatatatttttttttatgttcaagtcttacaattcattaataaaaatgaactatgcaatccgtgaagagttattgaataact

SEQ ID NO: 60150 - DNA, 2667 bp, Homo sapiens
ggagaggttgtgtgtaagtcaggacaggagtgagtacatgagaactctactttctcttcaatgttgcctacaactgctctacaacataaattttatagatttaaaaaatgaatgaactgcttatatatgcaccgatattgatgaatctcaaataattatggttagtggaagaatccaggcataaaaaagtacatacaaattatttcatttgtgtaaactctagagaagaaagtaatctgtagggacaggaagtgtgtatctcctgaagatagggaggaaggaagaggtgagaaggagaaatcatacatggccttacagaaacgtttgggggtgatggctaagttcactatcttaattgtggtgataattccacgtatgcatgaaaatgtcaaaactcaatgcttaattatgtgtcttttattttctgtcaattacatatcaacaaaactgtaagaatgtgctaatgcacactgtggagtgtcaacagcaattaaacgtaacatggctggatcctgaaaacatagtgctaaatacatagtctaagaaacaatatgaaaaagaagaaggaattaaaatacaatgcaatagtgacagctgagttagtaagggatacaaattgtgtttttctaatgtatgtacattccaggaaagaagtacaaattaattattaagtactgaagtctgcatattatagtttctagggaacaatgaagtaataaaaatagaatgcaaaacttaaaaacaaaatgtgggagggtaatgaaatgaacttctaaaaaattatacaaaacaagtcacattttagttggtgtttctgttaagcagatcacaaggtgaagatttgggtgaatgtagttcgctagcgacctggggaaactgcaggaaaaagtgcaagttgggggttgctattgaaacaaccatttccctgctcttctcaccttccctgcacaaggaaaagcaagcaccttcgggtgcaataaatctcctgagacaaaaatacaaaagaagatttcaaacaattttatgattacacttagaaaatatgagcgtaaattattgtaaaataatatttatttctaagtttggactaagacatttaatattttagaaatattgatttcaaagttatttaaattagaaaaataattcctattattcaataaattagcagattttaaaaagcaaataacattgataacatctgaaaagggttaggtaaacagcatgtttaagataaatatccataaacaaattgaaaggtaaaatcatctgctggatagtatctatggaaaacttaaagaaaacatcatacttgctatgtgcaggggtgcaccgtcgacttccccacttttgaggtttggggactcagactggcttccttgctcctcagcttgcagatggtctattgtgggacttcaccttgtgatcatgtgagtcaatactccttaatgaactcatatatatatatatatatatatatatatatatatattcttatctaatatgtatatatcttattagttctgttcctttagagagccatgactaatacaaatagtaacatggaaacacttactttcctaactggataaawtatctatttttaagcaataataactaaaatagcatggatttggttcagagaaaaacaaaaataacaaaatagattaaaatataagatacaaaccaacgcatatatgtgcacaatatatgataatggtgacactgcaacccagtgagggaattacatttgtaaataaataataatgataaaaatttgttctccttataaaataacatgaaattcgactattgctttacatcataaacagcagcataaaagatacggtttgcctgcttccccacccaaatctcaccttgaattgtagctcccacagttcagttcccacatatcgtgggagggatccagtgggagataatcgaatcatgggggtgggtcattccatgctattcttgtgatagtgaataagtttcacgagatctgatggttttataaatgggagattgcctgcacaagttctcttgcctgcgccaggtaagacatgattttgctcctcattcacattccaccatgattaggaggccttcccagctgggcggaactgtgagtcaattaaacctctttccagccgggcgcagtggctcacgcctgtaatcccagcactttgggaggctgaggcgggtggatcacgaggtcaggagtcgagaccatcctggctaacacggtgaaaccccatctctactaaaaatacaaaaaattagccaggcgtggtggcgggcgcctgtagtcccagctactcgggaggctgaggcaggagaatggcgggaacccgggaggcggagctcgcagtgagccgagatcacaccactgcactccagcctggcgacagagcgagactccgtctcaaaacaaacaaacaaacaaaaacaaaaaacctctttcctttataaattacccagtcatgggtatggctttattagcagcgtgagaacagactaatgcaataaacagagacataaagacaaatatccttcacagcattctttaatatttggcctatatatatatatttttttttatgttcaagtcttacaattcattaataaaaatgaactatgcaatccgtgaagagttattgaataact

SEQ ID NO: 60151 - DNA, 2667 bp, Homo sapiens
ggagaggttgtgtgtaagtcaggacaggagtgagtacatgagaactctactttctcttcaatgttgcctacaactgctctacaacataaattttatagatttaaaaaatgaatgaactgcttatatatgcaccgatattgatgaatctcaaataattatggttagtggaagaatccaggcataaaaaagtacatacaaattatttcatttgtgtaaactctagagaagaaagtaatctgtagggacaggaagtgtgtatctcctgaagatagggaggaaggaagaggtgagaaggagaaatcatacatggccttacagaaacgtttgggggtgatggctaagttcactatcttaattgtggtgataattccacgtatgcatgaaaatgtcaaaactcaatgcttaattatgtgtcttttattttctgtcaattacatatcaacaaaactgtaagaatgtgctaatgcacactgtggagtgtcaacagcaattaaacgtaacatggctggatcctgaaaacatagtgctaaatacatagtctaagaaacaatatgaaaaagaagaaggaattaaaatacaatgcaatagtgacagctgagttagtaagggatacaaattgtgtttttctaatgtatgtacattccaggaaagaagtacaaattaattattaagtactgaagtctgcatattatagtttctagggaacaatgaagtaataaaaatagaatgcaaaacttaaaaacaaaatgtgggagggtaatgaaatgaacttctaaaaaattatacaaaacaagtcacattttagttggtgtttctgttaagcagatcacaaggtgaagatttgggtgaatgtagttcgctagcgacctggggaaactgcaggaaaaagtgcaagttgggggttgctattgaaacaaccatttccctgctcttctcaccttccctgcacaaggaaaagcaagcaccttcgggtgcaataaatctcctgagacaaaaatacaaaagaagatttcaaacaattttatgattacacttagaaaatatgagcgtaaattattgtaaaataatatttatttctaagtttggactaagacatttaatattttagaaatattgatttcaaagttatttaaattagaaaaataattcctattattcaataaattagcagattttaaaaagcaaataacattgataacatctgaaaagggttaggtaaacagcatgtttaagataaatatccataaacaaattgaaaggtaaaatcatctgctggatagtatctatggaaaacttaaagaaaacatcatacttgctatgtgcaggggtgcaccgtcgacttccccacttttgaggtttggggactcagactggcttccttgctcctcagcttgcagatggtctattgtgggacttcaccttgtgatcatgtgagtcaatactccttaatgaactcatatatatatatatatatatatatatatatatatattcttatctaatatgtatatatcttattagttctgttcctttagagagccatgactaatacaaatagtaacatggaaacacttactttcctaactggataaattatctatttttaagcaataataactaaaatagcatggatttggttcagagaaaaacaaaaataacaaaatagattaaaatataagatacaaaccaacgcatatatgtgcacaatatatgataatggtgacactgcaacccagtgagggaattacatttgtaaataaataataatgataaaaatttgttctccttataaaataacatgaaattcgactaytgctttacatcataaacagcagcataaaagatacggtttgcctgcttccccacccaaatctcaccttgaattgtagctcccacagttcagttcccacatatcgtgggagggatccagtgggagataatcgaatcatgggggtgggtcattccatgctattcttgtgatagtgaataagtttcacgagatctgatggttttataaatgggagattgcctgcacaagttctcttgcctgcgccaggtaagacatgattttgctcctcattcacattccaccatgattaggaggccttcccagctgggcggaactgtgagtcaattaaacctctttccagccgggcgcagtggctcacgcctgtaatcccagcactttgggaggctgaggcgggtggatcacgaggtcaggagtcgagaccatcctggctaacacggtgaaaccccatctctactaaaaatacaaaaaattagccaggcgtggtggcgggcgcctgtagtcccagctactcgggaggctgaggcaggagaatggcgggaacccgggaggcggagctcgcagtgagccgagatcacaccactgcactccagcctggcgacagagcgagactccgtctcaaaacaaacaaacaaacaaaaacaaaaaacctctttcctttataaattacccagtcatgggtatggctttattagcagcgtgagaacagactaatgcaataaacagagacataaagacaaatatccttcacagcattctttaatatttggcctatatatatatatttttttttatgttcaagtcttacaattcattaataaaaatgaactatgcaatccgtgaagagttattgaataact

SEQ ID NO: 60152 - DNA, 1515 bp, Homo sapiens
tggggccaggtgcagtcaagttgcacctgcacacaactagcacaatggccctggtagtaaaaactggggccaacaaacatgtgagtcagggcatgaggctctatgacaaccaagaatttaaaattcaaattctttattacaaagagcatagttatgtgggtcaaatttccagtaacaagctttttcttttcgtgacccagcccaggtggcatacttctatatttcccaaggctcgatcatgccgtttttctatatccacaacctttcccagtttccagttttatgcaaggacctctctttccactctctgagcatatgcaaatgccttctgaacttccatttacctgtaaacattgagatcatagttaaattattatcagcttctgtgtgcctttgatgtcaattctcccccactgctctgacttggagttaacrttttgtttctttcagctggaactttaatttatttttatggatattggtaaaatgtgtttttttaaatatctgcagtgttttcctggtgcagtagtagcgtattttccccctaccggttctgtgtggttgaaatggaagggtggctttttcatttaattcagtctttcatactaacaaaaacactcttatttgttcttcatttatctttgttgtgatcccaggctccaggggtcaggctttgagttgtcaggtggtaatttgttggagcaattttagagaacacgcatgaattgatactgttgtgtctggtgtctggtggcccagcttgatggatcctgaagcacaagctcatttcctgataactccatcattcctattttctctcaacattatagaagggtacctaatgacagaatatatccctcttgcgttttgtggctaaagctatttgggtgtaattgccaaaggtattcactctacctgaaagggtgagagccaagaaaaagaagtgcctagctgtgaggaagttcagaacatgataaaatatacctcttagtacatagagagagcatcacatggagccctggacatttctgtttgttgatgctcctattctgccacatgtgctaatcctctacccttacgggatcatcgtccatcctgcttcagccagtttgggtaagtacctgtaaaaaattacatcctttagagtgactgcccaaagacagtgagatttatcttgctaaatctagtagtctttcatgatagaatgttgatgactattttgctaaaattcacctcggtgccagaggaggtcaagaatgaacaaattatctgacagggatatgtattccaaactacctctgtgtgtgtgtgtgtgtgtgtgtgtgtgtgtgtgtgtgtgtaaactatacatatacatatgcagttaatgaatatataaatgatacagaaataaatttttgaaatatattctctttatcacttgagactagccacttctttattattcgaagtaatattgtatctgtatgaactgtatcaattcagaaataatattaaaaattcttcttaaagtgt

SEQ ID NO: 60153 - DNA, 1515 bp, Homo sapiens
tggggccaggtgcagtcaagttgcacctgcacacaactagcacaatggccctggtagtaaaaactggggccaacaaacatgtgagtcagggcatgaggctctatgacaaccaagaatttaaaattcaaattctttattacaaagagcatagttatgtgggtcaaatttccagtaacaagctttttcttttcgtgacccagcccaggtggcatacttctatatttcccaaggctcgatcatgccgtttttctatatccacaacctttcccagtttccagttttatgcaaggacctctctttccactctctgagcatatgcaaatgccttctgaacttccatttacctgtaaacattgagatcatagttaaattattatcagcttctgtgtgcctttgatgtcaattctcccccactgctctgacttggagttaacattttgtttctttcagctggaactttaatttatttttatggatattggtaaaatgtgtttttttaaatatctgcagtgttttcctggtgcagtagtagcrtattttccccctaccggttctgtgtggttgaaatggaagggtggctttttcatttaattcagtctttcatactaacaaaaacactcttatttgttcttcatttatctttgttgtgatcccaggctccaggggtcaggctttgagttgtcaggtggtaatttgttggagcaattttagagaacacgcatgaattgatactgttgtgtctggtgtctggtggcccagcttgatggatcctgaagcacaagctcatttcctgataactccatcattcctattttctctcaacattatagaagggtacctaatgacagaatatatccctcttgcgttttgtggctaaagctatttgggtgtaattgccaaaggtattcactctacctgaaagggtgagagccaagaaaaagaagtgcctagctgtgaggaagttcagaacatgataaaatatacctcttagtacatagagagagcatcacatggagccctggacatttctgtttgttgatgctcctattctgccacatgtgctaatcctctacccttacgggatcatcgtccatcctgcttcagccagtttgggtaagtacctgtaaaaaattacatcctttagagtgactgcccaaagacagtgagatttatcttgctaaatctagtagtctttcatgatagaatgttgatgactattttgctaaaattcacctcggtgccagaggaggtcaagaatgaacaaattatctgacagggatatgtattccaaactacctctgtgtgtgtgtgtgtgtgtgtgtgtgtgtgtgtgtgtgtgtaaactatacatatacatatgcagttaatgaatatataaatgatacagaaataaatttttgaaatatattctctttatcacttgagactagccacttctttattattcgaagtaatattgtatctgtatgaactgtatcaattcagaaataatattaaaaattcttcttaaagtgt

SEQ ID NO: 60154 - DNA, 623 bp, Homo sapiens
agttgggagaattatttttagccctaattactaaatttcagtgtacagtatggcatgctgaaacaccacctctgtgatgttattttggaacatgaaaacagcaaatatttcagaaaattttcctgaatgaggagttaaacgtgattttaaccagatttgggggtgcatgctgaaaaaaaaaaaaaaacttcagacaagttaaatttgatggagtttaattgagcaaaaaaaagaaacaatatgtgaatcgagcagcctccagaatcacagcagtttcagagagactccaggggtgcctcgtggtcgaacaaatttatagacaaaaaaggtaaagtgatgtacaggaatcagaagtgaggtacagaaacrgtgaaattggttacagcccagtgtttgccttatttgaatgcagtttgaacactcagcagtctatgagtggttgaagtatggccgctgggattgtccaacaatcagctattgttacaggcacatgctactaagtcaggttttcaattttgtctgcctattaagctaggttatgattcacccacaaggactcaaatatagaagtacagattccttctcaggccatattaaatttgctttaacaatgcacacctgca

SEQ ID NO: 60155 - DNA, 1297 bp, Homo sapiens
tgcatttaaaattttaaattaaacttacctgttgttggtatacaagaaagtgattgtcttttgtgtattagccttgtttcctgcagcatggctgtaattcagattttctacataaatgatcatgtcatctgcaaaggtggctttgcagtttgagatcagcctggccaacatggagaaatcccatctctactaaaaaatacaaaaattagccgggcgtggtggcaggcacctgtaatcccagctacttgggaggctgaggcaggagaattgcttgaacatgggaggcggaggttgcagtgagccgagatcgcgtcattgcactccaacctggttaaaaaaagtgaaactccatctaaaaaaaaaaaaatgcatgaggttatcaattggagagactatgtatagacaattctgttgagaagatgtgtgtgtctggacacatagaaacaaagaaaaggaagttggctggaaatgggtctagagatcaaattgaaggagaatttttgctagatgtagacattaaaacagaacatatgaattctgaagtaaatttctgaaggagaaaacacaatcttcactatatgttggacctttagtaaagcagacctagtttgctcatcaatttattttattaccaaaaatccttgattaagccagtacacatgacactgcaagcccaagaaccatatccatactacctcaagttgaaggagtgggatagactggctcacataactgaattccttgagtagaactctcttcaaatatgaacacaaagtcacaaataatgtcatcagatccctgtctcttttaacactactcacacatcttcttcaagtggctaatgtatggggaacaattgtccaacatgctcatatcctagaataacctggagaacaaaaatgtcttttgaatagttcaggtaaagacctttagaaatctctggcttccctgccttgaggcatgtaccgatccccaaatgtaccgggggtcacagactgctaaaattgattaggaatacatcaggtgcccatttctgggagttaggataagtaaagtcaacatcaaccttaatgaataggataaaacatgtttattttagagaggagagaagcggtttccaagtaggcactggcagagcaaacagagcaaagcaaaacaaaaatgtgtctatttcaaacatcctagaaagaatggttagttgattgtctcaatagtgctctcaggtactcttaaacttggtctatgacctttattgtcctttcttacagtgactagaggacatggcaacrtattatgc

SEQ ID NO: 60156 - DNA, 854 bp, Homo sapiens
ggcaggcaggagaatggcttgaacctagaaggcagaggttgcagtgagctgagatcctgccactgcactccagcctggatgacagagcgagataccgtctcaaaaaaaaaaaaaaaaagaaagaaagaaagaaagaaagaaagaagaggaaaatgtttgttggaagaggcccatctcctttcttgttgcctaaattctaaaccagactctcattctttgtctcctcagccacttccaatgagctttctgcctaaagaattttcatcttcaacacattttacacataatgtgctgtggtttgaatatgtgtgcccctgaaaaatttatacatttaaacctaatctccaatgagatactgttatgaagtggggcttttggggaaatgattaagtcatgaggttagagccctcatgaatgggattattgccttataaaaagaaaactgagggagcttatttgccccttctgctacgtgaggacacatagaaggcgttatctataaggaataggccctgaccagacactaaatctgctagcatcttgatcttggacttctyagcctccagaacttggggcaataagtttatgttatttataagccactcagtataaggtattttgttatagcagccaaatggactaagacaaagagccttcaattgctcccatttgtatcaagcagagcgcataaactgctgtcctgcaagctgaagcaacccaaagtcatagtttgatactttcatggcattttgaaaaaaaaaatagaatcaaattacttatcgaaatttaacaaaccaaaagttgctctaaaagcttgcatgcttgcatttctttctttcaatagcagaggttct

SEQ ID NO: 60157 - DNA, 613 bp, Homo sapiens
tgtgctttcgtctgactccggcactgagtaarcactgtgcttacttctgtgatagtgaaggtcacagaagagccgggctcagcctgagacaaaggctactgctgccagaaacagcaggaaagacggtgagagccaggctgatgaacaggcctccctttaactcaagttcaaaatcacagtgggatgaaaatctgagcatttgaggttggttggcttcattttaaccatgtgcctaaaaatttgtcatcatttaaagaccatttcctctgcacctgcatccaaaatgcatccagggtccagtgttttaaggaagaattactcagatgctctgttttgcttcttcacaatccatgcattccacttctaatcacgtcgaatttgtggagataatggcctcgagggattgggaggatgaaaatcaggagaagtgaagctgatttctccttgaccatgtggcttcttgaaatttcagggtaggcattaaaagaagtggttggtcgagattaaagactgaactgtgcatcttagctgtaatttatgtcatttcatctgggagaaacataaaaatcaacagcttttaatgaatctctgcttggatgttttgtcactcctc

SEQ ID NO: 60158 - DNA, 613 bp, Homo sapiens
tgtgctttcgtctgactccggcactgagtaagcactgtgcttacttctgtgatagtgaaggtcacagaaragccgggctcagcctgagacaaaggctactgctgccagaaacagcaggaaagacggtgagagccaggctgatgaacaggcctccctttaactcaagttcaaaatcacagtgggatgaaaatctgagcatttgaggttggttggcttcattttaaccatgtgcctaaaaatttgtcatcatttaaagaccatttcctctgcacctgcatccaaaatgcatccagggtccagtgttttaaggaagaattactcagatgctctgttttgcttcttcacaatccatgcattccacttctaatcacgtcgaatttgtggagataatggcctcgagggattgggaggatgaaaatcaggagaagtgaagctgatttctccttgaccatgtggcttcttgaaatttcagggtaggcattaaaagaagtggttggtcgagattaaagactgaactgtgcatcttagctgtaatttatgtcatttcatctgggagaaacataaaaatcaacagcttttaatgaatctctgcttggatgttttgtcactcctc

SEQ ID NO: 60159 - DNA, 613 bp, Homo sapiens
tgtgctttcgtctgactccggcactgagtaagcactgtgcttacttctgtgatagtgaaggtcacagaagagccgggctcagcctgagacaaaggctactgctgccagaaacagcaggaaagacggtgagagccaggctgatgaacaggcctccctttaactcaagttcaaaatcacagtgggatgaaaatctgagcatttgaggttggttggcttcattttaaccatgtgcctaaaaatttgtcatcatttaaagaccatttcctctgcacctgcatccaaaatgcatccagggtccagtgttttaaggaagaattactcagatgctctgttttgcttcttcacaatccatgcattccacttctaatcacstcgaatttgtggagataatggcctcgagggattgggaggatgaaaatcaggagaagtgaagctgatttctccttgaccatgtggcttcttgaaatttcagggtaggcattaaaagaagtggttggtcgagattaaagactgaactgtgcatcttagctgtaatttatgtcatttcatctgggagaaacataaaaatcaacagcttttaatgaatctctgcttggatgttttgtcactcctc

SEQ ID NO: 60160 - DNA, 643 bp, Homo sapiens
acattttcagtttttattttgtctttaattgtatccttttcatcttctattacttttaaggtattatcagttacgtttgtttgctctcatgttccttctggttttgttttcatttttgaaaaaaatttctttcatttctaatttttttttgcattttatcaccttatttctgggttttctaattctgatttatatatttaaatatcttctattgctttcttaatttcttctagcttgtttggacataataagttagattttctatrtagatattttctgtatctatccatagatataatttttccctttatctttttttttctctctaataagaactttccatgagattcaactgtaatatttcctgcggctcattttaatgtaaaagtagttattctaaatatttaggtaggagggttgtgtcaatatagcttttgtagctttccagttctaacattctcaattctgtttttaaaactatggcctcatactgtgaagtttcctgggttttctcctctcccatttttacctgggtcatttctttgctttaattctattgccccatcctgcccaatttgcattccactaccagccacttgtcctttgtgagggcagcttcagaccctttgtactctcacctgtg

SEQ ID NO: 60161 - DNA, 561 bp, Homo sapiens
cagtggtcctctccgtccctctcactggcttcgttgccctgcagagcctggagccgaggcagctaaaggcattgaggatggggcccaagcacccagggactcagaggcgagtatggtcagccaccccatgtcaaagctccccctactcactggcccggccactgctgtgacacccactgcaccccattgttccccccagggcctggatggagccggggagctgggggctgaggcatgcgcagtccacgccctcttccttatcctgcacagcggcaacatcctggactcaggccctggagacgccaactccaagcaggcggatgtgcagacgctgagctccgccttcgaggccgtyacccgcatccacttccctgaggccttgggccacgtggcgctgcgactggtgccctgtccacccatctgcgccgccgcctatgcccttgtctccaagtactagccacgggtggaagggcagggaactcgtaggatcaggccagggagcggggcagggagcggggaaggggtcaggaagccagacacctgggtcggtcactggcatgg

SEQ ID NO: 60162 - DNA, 637 bp, Homo sapiens
ctaggtggctcggggctccagagtacaggctctgatacgtgacaggcctgtaggtggccggggcagcaggacctcaggtgggggcagcagctgatgatggagccaagcaggggtcttggaggtggaagctgaagctttgttggggtctgagggaggaaatgagtggactctgggcctcccatcgcatcctcatccctcatcccaggcctgccctggtcccttcctgctcctccttcccaagttacctacctctcagccttcgcctttgcttttccctctgcctggaatttcttcttcaccttctccctctgtccaaacccttcccagtcctccaaggcccagcttgagagccacctcctgcaggaagcctgcctggcacccsctgcctgtgctctttgccctgagccccatattgtcttaggcatgtctgcttccccctccgtgtgtccacacaggggccctgtgggttcgctgagctgctgaagccccttcctggaggtcctgtccctttgcctcccgcccactgtgtacaccttagtcccactatgtctgcaggcctggggcttacctttctccctgtctgtggcacccttcagcacacagggactgaggctgctgtgactccgggctgggacac

SEQ ID NO: 60163 - DNA, 658 bp, Homo sapiens
ctgggggaggcagtgctggtgcagttgggatggggcagagrtggaagtgcgcgtgtgcctagaggggagagcaaaggcctggagggctccacgctctcaaccgttcagggctgatgcccctaagaaggcagggcactgtattttccagggtgacactgcccctgtgactgggcctggccaaccctgaccgagagggcaaagggctggaattggggagggtggggtgagtgaggacacctggcatgttctgcggcctcttggcctctctcgagcagcgtcccccagatagaagcaagaccttgctttgcagccctggcaggcaggatgcagtcatgtgacagctccagcaacctgaggctgggggaactgcggtctggaggaacaatgtgagttgggagcataagcccctcatggctagactcaggtttctctgtgtgacccgttggaggcgggtgggacgctcacaggagggtgcagctctgggagcccatgccccagcgtaacagctgctggttccagtcggtatagggtgggtagtggatctcctttaatttctccaggccggagggggcgagcaggcaggtgcggtggtgggagaaggtgtcgaaggtgaacttgccgtggtaccggcccatcccactgtggcctgtgtgggcac

SEQ ID NO: 60164 - DNA, 658 bp, Homo sapiens
ctgggggaggcagtgctggtgcagttgggatggggcagagatggaagtgcgcgtgtgcctagaggggagagcaaaggcctggagggctccacgctctcaaccgttcagggctgatgcccctaagaaggcagggcactgtattttccagggtgacactgcccctgtgactgggcctggccaaccctgaccgagagggcaaagggctggaattggggagggtggggtgagtgaggacacctggcatgttctgcggcctcttggcctctctcgagcagcgtcccccagatagaagcaagaccttgctttgcagccctggcaggcaggatgcagtcatgtgacagctccagcaacctgaggctgggggaactgcggtctggaggaacaatgtgagttgggagcataagcccctcatggctagactcaggtttctctgtgtgacccgttggaggcgggtgggacgctcacaggagggtgcagctctgggagcccatgccccagcgtaacagctgctggttccagtcggtatagggtgggtagyggatctcctttaatttctccaggccggagggggcgagcaggcaggtgcggtggtgggagaaggtgtcgaaggtgaacttgccgtggtaccggcccatcccactgtggcctgtgtgggcac

SEQ ID NO: 60165 - DNA, 749 bp, Homo sapiens
ttgctgcaatgtgcccagggcgtggcctatgcaggcagacggactctgtgccagctccagctccccacgtgcccccactgctggccccagcctcctccctccacaaccctcccaccctctctcctgatgatcccctccacctactctgggaccctggcctggccccctcacctgtgaagaagatgtagtccaacttgtgctctagcagctgccctgtctcctggggtccgcccagcaccacggcaaagcagctctgcaaggtggaatgagaggctcggggcgggctcggggccagccgggcctcctcagcccacaggggtgatatatggggacgtcrggcactgctggggcagggccaccctcacctggtccaggtactggggcagcacctcagccaggaccttctctgtgccctggctgatttctgacggcttcagcaccacgcaactccctgcaggggcagatggggacgtcgttgggggagcccagggtccccatgcccaaccaggggctgggctcagagggcatgtgaggcccagggtacctcagagcaagattccaggggcctctttgggaggggctactgggcggggagagcatggggttcggaacgccctcctcacctgcggcgagggcgcccaccaggagcaccagggtcaggttcagtgggtagttccagggtgcgatgatgaggaccaggccaaagggttccttccagatgaagaccgagtccagcttcatgaactgag

SEQ ID NO: 60166 - DNA, 749 bp, Homo sapiens
ttgctgcaatgtgcccagggcgtggcctatgcaggcagacggactctgtgccagctccagctccccacgtgcccccactgctggccccagcctcctccctccacaaccctcccaccctctctcctgatgatcccctccacctactctgggaccctggcctggccccctcacctgtgaagaagatgtagtccaacttgtgctctagcagctgccctgtctcctggggtccgcccagcaccacggcaaagcagctctgcaaggtggaatgagaggctcggggcgggctcggggccagccgggcctcctcagcccacaggggtgatatatggggacgtcgggcactgctggggcagggccaccctcacctggtccaggtactggggcagcacctcagccaggaccttctctgtgccctggctgatttctgacggcttcagcaccacgcaaytccctgcaggggcagatggggacgtcgttgggggagcccagggtccccatgcccaaccaggggctgggctcagagggcatgtgaggcccagggtacctcagagcaagattccaggggcctctttgggaggggctactgggcggggagagcatggggttcggaacgccctcctcacctgcggcgagggcgcccaccaggagcaccagggtcaggttcagtgggtagttccagggtgcgatgatgaggaccaggccaaagggttccttccagatgaagaccgagtccagcttcatgaactgag

SEQ ID NO: 60167 - DNA, 616 bp, Homo sapiens
tgcatcacagggtggctgtgagtgttcaggagtgaaggtcaggtgcctgccacactccacatgccagggagggggtctgttaaacaaacaggaataaaactagggacatagccagtcactagggggcacgggccctcctgaaagaggacagggacgctgctccagcccctgccggggcccactctccacggcccaccttatgcaggtcctgggccagcacgtcgcgcagaagctgcttgttttcttgaaggaagtggcccaggccctggagctgcgcagcccggaactcggccggccgcgtgcgccctcagttgaaggcctcacgcagccgccgcagcgtgtcctcgaaggggtccatcctgccggatggggtggcttgaactgggtggccagggctgcccctccttcacgggcaccctccagccaccccagggtctgcacacccttgccccacctgcacccatgggggctcacagacaccccacctcatacacacacagacccactcgaatgaccccacggggctggggctgcctgcaccacccccaactcacctgcctcccaggtgtgcccatgagggagggccctgggcttgacctccccyactccagggagg

SEQ ID NO: 60168 - DNA, 1259 bp, Homo sapiens
tgggcccggctggccctccccaccccggcggggtccgggcagccccgcctgcagcggaggaggcagggagggaggcccctgccttccttcccccgggcagtgggaaaaaggccattgcctaaattctggctcttcctagtccctctgtgctgattggggtccccaaagactcttagttcctatctccaccctagcccagccctcctgtgtgcagtcacagggtggtttgatatggggggtcccaggcccactctcctcttctcactctctgcagtccttagatttgggacccagggttgaggaaatgcctccccaccagtctagccagaagctggtggctctgacatgcctccacctagggctgggctcggctccagggccccaggcctctatggtcacccagctacacgcccaggcagaaacgggctgtcactgtgagtggctgggctagcccctgcatggtgccacaaagcctcccccacctctgccttccgggtccacaagtccggtcacccagccacccggagtctgggcaaaggcctcacgaggcaccccaaggctgggttcatgggatcccacccagcctgctacaaggtgctggggcagtgacggcagcaccccgccagcccctccccttgacactgaggccaagtgctggaagcagcagtgccctttctctctgagaagtcagagaccttcagggctgattcagaggctggggtgttgtcagggcattagggcgtgtgagggagtggcttacgtgaactggcatttccatgctgccaggcatcaccgccaatccagaggaagcgccctccaggcccaggctgcccacagcgccaagggctgtggaagcagccaggccctgtgctgccccctggtggcaccacaggaaggcccagggctctcagcgccacggctggggcggagagggcccaggtcccaccaraggctgatggcctacagaggcaagtcaaacctcatttaatcacaccctccccatccatagtctcctcttcccctgtctctgcctggcccacccaggcttagctgaagaaccagacccagaaaggctcagagctgagagcacaactccaaatcatcttttattaatataaaaagggcatatttagcaaaagacacacagataaaagagtcactatggctcaggacacaaggcagggaggtgccaggcctgtgcccctgctgggggagaaggaggctcgggacaaagtgggagaagtgctgggaagggctga

SEQ ID NO: 60169 - DNA, 649 bp, Homo sapiens
caaccacctccttcacacccatggtgggcctcaggcatatcccttttacaagaccccaagctcttctttctccagaactcaggagtttgggaccctagcttcctcctccctcagacccaagagtccaggcccccagccctcccctccctcaaaccctggagtccaggccctcaccccctcctccctcagaccctggagtccaggtctccagcccctcctccctcagacccaggagtccaggtctccagcccctcctccctcagaccctggagtccaggtctccagcccctcctccctcagacccaggagtccaggccccagcccctcctccctcagacccaggagtccaggccccaggccttcctccctcagacccaggaatccaggccccaggccttcctccctcagacccaagagtccaggccccccgccctctcctccctcaaaccctggagtccgggccctcaccccctcctccctcagaccctggagtccaggtctccagccccctcctccctcagacccaggagtccaggccccagsccctcctccctcagacccaggagtccaggtcccagccccctcctccctcagacccaggagtccaagccccggcccctcctccctcagatccaggagtccaggtccc

SEQ ID NO: 60170 - DNA, 1085 bp, Homo sapiens
catacgtgtactgcgtattctcgaaatttatgcttttttaaaacataaaccaggcctggcacggtggctcatgcctgtaatcccagcactttgggaggccgaggcaggtggatgatctgaggtcaggagtttgagaccagcctggctaacatggtgaaaccccgtttctactaaaaatacaaaaaattacccaggtgtggtggtgcgcacctataatcccagctacttgggaggctgaggcaggagaatcgcttgaacccagggggcagaagttgcggtgagcagagatcgcaccattgtactctggcttgggcaacaagagtgaaactccgtctcaaaaataaataaataaataaataaataaatagcagattagaaacccgtctgtgactcaggttttctcatttctcttagaataaaattcaaactcctacaaaaggctgcgtgcatagtgcctctctctctgccatccctagcttcactttccttgcctgcatcctatcagacagtctgtctctccagcccttgaatattttgtttctttcctacctctttttttctttttttgagacagggtctcgctctgtcacccaggctggagtgcagtggtgtgatcatagctcactgcagcctcaaaccctggggctcaagcaggtcctcccacctcggcctcctcagtagctgcaactacaggcatgcaccaccacagctggctaattaaaaaaaaaaaaaaaaacttttacagatggggtttctctgtgttgactagtctggtcttgaactcctggcttcaagagatcctcctgcctcagcctcccaaagctctgggaktacaggcatgacccatcacacctgaccaggactctcaaacttacccttcatttgtcctgaaatctttcactacagatcctcacgtaattcattcattctcatactgcagattttggctcaaaatagcacctagccagaaatgtctttcagactctcttattttaaggagctcttgccccaaacccacccaagttacttccatcatcctaagtattaatacttttgcttgattttgttcttttctagtttctggg

SEQ ID NO: 60171 - DNA, 669 bp, Homo sapiens
ctcacctcccagtttccgtttttttgttttgttttgttttgagacagggtctcactctgtcacccaggctggagtacagtggtgccagcatagctcactgctgcttccacatcctggactcaaatgatcctcccacctcagccgccctagtagctggggccataagcacgcaccaccatgcccagctaatttttgtatttttggtagagacrgggttttaccacgttgcccaggctgatctcgaactcctgggctcaagtgatccatccaccttgcccttgcaaagtgctgggattacaggcgggggccgctttgcaaatggtgcacagtcttgctgtggcctgcattttcccctagcaatacagcaatacatctggaaaatcacaccgcatcagcaccttctttttttttttttttttttttaataattgcatgcacagtgtcgacttgtggacagacgagagctcttgccgcaattgttattatatttcaggagtggtgtggcgtggtgcctaagacctcagtgtcatctctcagacccggattcacctcgtagctctacagccagaactcccacaggctgctggtgggcgtgcgagccccgagcagccactttggaaaatggtttgccaacttcccgcaaggttaaatacacacttcccataggat

SEQ ID NO: 60172 - DNA, 565 bp, Homo sapiens
acatttctatatctttttgcaagaagtgtctattcaagtactttgctcatttttttcaggctttttattgttgcaggatttatttgcaaatgttttcgcccattccttgggttgccttttcattctgctgatagtgtcccttgatgmacaaatttttaattttgctgaagtccaatctgtttttccttttgttgcctgtgcttttggtcatacccaggaaattactgctaaatccaatgtcatgaagcttttccatttttttttttctttttgagattgaaaaaaaagacaggctgcttttttctgtcttttcttgctccgtcgctcaggctggagtacaatagcgcaatcgcggctcactacaacctccgcctcccacattcacgcaattctcctgcctcagccgcctgagtagctgggattacaggtgcccaccaccacacctggctaatttttgtatttttagtagagacggggtttcaccatgttggccaggctggtctccaactcctgacctcaggtgatacacctgcctcggcctcccaaagtgctgggattgcaggca

SEQ ID NO: 60173 - DNA, 1126 bp, Homo sapiens
ctgaagggaaggaatggcaattctaaaagcaactacacaatgtgatatgaaatggaaaggcaacagcttgatggggcatccaatgacatgatcattgaagtagaatgtatataagaaaacaggaaatgagggactaaaaagaagaggaaatgaagtaataatacatggggattcagaagggtctgacaggctgtgcagcattgtgctatgtctaaggggaagacgttcacttggggttagaaaagaaagcactagggatttcaggagggaagtccactactgcaacaagtagagaaaataaagcacttgagttaggtagagaagtaaatgttaaataataaaacacacctcccagactgagattgctaagtgaacaaaaccatactgcagataattaaaaaaaaatcagattaggttccaagcattaagaaagaaaaggttagatcatgaaacacatttatatatgtggaaaaattcctttttgctcaatcacatgtatattatgttgggagataacagtgaaaagttcaaatgtaattgagaatatgtaattttccctgtattccttcatgagtagtcaaaataatgtggaagcgaggagaggaaacaagcttatttagttgagcaaattaattttttctccctgtcttctgcttatatatgaagggagaaatatatwccaattttttgcaaggttttagaatttttcagtgtttcttgatttttattgtggggttgagaaagaagttacaatggtaattagttttataaacatcatgaatatagatgaatcttactttatgccacacatctagtcctgaaaacttggttattgattattgtgtaaagcaaatactatttcaattgaactgaaagggaataatatttaaaggaatgatattaaaggaatgaatcattttgctttaattttataattattcttcctgtggaaaattaaagaaaactattttgtactgaaacatttttaatgttagatatttatggctcaagtatttttgtgttgagctacaatcagacagttactttctgaaaggaaaactgagtcagtgagttatgcacaaaatgagtgagttggtaatacctggtccatcaagttcatctttcc

SEQ ID NO: 60174 - DNA, 704 bp, Homo sapiens
actaacaagaactaatcactcaggagaaatgctcaacaatttgaatttttagcaagcattccataatgattttaccatcatggaaaaatcatcattttattaatttttatcatcaatttaggagactgtggcctaaaaatggaaaagctgattaagagaataagcaatgtatattttttaatttcaacattttccagatcaaaatgaaggcaggtgtccaagttgccattgcaccatagatttgtacagtttgtgtgaagttcacaggtcagatttattgcatgataaaggaagtggcagtgatgtgcttatttgtacttgtatrtttatctggtgcctgctaatggtggaactcaccttctccaagtcacaccagctaggagcacagccaagcaggagtcttccacttagctccttctggcaaattgtgtgaacgataccccctcaccatcagttaaaatccctttgaaataataaaggaagtcattggtatcctttgacacagtgccacagacggtggcttaacaacagacatttactctccccgagttctggaggcaccagaagtccagaatcaggggttgtgaggacaatgcaggctctgggactctgggcaggaccttcctggcatcttcacacttctggcggccggcaatccttgcaaacctcactgttctctttatctgtctctgctgttggctgaa

SEQ ID NO: 60175 - DNA, 704 bp, Homo sapiens
actaacaagaactaatcactcaggagaaatgctcaacaatttgaatttttagcaagcattccataatgattttaccatcatggaaaaatcatcattttattaatttttatcatcaatttaggagactgtggcctaaaaatggaaaagctgattaagagaataagcaatgtatattttttaatttcaacattttccagatcaaaatgaaggcaggtgtccaagttgccattgcaccatagatttgtacagtttgtgtgaagttcacaggtcagatttattgcatgataaaggaagtggcagtgatgtgcttatttgtacttgtatgtttatctggtgcctgctaatggtggaactcaccttctccaagtcacaccagctaggagcacagccaagcaggagtyttccacttagctccttctggcaaattgtgtgaacgataccccctcaccatcagttaaaatccctttgaaataataaaggaagtcattggtatcctttgacacagtgccacagacggtggcttaacaacagacatttactctccccgagttctggaggcaccagaagtccagaatcaggggttgtgaggacaatgcaggctctgggactctgggcaggaccttcctggcatcttcacacttctggcggccggcaatccttgcaaacctcactgttctctttatctgtctctgctgttggctgaa

SEQ ID NO: 60176 - DNA, 704 bp, Homo sapiens
actaacaagaactaatcactcaggagaaatgctcaacaatttgaatttttagcaagcattccataatgattttaccatcatggaaaaatcatcattttattaatttttatcatcaatttaggagactgtggcctaaaaatggaaaagctgattaagagaataagcaatgtatattttttaatttcaacattttccagatcaaaatgaaggcaggtgtccaagttgccattgcaccatagatttgtacagtttgtgtgaagttcacaggtcagatttattgcatgataaaggaagtggcagtgatgtgcttatttgtacttgtatgtttatctggtgcctgctaatggtggaactcaccttctccaagtcacaccagctaggagcacagccaagcaggagtcttccacttagctccttctggcaaattgtgtgaacgatacccccycaccatcagttaaaatccctttgaaataataaaggaagtcattggtatcctttgacacagtgccacagacggtggcttaacaacagacatttactctccccgagttctggaggcaccagaagtccagaatcaggggttgtgaggacaatgcaggctctgggactctgggcaggaccttcctggcatcttcacacttctggcggccggcaatccttgcaaacctcactgttctctttatctgtctctgctgttggctgaa

SEQ ID NO: 60177 - DNA, 704 bp, Homo sapiens
actaacaagaactaatcactcaggagaaatgctcaacaatttgaatttttagcaagcattccataatgattttaccatcatggaaaaatcatcattttattaatttttatcatcaatttaggagactgtggcctaaaaatggaaaagctgattaagagaataagcaatgtatattttttaatttcaacattttccagatcaaaatgaaggcaggtgtccaagttgccattgcaccatagatttgtacagtttgtgtgaagttcacaggtcagatttattgcatgataaaggaagtggcagtgatgtgcttatttgtacttgtatgtttatctggtgcctgctaatggtggaactcaccttctccaagtcacaccagctaggagcacagccaagcaggagtcttccacttagctccttctggcaaattgtgtgaacgataccccctcaccatcagttaaaatccctttgaaataataaaggaagtcattggtatcctttgacacagtgccacagacggtggcttaacaacagacatttactctccccgagttctggaggcaccagaagtccagaatcaggggttgtgaggacaatgcaggctctgggactctgggcaggaccttcctggcatcttcacacttctggcggccrgcaatccttgcaaacctcactgttctctttatctgtctctgctgttggctgaa

SEQ ID NO: 60178 - DNA, 867 bp, Homo sapiens
aatggctctacgccctctttatttaacatagagatttagcaacgagggcagggttttcaagagcagaccttttgtttttgtttgatggggttgggtggagagacgtggtcttgaccacaatttatgttatgacaacatgtgtgaagaagagaggatatttaaagtaggtgtttcctttgcaggcttgaatgggcattcgacttatacacaaaagtgcacccattttcagtgtytccatatcagcaccaatgtcatttaactgtaagattctttttaccataaacacttgggatgctcaatggtttaaaggacattctacacaaaagtttgaaagctcttaattacagcaactaaaacctcacaatggttttctagatatgtcttttgtgtagtattttgaaaaatggatttttcttccaaagaggttaggacaatagcatttatgccataagaactctgtttttttggaccacattttgtgataaaaagcaaatgagctttgcatttaggagctccaggaaatccttgttgcccttagaaatctgccccctcaccccgacaaagggccagacagcttggaggtagggaatatccccctccataggctcaccaagacgtgcagctggctgtatgttctttactgatgtcctgtgagcccttaaggtatttcaacaaggagcatcttgattttctgtggatttatggaagaaaatgtatctctccaaatgtgtatagtagttcctccttatctgcagggaatagttccaagacccccagtgaatgcctaatactgcagatagtacacaacactatatatgctatatatttttttactatacatgcatatatacataccagaaatacagt

SEQ ID NO: 60179 - DNA, 867 bp, Homo sapiens
aatggctctacgccctctttatttaacatagagatttagcaacgagggcagggttttcaagagcagaccttttgtttttgtttgatggggttgggtggagagacgtggtcttgaccacaatttatgttatgacaacatgtgtgaagaagagaggatatttaaagtaggtgtttcctttgcaggcttgaatgggcattcgacttatacacaaaagtgcacccattttcagtgtttccatatcagcaccaatgtcatttarctgtaagattctttttaccataaacacttgggatgctcaatggtttaaaggacattctacacaaaagtttgaaagctcttaattacagcaactaaaacctcacaatggttttctagatatgtcttttgtgtagtattttgaaaaatggatttttcttccaaagaggttaggacaatagcatttatgccataagaactctgtttttttggaccacattttgtgataaaaagcaaatgagctttgcatttaggagctccaggaaatccttgttgcccttagaaatctgccccctcaccccgacaaagggccagacagcttggaggtagggaatatccccctccataggctcaccaagacgtgcagctggctgtatgttctttactgatgtcctgtgagcccttaaggtatttcaacaaggagcatcttgattttctgtggatttatggaagaaaatgtatctctccaaatgtgtatagtagttcctccttatctgcagggaatagttccaagacccccagtgaatgcctaatactgcagatagtacacaacactatatatgctatatatttttttactatacatgcatatatacataccagaaatacagt

SEQ ID NO: 60180 - DNA, 608 bp, Homo sapiens
taccccatccctaagccacttgtatggaaagaaaaagaggaagaagccagtactgtgactgtgtaagcttcccccagcatcacccgctatgagatgtgtggcagctgagacccgggaactgctcaagggcaccaggccccatctgtctgcactcaccttcctcaggtactcscatgggcatgtcactgactttatgtgctgctgcagctccttggtgagctggccctggtcatgggacaggaactgtggggtcaggacaatagagagcttcaccatttgcagaatgagaacaggagctcatgatgagtgcctatctattagataatttaaaaaaaaggtgttgaatgagtggaaaaacaaggtgatgtttgagtctatagtggtcaagggcttcagaaaaggacagaaccaagttcaaattcctgtactttgaatttctacttcatgccatgcaaaattactttaccccttttaacctcagttttcttctgtgtgaaacaggaacaatagtttcattcgtcattcagtttctctcaaggtttcatgagatcatacctataaaacatccaagtcatttaaatgtatcatcatttctgtcataattagtg

SEQ ID NO: 60181 - DNA, 1385 bp, Homo sapiens
gggatttaaagcagtggttttcagctgccagaggcctgagagagtttgggcatactctgtgtgatcaggcagaaggcctgcgggaagtttagcagaggacagggccaggaaaggtgatggacagtgggggtctgtcctggtcaccaggcccctgggtcctgcccacctgcttggagctccccacccatcacacatgatgctgccaagccctctgggtattgtgggcaaataccttaggagagaagctgatgaactttgtttcttgaaatgcacagattccttggacatccctgagaggtcaatcatgaaggtcaacttggttttctccccctcatttgggttcagaatttaaagtccacacacacaggcagtaagatgatatagataaggacatcatcactcggtttcggatgttaaaatgtctaggtgggttggggtgatttgagatcacacaatcttgtgccacaaagaggaattcccaggacagagggagacattttattgccatgttatgatcttatcattgagttgaaaggcaatcttgtttcattttggattctttcttgtgtttatgtcttataagggcactttgaatttccgagcaaataataattttgaattagcttttaatcattgacttctagcacagttatatgatcagaaacatgctgtgtgatttgattgctctcaaatatattgagatttgctggaacaaaataagtcaggttaatttttgtaaatgtaccatgcatgcttaaaatgaatgtatctacatttgttcctgagatacaggttgatggacggatggctacatggatgtgatggagatggtttactatcgggaccttccgcatcctgctgatgttttgttgcttaggatatgaatggctgagcggaggctgtaaaacctggcactctgcttgggtatgaggttcttcctgccatcctgccatcatttgttttttatgttttgtcaccaaattgactttgaggaaccctgggagctcaggaaggaaggagcgcccagaagcagggacagggagctggttggggaggaccagaaatcaggtttgtgaaggttccggagaggacctgtcttcgggaggagtgtgggagactgagatgggggaggggtcattggaatgatgcgggcgctacttggcattgtccattgtgaggcaccaccggagtcatcagggactggtggagagggagtctaaagccccagggtagctaagggagggcccagaccgaagaaggtttggtgratagcagaacctttttgtctccctctaattgctcctaagcctcacgctcccttgccccgcgtgtcctgttgcttccctgatctccgtgacctgtagctaaaccttccaccagcgctt

SEQ ID NO: 60182 - DNA, 1686 bp, Homo sapiens
tgcattctggcactactatgtctgaattgtgtgtgacctagagcaagttattaacttctctgtgcctccatttcctcatttgccaaaatagagacaataacatacctaagttatagggttgtaaagagcattaaattaggtaatatttgtaatgcaagttacccattctcaataaacactagttgttgtgaatgtaaaaaaattacctggaaacggtttgatcctttgagactgaaatgaccttactttatgggttattttgccccctggtgaggtgatacccttctggattaggtttattccactccagctaggggaaatgtgaactctgactggttctgtgggaaccctaggatcgtctgcttgctgctttcccgctttctacccccagagccttaaatcagcacagctttaaagtaaacctccatgccagcaggctctgcgyactcctacctggctcatattgctctcttctggaatgtctttgacatgtttgccaatttgtatttcaaaataaattttataaccagcttataaactttatcaccactgaagtctgagctggacttagactaaatctatgaattaattttggaagaattattttttgaccttgagcctgtctaacgacaagatctatcacctcatatatttagctcttctttaatgtttttcagtaaagcttttaaattttcttataaagagactgcatatttaaaattactttatacgtttggttactagatatcttcattattattctgggaatttctatcagatttcttttgtgtggaattccgtttactgactcccactctcggcgtcctttctcagtgctgtgaagcaaaccctctcccgtggatccatgatcacttgtgcataacaggtaaaacatttgaaaccttgcatgtgtgaaaagaccctcttcctttactaggattgatagtttagagagctataaaattgtaaattggtaagaaattttccgcagaattttgaattgcagcattgttttctaagttcttgtgtttctgcttagaagttgggtaaatccttattcctgatcacttttccccttgagactattttcagaatgtatttggccaaagaatctgaaattctgattatgtgctttttgcatgggtcatttttcattagttctttctgggacattttcacattctcagtggaacaaatcccatttggttgtggtgtataattatctttaccattttgttttctttttacaactcatttaatttattgtcattgccgttggggtactctgttggggtagtttgattgaccattctccacagctgcctctggagatgcagcagacaggttctaggtctctgggatgcatcatgcacagggtggtactaattccactggggaagccctccatggtcttttgttcccaattctgtttcctactcagtatgtgctaacagacaattatttttgctcttttctctcttatgctttcttgaatgggtgggagatgtttctaaggattttttgcttgtacacagaagagtttttcccttctcagctgttttctgcaccttgttactttctctggtcttttattcgtaggatgccatcttctcctccctcccataagtgtttggtggtcagctgtttcctgcctacggctcgtcggttcataatgcccattggttg

SEQ ID NO: 60183 - DNA, 635 bp, Homo sapiens
agcacccatccagtgttggaaatggttgagggagattcccggcagtgctgtctgcggaagcccggcactgctttggtcagcatgggcgcctctgttcatggcagcagctccctctatggaggtggtgttaggaagagtttgggagggctcccagtcctaggaacaacagcaccaccaaatgagtgactgaccattgaagaaagtcaaaatattttgccccaaaatatatttctttgacttcttttgaaatggctgccgtaggaccagcagactgaaatggccctgcaaagctgtcttgtgggagaaatttgcgtctgtagagaatctccattgttgcagccaggccttccctttctaggcctttcctcaatctaagagagactgagactctgacacttccaaaggtctgaaagggaacatttaccatctatttcctctggggctgtattatgaggggcttcatctagaccrcctttgctggccataacctgtcctgcctctaaaacctggttttggtcatgcgctgagcctgtgttctttctataacctcaagatggtctagaaacttctataccttactggggggttgggacttcattctgaaggctcctgtgggtacgcgttaagtacatttg

SEQ ID NO: 60184 - DNA, 635 bp, Homo sapiens
agcacccatccagtgttggaaatggttgagggagattcccggcagtgctgtctgcggaagcccggcactgctttggtcagcatgggcgcctctgttcatggcagcagctccctctatggaggtggtgttaggaagagtttgggagggctcccagtcctaggaacaacagcaccaccaaatgagtgactgaccattgaagaaagtcaaaatattttgccccaaaatatatttctttgacttcttttgaaatggctgccgtaggaccagcagactgaaatggccctgcaaagctgtcttgtgggagaaatttgcgtctgtagagaatctccattgttgcagccaggccttccctttctaggcctttcctcaatctaagagagactgagactctgacacttccaaaggtctgaaagggaacatttaccatctatttcctctggggctgtattatgaggggcttcatctagaccgcctttgctggccataacctgtcctgcctctaaaacctggttttggtcatgcgctgagcctgtgttctttctayaacctcaagatggtctagaaacttctataccttactggggggttgggacttcattctgaaggctcctgtgggtacgcgttaagtacatttg

SEQ ID NO: 60185 - DNA, 695 bp, Homo sapiens
atccatccagcaatgagtcgacactcttgccaaggtctggcagtctcggcccttcccacagccttatgccttcctttgtttgcaagtctgtttctttccctggagatctgtgcygccccgggcagtagccactgactacacgtggcccttgagcatgtgcagctgggatgtgctttcaaagacatggcactttttttaaatgtaaaaaaatcctattcataattttatgttgataattcattttcataattaaggtgtcttaggttaaatataacatattattaaaataaatgtcacccatttcttttcatttttttcactgtggctaccagaaaattaaaatcgcacatgaggctcaccttacacttctattagacagtgctgcactagacatcaagtgttgagggcagagattgcttcgctctttcttgattccctggacctccggcccatggcactatgcctgactgccctagtatttttcatcctgcggacccatcagcaatggacctgaacagttctcctccatgatctctcatggtgctggtcctactgtccctaaactcagggcttactggcttctggttcttcaaaatcctgctccctggcgtatgatctactagagaaccccagaagcgcagaatcacaggccttggagcgtgaacgtactaccttgcccaccgctgctgaatcct

SEQ ID NO: 60186 - DNA, 695 bp, Homo sapiens
atccatccagcaatgagtcgacactcttgccaaggtctggcagtctcggcccttcccacagccttatgccttcctttgtttgcaagtctgtttctttccctggagatctgtgccgcccygggcagtagccactgactacacgtggcccttgagcatgtgcagctgggatgtgctttcaaagacatggcactttttttaaatgtaaaaaaatcctattcataattttatgttgataattcattttcataattaaggtgtcttaggttaaatataacatattattaaaataaatgtcacccatttcttttcatttttttcactgtggctaccagaaaattaaaatcgcacatgaggctcaccttacacttctattagacagtgctgcactagacatcaagtgttgagggcagagattgcttcgctctttcttgattccctggacctccggcccatggcactatgcctgactgccctagtatttttcatcctgcggacccatcagcaatggacctgaacagttctcctccatgatctctcatggtgctggtcctactgtccctaaactcagggcttactggcttctggttcttcaaaatcctgctccctggcgtatgatctactagagaaccccagaagcgcagaatcacaggccttggagcgtgaacgtactaccttgcccaccgctgctgaatcct

SEQ ID NO: 60187 - DNA, 695 bp, Homo sapiens
atccatccagcaatgagtcgacactcttgccaaggtctggcagtctcggcccttcccacagccttatgccttcctttgtttgcaagtctgtttctttccctggagatctgtgccgccccgggcagtagccactgactacacgtggcccttgagcatgtgcagctgggatgtgctttcaaagacatggcactttttttaaatgtaaaaaaatcctattcataatttkatgttgataattcattttcataattaaggtgtcttaggttaaatataacatattattaaaataaatgtcacccatttcttttcatttttttcactgtggctaccagaaaattaaaatcgcacatgaggctcaccttacacttctattagacagtgctgcactagacatcaagtgttgagggcagagattgcttcgctctttcttgattccctggacctccggcccatggcactatgcctgactgccctagtatttttcatcctgcggacccatcagcaatggacctgaacagttctcctccatgatctctcatggtgctggtcctactgtccctaaactcagggcttactggcttctggttcttcaaaatcctgctccctggcgtatgatctactagagaaccccagaagcgcagaatcacaggccttggagcgtgaacgtactaccttgcccaccgctgctgaatcct

SEQ ID NO: 60188 - DNA, 2451 bp, Homo sapiens
tttggatgatacttacactaaaagcccagacttcaccactacacaatatacccatgtaacaaaactgcaattgtaccccctaaatctataaaaataaaaatatacaaaaatatttttaaagaactctgtgtgtgtgtgtgtgtgtgtgtgtgtgtgtgtgtgagagagagagagagagagagaggtgtgtatccataggaaggcctagttgtaattgtgctataaataaaagtaatttgagcaggttacctctggttggtttctgcattctcatatctactccactggagtgaaagtactgaggtgcagtattggactttgtattaattacattttcttattttctgtgttcttgattctttagcatttagggccttgctgaccctggagacactgcccctcccagagtttgctctcctagagaaagcaaatagctcacctaggagcgcgcctttcaaatgcaaagaaaccaatccagggcccactcccaccacctcctctatgtggctcttacgctctgtctcctgtccccctgctctggtcaccccagaccagggacaagatatctaggaacaacccctaagtcccagaggccrctgaaatgattcaagtcagcaagtgctaaacctgctcaccctttccttcccaggacagcacagttaaggcttccaccagcagccccctctctccacctactcatctcgcctcggtgcttccccaggtgggcccccatggagggagggccaccacacccagttaatttttatataaaggactggcctcatgtcttgtcatactcgattaaaacaaatcccaggtatcattaaaacaagtttgaattcccttctatccgcaccctacctacactccagccataaatagctttaacacaagggaaaggatccctccttctccataccggccaggctggggaaacttagaagcagaagatactccatgaagagataaaatccagcatcaggggtcacaatgcctcgcaatgctgggcaagttcctgtggagagagcaccggccgagaataagagaggcaccatgctcactgggaagtgagttgttcggttatggtattttaaacatataagacagaacatcaagataatgcattccaaagataccatccagaagcaaatcctgtcatcagaaagtactatcagtagtgaaaacaatggtgtgtgtgtgagagagagagggaagggggaagagagagagaaggcctcccagccaaggtcaagttaagttggaggcatcattaaactatatttcaacataaacttaaaacatctcttggccaagtgtggtggctcacacctgtaattccagcactttgggaggctgaggtgggcagatcacttgaggtcaggagttcaagatcagcctgggcaaaatggcgaaaccctgtctctactaaaaatacaaaaattagccaggcgtggtgacacatgcctgtaagcccagctacttgggaggctgagatgggaggataacctgagctcaggagactgaggcttcaatgagcagaaatcacaccactgcactccagcctgagcaaaagagtaagaccctgtctcagaaaataattttttaaaaaaaatctctcatcttaccttccggaattaaaaattaaaggtatagttccttcccatgagcttctaaggcaactaacataatcaaaataaatatttacacaataatctagagatttcagcagattagaagatatattttatatattactcttaaatataaatttgtttataaaatttattcacttttatgccaattttgcagcaaattatttttatacaaagatatccaaatggaaaactgcaaatagttagccttttttacctaatttacatatgaaaaagtctaagttaaagtgcatattacacatgctctgacttcaacaggaaacagattagtacactttataaaacattgattatttttattataaatataataagtgctcattaaagacaatttgagaaatatcttaaaagtataataaataaagctttactcatattttaatttttcagttacaaccaatattaaaatttagatgaatttctataattttatgcataaatttttgcatctccttcaatttacctatatactatttgctcgtctcacatgacactgatggcagagatggccagtcatccaacttctacagagaagagatgttgctgcaaagtgatgacatgccctagggaacgcagcatccaggtgtcaagggatgagattcaggcttacaggacatggtgaaagtgaagatgccacctccaagtctggtccaagtaaacctcccatgtgatcctctcatactttcccttctctcccttttccctgttggacatcagcaccaggccagccataaatgccatgcatcgaaacatcagagcctcgttcaatccaagtgcc

SEQ ID NO: 60189 - DNA, 2451 bp, Homo sapiens
tttggatgatacttacactaaaagcccagacttcaccactacacaatatacccatgtaacaaaactgcaattgtaccccctaaatctataaaaataaaaatatacaaaaatatttttaaagaactctgtgtgtgtgtgtgtgtgtgtgtgtgtgtgtgtgtgagagagagagagagagagagaggtgtgtatccataggaaggcctagttgtaattgtgctataaataaaagtaatttgagcaggttacctctggttggtttctgcattctcatatctactccactggagtgaaagtactgaggtgcagtattggactttgtattaattacattttcttattttctgtgttcttgattctttagcatttagggccttgctgaccctggagacactgcccctcccagagtttgctctcctagagaaagcaaatagctcacctaggagcgcgcctttcaaatgcaaagaaaccaatccagggcccactcccaccacctcctctatgtggctcttacgctctgtctcctgtccccctgctctggtcaccccagaccagggacaagatatctaggaacaacccctaagtcccagaggccgctgaaatgattcaagtcagcaagtgctaaacctgctcaccctttccttcccaggacagcacagttaaggcttccaccagcagccccctctctccacctactcatctcgcctcggtgcttccccaggtgggcccccatggagggagggccaccacacccagttaatttttatataaaggactggcctcatgtcttrtcatactcgattaaaacaaatcccaggtatcattaaaacaagtttgaattcccttctatccgcaccctacctacactccagccataaatagctttaacacaagggaaaggatccctccttctccataccggccaggctggggaaacttagaagcagaagatactccatgaagagataaaatccagcatcaggggtcacaatgcctcgcaatgctgggcaagttcctgtggagagagcaccggccgagaataagagaggcaccatgctcactgggaagtgagttgttcggttatggtattttaaacatataagacagaacatcaagataatgcattccaaagataccatccagaagcaaatcctgtcatcagaaagtactatcagtagtgaaaacaatggtgtgtgtgtgagagagagagggaagggggaagagagagagaaggcctcccagccaaggtcaagttaagttggaggcatcattaaactatatttcaacataaacttaaaacatctcttggccaagtgtggtggctcacacctgtaattccagcactttgggaggctgaggtgggcagatcacttgaggtcaggagttcaagatcagcctgggcaaaatggcgaaaccctgtctctactaaaaatacaaaaattagccaggcgtggtgacacatgcctgtaagcccagctacttgggaggctgagatgggaggataacctgagctcaggagactgaggcttcaatgagcagaaatcacaccactgcactccagcctgagcaaaagagtaagaccctgtctcagaaaataattttttaaaaaaaatctctcatcttaccttccggaattaaaaattaaaggtatagttccttcccatgagcttctaaggcaactaacataatcaaaataaatatttacacaataatctagagatttcagcagattagaagatatattttatatattactcttaaatataaatttgtttataaaatttattcacttttatgccaattttgcagcaaattatttttatacaaagatatccaaatggaaaactgcaaatagttagccttttttacctaatttacatatgaaaaagtctaagttaaagtgcatattacacatgctctgacttcaacaggaaacagattagtacactttataaaacattgattatttttattataaatataataagtgctcattaaagacaatttgagaaatatcttaaaagtataataaataaagctttactcatattttaatttttcagttacaaccaatattaaaatttagatgaatttctataattttatgcataaatttttgcatctccttcaatttacctatatactatttgctcgtctcacatgacactgatggcagagatggccagtcatccaacttctacagagaagagatgttgctgcaaagtgatgacatgccctagggaacgcagcatccaggtgtcaagggatgagattcaggcttacaggacatggtgaaagtgaagatgccacctccaagtctggtccaagtaaacctcccatgtgatcctctcatactttcccttctctcccttttccctgttggacatcagcaccaggccagccataaatgccatgcatcgaaacatcagagcctcgttcaatccaagtgcc

SEQ ID NO: 60190 - DNA, 2451 bp, Homo sapiens
tttggatgatacttacactaaaagcccagacttcaccactacacaatatacccatgtaacaaaactgcaattgtaccccctaaatctataaaaataaaaatatacaaaaatatttttaaagaactctgtgtgtgtgtgtgtgtgtgtgtgtgtgtgtgtgtgagagagagagagagagagagaggtgtgtatccataggaaggcctagttgtaattgtgctataaataaaagtaatttgagcaggttacctctggttggtttctgcattctcatatctactccactggagtgaaagtactgaggtgcagtattggactttgtattaattacattttcttattttctgtgttcttgattctttagcatttagggccttgctgaccctggagacactgcccctcccagagtttgctctcctagagaaagcaaatagctcacctaggagcgcgcctttcaaatgcaaagaaaccaatccagggcccactcccaccacctcctctatgtggctcttacgctctgtctcctgtccccctgctctggtcaccccagaccagggacaagatatctaggaacaacccctaagtcccagaggccgctgaaatgattcaagtcagcaagtgctaaacctgctcaccctttccttcccaggacagcacagttaaggcttccaccagcagccccctctctccacctactcatctcgcctcggtgcttccccaggtgggcccccatggagggagggccaccacacccagttaatttttatataaaggactggcctcatgtcttgtcatactcgattaaaacaaatcccaggtatcattaaaacaagtttgaattcccttctatccscaccctacctacactccagccataaatagctttaacacaagggaaaggatccctccttctccataccggccaggctggggaaacttagaagcagaagatactccatgaagagataaaatccagcatcaggggtcacaatgcctcgcaatgctgggcaagttcctgtggagagagcaccggccgagaataagagaggcaccatgctcactgggaagtgagttgttcggttatggtattttaaacatataagacagaacatcaagataatgcattccaaagataccatccagaagcaaatcctgtcatcagaaagtactatcagtagtgaaaacaatggtgtgtgtgtgagagagagagggaagggggaagagagagagaaggcctcccagccaaggtcaagttaagttggaggcatcattaaactatatttcaacataaacttaaaacatctcttggccaagtgtggtggctcacacctgtaattccagcactttgggaggctgaggtgggcagatcacttgaggtcaggagttcaagatcagcctgggcaaaatggcgaaaccctgtctctactaaaaatacaaaaattagccaggcgtggtgacacatgcctgtaagcccagctacttgggaggctgagatgggaggataacctgagctcaggagactgaggcttcaatgagcagaaatcacaccactgcactccagcctgagcaaaagagtaagaccctgtctcagaaaataattttttaaaaaaaatctctcatcttaccttccggaattaaaaattaaaggtatagttccttcccatgagcttctaaggcaactaacataatcaaaataaatatttacacaataatctagagatttcagcagattagaagatatattttatatattactcttaaatataaatttgtttataaaatttattcacttttatgccaattttgcagcaaattatttttatacaaagatatccaaatggaaaactgcaaatagttagccttttttacctaatttacatatgaaaaagtctaagttaaagtgcatattacacatgctctgacttcaacaggaaacagattagtacactttataaaacattgattatttttattataaatataataagtgctcattaaagacaatttgagaaatatcttaaaagtataataaataaagctttactcatattttaatttttcagttacaaccaatattaaaatttagatgaatttctataattttatgcataaatttttgcatctccttcaatttacctatatactatttgctcgtctcacatgacactgatggcagagatggccagtcatccaacttctacagagaagagatgttgctgcaaagtgatgacatgccctagggaacgcagcatccaggtgtcaagggatgagattcaggcttacaggacatggtgaaagtgaagatgccacctccaagtctggtccaagtaaacctcccatgtgatcctctcatactttcccttctctcccttttccctgttggacatcagcaccaggccagccataaatgccatgcatcgaaacatcagagcctcgttcaatccaagtgcc

SEQ ID NO: 60191 - DNA, 2451 bp, Homo sapiens
tttggatgatacttacactaaaagcccagacttcaccactacacaatatacccatgtaacaaaactgcaattgtaccccctaaatctataaaaataaaaatatacaaaaatatttttaaagaactctgtgtgtgtgtgtgtgtgtgtgtgtgtgtgtgtgtgagagagagagagagagagagaggtgtgtatccataggaaggcctagttgtaattgtgctataaataaaagtaatttgagcaggttacctctggttggtttctgcattctcatatctactccactggagtgaaagtactgaggtgcagtattggactttgtattaattacattttcttattttctgtgttcttgattctttagcatttagggccttgctgaccctggagacactgcccctcccagagtttgctctcctagagaaagcaaatagctcacctaggagcgcgcctttcaaatgcaaagaaaccaatccagggcccactcccaccacctcctctatgtggctcttacgctctgtctcctgtccccctgctctggtcaccccagaccagggacaagatatctaggaacaacccctaagtcccagaggccgctgaaatgattcaagtcagcaagtgctaaacctgctcaccctttccttcccaggacagcacagttaaggcttccaccagcagccccctctctccacctactcatctcgcctcggtgcttccccaggtgggcccccatggagggagggccaccacacccagttaatttttatataaaggactggcctcatgtcttgtcatactcgattaaaacaaatcccaggtatcattaaaacaagtttgaattcccttctatccgcaccctacctacactccagccataaatagctttaacacaagggaaaggatccctccttctccataccggccaggctggggaaacttagaagcagaagatactccatgaagagataaaatccagcatcaggggtcacaatgcctcgcaatgctgggcaagttcctgtggagagagcaccggccgagaataagagaggcaccatgctcactgggaagtgagttgttcggttatggtattttaaacatataagacagaacatcaagataatgcattccaaagataccatccagaagcaaatcctgtcatcagaaagtactatcagyagtgaaaacaatggtgtgtgtgtgagagagagagggaagggggaagagagagagaaggcctcccagccaaggtcaagttaagttggaggcatcattaaactatatttcaacataaacttaaaacatctcttggccaagtgtggtggctcacacctgtaattccagcactttgggaggctgaggtgggcagatcacttgaggtcaggagttcaagatcagcctgggcaaaatggcgaaaccctgtctctactaaaaatacaaaaattagccaggcgtggtgacacatgcctgtaagcccagctacttgggaggctgagatgggaggataacctgagctcaggagactgaggcttcaatgagcagaaatcacaccactgcactccagcctgagcaaaagagtaagaccctgtctcagaaaataattttttaaaaaaaatctctcatcttaccttccggaattaaaaattaaaggtatagttccttcccatgagcttctaaggcaactaacataatcaaaataaatatttacacaataatctagagatttcagcagattagaagatatattttatatattactcttaaatataaatttgtttataaaatttattcacttttatgccaattttgcagcaaattatttttatacaaagatatccaaatggaaaactgcaaatagttagccttttttacctaatttacatatgaaaaagtctaagttaaagtgcatattacacatgctctgacttcaacaggaaacagattagtacactttataaaacattgattatttttattataaatataataagtgctcattaaagacaatttgagaaatatcttaaaagtataataaataaagctttactcatattttaatttttcagttacaaccaatattaaaatttagatgaatttctataattttatgcataaatttttgcatctccttcaatttacctatatactatttgctcgtctcacatgacactgatggcagagatggccagtcatccaacttctacagagaagagatgttgctgcaaagtgatgacatgccctagggaacgcagcatccaggtgtcaagggatgagattcaggcttacaggacatggtgaaagtgaagatgccacctccaagtctggtccaagtaaacctcccatgtgatcctctcatactttcccttctctcccttttccctgttggacatcagcaccaggccagccataaatgccatgcatcgaaacatcagagcctcgttcaatccaagtgcc

SEQ ID NO: 60192 - DNA, 2451 bp, Homo sapiens
tttggatgatacttacactaaaagcccagacttcaccactacacaatatacccatgtaacaaaactgcaattgtaccccctaaatctataaaaataaaaatatacaaaaatatttttaaagaactctgtgtgtgtgtgtgtgtgtgtgtgtgtgtgtgtgtgagagagagagagagagagagaggtgtgtatccataggaaggcctagttgtaattgtgctataaataaaagtaatttgagcaggttacctctggttggtttctgcattctcatatctactccactggagtgaaagtactgaggtgcagtattggactttgtattaattacattttcttattttctgtgttcttgattctttagcatttagggccttgctgaccctggagacactgcccctcccagagtttgctctcctagagaaagcaaatagctcacctaggagcgcgcctttcaaatgcaaagaaaccaatccagggcccactcccaccacctcctctatgtggctcttacgctctgtctcctgtccccctgctctggtcaccccagaccagggacaagatatctaggaacaacccctaagtcccagaggccgctgaaatgattcaagtcagcaagtgctaaacctgctcaccctttccttcccaggacagcacagttaaggcttccaccagcagccccctctctccacctactcatctcgcctcggtgcttccccaggtgggcccccatggagggagggccaccacacccagttaatttttatataaaggactggcctcatgtcttgtcatactcgattaaaacaaatcccaggtatcattaaaacaagtttgaattcccttctatccgcaccctacctacactccagccataaatagctttaacacaagggaaaggatccctccttctccataccggccaggctggggaaacttagaagcagaagatactccatgaagagataaaatccagcatcaggggtcacaatgcctcgcaatgctgggcaagttcctgtggagagagcaccggccgagaataagagaggcaccatgctcactgggaagtgagttgttcggttatggtattttaaacatataagacagaacatcaagataatgcattccaaagataccatccagaagcaaatcctgtcatcagaaagtactatcagtagtgaaaacaatggtgtgtgtgtgagagagagagggaagggggaagagagagagaaggcctcccagccaaggtcaagttaagttggaggcatcattaaactatatttcaacataaacttaaaacatctcttggccaagtgtggtggctcacacctgtaattccagcactttgggaggctgaggtgggcagatcacttgaggtcaggagttcaagatcagcctgggcaaaatggcgaaaccctgtctctactaaaaatacaaaaattagccaggcgtggtgacacatgcctgtaagcccagctacttgggaggctgagatgggaggataacctgagctcaggagactgaggcttcaatgagcagaaatcacaccactgcactccagcctgagcaaaagagtaagaccctgtctcagaaaataattttttaaaaaaaatctctcatcttaccttccggaattaaaaattaaaggtatagttccttcccatgagcttctaaggcaactaacataatcaaaataaatatttacacaataatctagagatttcagcagattagaagatatattttatatattactcttaaatataaatttgtttataaaatttattcacttttatgccaattttgcagcaaattatttttatacaaagatatccaaatggaaaactgcaaatagttagccttttttacctaatttacatatgaaaaagtctaagttaaagtgcatattacacatgctctgacttcaacaggaaacagattagtacactttataaaacattgattatttttattataaatataataagtgctcattaaagacaatttgagaaatatcttaaaagtataataaataaagctttactcatattttaatttttcagttacaaccaatattaaaatttagatgaatttctataattttatgcataaatttttgcatctccttcaatttacctatatactatttgctcgtctcacatgacactgatggcagagatggccagtcatccaacttctacagagaagagatgttgctgcaaagtgatgacatgccctagggaacgcagcatccaggtgtcragggatgagattcaggcttacaggacatggtgaaagtgaagatgccacctccaagtctggtccaagtaaacctcccatgtgatcctctcatactttcccttctctcccttttccctgttggacatcagcaccaggccagccataaatgccatgcatcgaaacatcagagcctcgttcaatccaagtgcc

SEQ ID NO: 60193 - DNA, 2451 bp, Homo sapiens
tttggatgatacttacactaaaagcccagacttcaccactacacaatatacccatgtaacaaaactgcaattgtaccccctaaatctataaaaataaaaatatacaaaaatatttttaaagaactctgtgtgtgtgtgtgtgtgtgtgtgtgtgtgtgtgtgagagagagagagagagagagaggtgtgtatccataggaaggcctagttgtaattgtgctataaataaaagtaatttgagcaggttacctctggttggtttctgcattctcatatctactccactggagtgaaagtactgaggtgcagtattggactttgtattaattacattttcttattttctgtgttcttgattctttagcatttagggccttgctgaccctggagacactgcccctcccagagtttgctctcctagagaaagcaaatagctcacctaggagcgcgcctttcaaatgcaaagaaaccaatccagggcccactcccaccacctcctctatgtggctcttacgctctgtctcctgtccccctgctctggtcaccccagaccagggacaagatatctaggaacaacccctaagtcccagaggccgctgaaatgattcaagtcagcaagtgctaaacctgctcaccctttccttcccaggacagcacagttaaggcttccaccagcagccccctctctccacctactcatctcgcctcggtgcttccccaggtgggcccccatggagggagggccaccacacccagttaatttttatataaaggactggcctcatgtcttgtcatactcgattaaaacaaatcccaggtatcattaaaacaagtttgaattcccttctatccgcaccctacctacactccagccataaatagctttaacacaagggaaaggatccctccttctccataccggccaggctggggaaacttagaagcagaagatactccatgaagagataaaatccagcatcaggggtcacaatgcctcgcaatgctgggcaagttcctgtggagagagcaccggccgagaataagagaggcaccatgctcactgggaagtgagttgttcggttatggtattttaaacatataagacagaacatcaagataatgcattccaaagataccatccagaagcaaatcctgtcatcagaaagtactatcagtagtgaaaacaatggtgtgtgtgtgagagagagagggaagggggaagagagagagaaggcctcccagccaaggtcaagttaagttggaggcatcattaaactatatttcaacataaacttaaaacatctcttggccaagtgtggtggctcacacctgtaattccagcactttgggaggctgaggtgggcagatcacttgaggtcaggagttcaagatcagcctgggcaaaatggcgaaaccctgtctctactaaaaatacaaaaattagccaggcgtggtgacacatgcctgtaagcccagctacttgggaggctgagatgggaggataacctgagctcaggagactgaggcttcaatgagcagaaatcacaccactgcactccagcctgagcaaaagagtaagaccctgtctcagaaaataattttttaaaaaaaatctctcatcttaccttccggaattaaaaattaaaggtatagttccttcccatgagcttctaaggcaactaacataatcaaaataaatatttacacaataatctagagatttcagcagattagaagatatattttatatattactcttaaatataaatttgtttataaaatttattcacttttatgccaattttgcagcaaattatttttatacaaagatatccaaatggaaaactgcaaatagttagccttttttacctaatttacatatgaaaaagtctaagttaaagtgcatattacacatgctctgacttcaacaggaaacagattagtacactttataaaacattgattatttttattataaatataataagtgctcattaaagacaatttgagaaatatcttaaaagtataataaataaagctttactcatattttaatttttcagttacaaccaatattaaaatttagatgaatttctataattttatgcataaatttttgcatctccttcaatttacctatatactatttgctcgtctcacatgacactgatggcagagatggccagtcatccaacttctacagagaagagatgttgctgcaaagtgatgacatgccctagggaacgcagcatccaggtgtcaagggatgagattcaggcttacaggacatggtgaaagtgaagatgccacctccaagtctggtccaagtaaacctcccatgtgatcctctcatactttcccttctctcccttttccctgttrgacatcagcaccaggccagccataaatgccatgcatcgaaacatcagagcctcgttcaatccaagtgcc

SEQ ID NO: 60194 - DNA, 823 bp, Homo sapiens
tcctttgagcccaggagttccaggttacagtgagctgtgatgcgccactgcactgcagcctgggcaacagagtgagaccccatctttaaagaaaaaaaaaagaagaatctgagacattgtaagaaaaattccttcatctcctcatcaagtgtttattgggtgcctgctgtgtgcccagccatatgctagaggctggggatataggaataaaagctaccagccatgccctaggtcagtgcctagttctgggtcagcaaatagcatccaacttgttcagtgctattctatcattaaaacataagctggagttctatttgtttgcacattttacaaaaataatgtgtaaatagatgattctataaaaatgtccaaacaatgctgttaggtagacatcactctacacacttgttttgtgggtgacattgcctcactaaggagcagctccagcagccaaccagaatcaaagctgtcctctttcatggggcyctgggcttacccaggaaagaacaaaataaattgacacaatgtaggctaatcatgatattgaaaacagaaaggacttgggagcctcctgaaataaattgttaaaaattacataaacctatttatggttggatttataataagtgcctgtgtgtttgttttcttgacagctctgtcaaccaggctggagtgcagtggtgcaatcatggctcactgcagcctccccatcctgggctcaatcgatcctcccactgcagcttcctgagcgggtagaactacaggcatgcaccaccactcctggctaattttttttcctttggtatttttttgtagagacagg

SEQ ID NO: 60195 - DNA, 534 bp, Homo sapiens
tgaacactgtttaaccactaaggcaattttgaggcagaattattgtctttgatctgatttatatttayatagtcaccattcttcccaagagctcatcccatcaaccgtttccagattcccaaaaggtaggtagacaatctcatctccatccatgataacttaaaatttcaggctccattaagttgctgctttaaaatgcagccagtgactatgtgccccagacttctcatgaatctgtggaccatggaagatgttgactgatgagactgctgagggtctcagccctaacccgaggctcaggaaatagtggcagtgattcagcaggatgactgggccaacatggaaacaatagcaaacggtatatcttatttttgcatctgtcaacatctttcagaactcaggtcatgtgccagggtgtttagctcagcttgactctagacaaaacagagtcctactaatctcattcattactttccagctcagtttaccccttaccccacaccactatcacctatttttcaaagacaacaaaat

SEQ ID NO: 60196 - DNA, 534 bp, Homo sapiens
tgaacactgtttaaccactaaggcaattttgaggcagaattattgtctttgatctgatttatatttacatagtcaccattcttcccaagagctcatcccatcaaccgtttccagattcccaaaaggtaggtagacaatctcatctccatccatgataacttaaaatttcaggctccattaagttgctgctttaaaatgcagccagtgactatgtgcyccagacttctcatgaatctgtggaccatggaagatgttgactgatgagactgctgagggtctcagccctaacccgaggctcaggaaatagtggcagtgattcagcaggatgactgggccaacatggaaacaatagcaaacggtatatcttatttttgcatctgtcaacatctttcagaactcaggtcatgtgccagggtgtttagctcagcttgactctagacaaaacagagtcctactaatctcattcattactttccagctcagtttaccccttaccccacaccactatcacctatttttcaaagacaacaaaat

SEQ ID NO: 60197 - DNA, 534 bp, Homo sapiens
tgaacactgtttaaccactaaggcaattttgaggcagaattattgtctttgatctgatttatatttacatagtcaccattcttcccaagagctcatcccatcaaccgtttccagattcccaaaaggtaggtagacaatctcatctccatccatgataacttaaaatttcaggctccattaagttgctgctttaaaatgcagccagtgactatgtgccccagacttctcatgaatctgtggaccayggaagatgttgactgatgagactgctgagggtctcagccctaacccgaggctcaggaaatagtggcagtgattcagcaggatgactgggccaacatggaaacaatagcaaacggtatatcttatttttgcatctgtcaacatctttcagaactcaggtcatgtgccagggtgtttagctcagcttgactctagacaaaacagagtcctactaatctcattcattactttccagctcagtttaccccttaccccacaccactatcacctatttttcaaagacaacaaaat

SEQ ID NO: 60198 - DNA, 568 bp, Homo sapiens
gctgcaatcgtggaccatgtgaacagtgctccttggaggcctcctcccgagaagtgtgataggctctctccttggtgttgctattacatgactcatacacgacttataacacttcctcatgccctgttgatactaagtgactcccatctcctctgccaacgatgagggcctgtgggtgagggcaaaaaatgtgagcatcaccatatggcagagcaatagcacacgcactgggagttgctggtggccaycttccactcatccaatcaaccaaggagcagcagaggtcatctgcagagtgagaaccctgaaaaagaagcggagagagaaagagagaagagaggagagaataccccacgaatcccagcagcctcccagcgccctgtcccattctctcctgaggcccagctgcccactgccctcaggtctgtaagtcattcccacatcttacagtcaattccctgctacgcacaccagctgacacttaaaataaaatgggcttaagcaaccaactccattcacacagcgataaggaaattcttcagcccttgtcaacttcaacctgttataa

SEQ ID NO: 60199 - DNA, 933 bp, Homo sapiens
gcatcattcatttacttaattgttcaattctattatacatctatagtagtagcagatttcttaacacatacttccattggaaacaactttatcaactagagtacagagctaatgactgtttattttgcctttaagtttataattcatttctaagtcatggataattttttaatgtgaaaatatctttctgctatgtggggaatagatttaagaagggtagagaaaactaatggggaagctaagtccagctgaaaagtaatggtggtttggtctaggataaataaaagcaaacatttaagttcttattagtaagttctatgtaaaagttagttatttttgtaccatgagccctyctaaccacttataatccttaactcactgaagcttacaaacacctgtgaactctactatcactgtccccatttcatagatgaggaaactgaggcacagagaggtccaggaagggttagaattagaattcagactctagcaatcaggttgtaggtcctgagcttttaaacagtttcaatatttcctctcagttaaatctcccaactcttgactgtatgaggggcaataattctctcattttttgcaaagtactagcatacactgttatgcactgtaggatattcctaagtaggtaagtaaacatccctgattgagaaaagattaacgcaccaaaccaaaaccaacacaccaaacccaactctgcttaaagtggtggaaagatcaactctgcttggtggtggaaagatcagtgctttactgaacaggctgccatgccgctgggccttccatcatttatggaccacagaggagaaagatctaattcagcagctatgagctgtgatggtgcctgctgccctgaggtagctataaactacctcagagcacaggttaagtgcatccaaaccaagaagaaaataatca

SEQ ID NO: 60200 - DNA, 933 bp, Homo sapiens
gcatcattcatttacttaattgttcaattctattatacatctatagtagtagcagatttcttaacacatacttccattggaaacaactttatcaactagagtacagagctaatgactgtttattttgcctttaagtttataattcatttctaagtcatggataattttttaatgtgaaaatatctttctgctatgtggggaatagatttaagaagggtagagaaaactaatggggaagctaagtccagctgaaaagtaatggtggtttggtctaggataaataaaagcaaacatttaagttcttattagtaagttctatgtaaaagttagttatttttgtaccatgagcccttctaaccacttataatccttaactcactgaagcttacaaacacctgtgaactctactatcactgtccccatttcatagatgaggaaactgaggcacagagaggtccaggaagggttagaattagaattcagactctagcaatcaggttgtaggtcctgagcttttaaacagtttcaatatttcctctcagttaaatctcccaactcttgactgtatgaggggcaataattctctcattttttgcaaagtactagcatacactgttatgcactgtaggatattcctaagtaggtaagtaaacatccctgattgagaaaagattaacgcaccaaaccaaaaccaacamaccaaacccaactctgcttaaagtggtggaaagatcaactctgcttggtggtggaaagatcagtgctttactgaacaggctgccatgccgctgggccttccatcatttatggaccacagaggagaaagatctaattcagcagctatgagctgtgatggtgcctgctgccctgaggtagctataaactacctcagagcacaggttaagtgcatccaaaccaagaagaaaataatca

SEQ ID NO: 60201 - DNA, 661 bp, Homo sapiens
atataatttatgatctgtaattaatgatatcatacagcataaataaaaacaaaagatataacaaactttaacttaatggggaaatctatttctgaaactggaagaaccatctaccatcccagagcatagaactgagagaaatccaggcagaaaacaggaaagacctctcctaagtagaacataggtgaatatggattgtgttttttttttctgtggccagagaaacatgtttactttgtaactcctggttgtacattacctaagcagtgctgttacataaatcaccttcacatatccatgctattgctgagactgaaaacattagtctttaaaaaaaactgatttctgttgttattactcaaayttagttgttgattaccacaaacaaattaaaaacataacatatttattgagtctatcttatgggaaaacagatgaatgttttagcctaaattaaatttctgttatgatagtctcacatttctatgcaaaaattataattcccaattatgtaactcataatgacaatttaacatagtttgacaattatgttatacaacttgaaatacttagaaaaacattgcataagtatatgtgtaatctgagaatatgtttctaagtaacatgttaagtaatataataattattccagaggaaatta

SEQ ID NO: 60202 - DNA, 661 bp, Homo sapiens
atataatttatgatctgtaattaatgatatcatacagcataaataaaaacaaaagatataacaaactttaacttaatggggaaatctatttctgaaactggaagaaccatctaccatcccagagcatagaactgagagaaatccaggcagaaaacaggaaagacctctcctaagtagaacataggtgaatatggattgtgttttttttttctgtggccagagaaacatgtttactttgtaactcctggttgtacattacctaagcagtgctgttacataaatcaccttcacatatccatgctattgctgagactgaaaacattagtctttaaaaaaaactgatttctgttgttattactcaaacttagttgttgattaccacaaacaaattaaaaacataacatatttattgagtctatcttatgggaaaacagatgaatgttttagcctaaattaaatttctkttatgatagtctcacatttctatgcaaaaattataattcccaattatgtaactcataatgacaatttaacatagtttgacaattatgttatacaacttgaaatacttagaaaaacattgcataagtatatgtgtaatctgagaatatgtttctaagtaacatgttaagtaatataataattattccagaggaaatta

SEQ ID NO: 60203 - DNA, 1155 bp, Homo sapiens
tttattcttttccaaatttatattccattacttatgggcattttatttctctatatttctcaaactacgacattattattgctttttatattcagtacttcttacatctactcatatttttccactataattaaaaagaattccttcccatgtctctgatttttgagctgtcttcatttccttttttatgaaaatagtcctttataattttcttcacataaatttgttcatgattcgttctctcaggttttatyagtctgtaaatatctttggccattcaaccttggatgataattttgctagacataaaatcctagagattggcatttaaaaatttttttcttctagggcattgaagacacattttataggttgaatgatatgcccctcaacccaccccaaaattaatatgttgaagtcttaaccttcagtaccagaatgtatccttattttggtataggttcttatttggcaataaaaatatccaagttaaaatgagattaatagggtggaccatacaatatgacccctgtccttgcaaaaatcaggaaatttggacacacagatccatcaaaagggaagatgatgtcaagagatattggaagaaaagaagtccagaacaaatccttttctcagagcctttaagatggaagcatttatgctgacacctttgttttagacttctagcctccagaattgtgagacaatacgtttgtattgtttaagccacccagactgtggtctttattacagcagccctggcaaggcacaccatattccactattttatttccgtttcatattgagaggtcagtattaggttaaatattgctctttgaaggtaatttatctttattttctcagtgttgtttcttttttattttggtgttctgcatattcactaagatgcgcttaggtggggattttatttcttgggagtaggctgggcatacattgaacttcttgagtttgtgtctttcattatttcattatgaatttgtgtgtttcattcagtctcctctctgtcaggaataccagtaaatttaaattagaagtacatgtatgatcaagtgtttcagctacagttgttgaacacattttcttctcacagataaattgtttggcatccttgtaaaataatcagttgaaccatgt

SEQ ID NO: 60204 - DNA, 1155 bp, Homo sapiens
tttattcttttccaaatttatattccattacttatgggcattttatttctctatatttctcaaactacgacattattattgctttttatattcagtacttcttacatctactcatatttttccactataattaaaaagaattccttcccatgtctctgatttttgagctgtcttcatttccttttttatgaaaatagtcctttataattttcttcacataaatttgttcatgattcgttctctcaggttttattagtctgtaaatatctttggccattcaaccttggatgataattttgctagacataaaatcctagagattggcatttaaaaatttttttcttctagggcattgaagacacmttttataggttgaatgatatgcccctcaacccaccccaaaattaatatgttgaagtcttaaccttcagtaccagaatgtatccttattttggtataggttcttatttggcaataaaaatatccaagttaaaatgagattaatagggtggaccatacaatatgacccctgtccttgcaaaaatcaggaaatttggacacacagatccatcaaaagggaagatgatgtcaagagatattggaagaaaagaagtccagaacaaatccttttctcagagcctttaagatggaagcatttatgctgacacctttgttttagacttctagcctccagaattgtgagacaatacgtttgtattgtttaagccacccagactgtggtctttattacagcagccctggcaaggcacaccatattccactattttatttccgtttcatattgagaggtcagtattaggttaaatattgctctttgaaggtaatttatctttattttctcagtgttgtttcttttttattttggtgttctgcatattcactaagatgcgcttaggtggggattttatttcttgggagtaggctgggcatacattgaacttcttgagtttgtgtctttcattatttcattatgaatttgtgtgtttcattcagtctcctctctgtcaggaataccagtaaatttaaattagaagtacatgtatgatcaagtgtttcagctacagttgttgaacacattttcttctcacagataaattgtttggcatccttgtaaaataatcagttgaaccatgt

SEQ ID NO: 60205 - DNA, 634 bp, Homo sapiens
tgatcatggaagctccccgtggggtccaggtgagtgctgctgcaggagacttcaaggccacctgcaggaaggagctccatctgcaatctacagaaggggaggtgagtcccagaaagttggaccctcgccctatactgcccactttgaaaacacaagtatttagatgtcctatttataattgacttgtgaaggaatatctttcagtagaaaataaatggagttgtaacttaggaaagyaatattaggttaccatatctcatattcaagaagtatatatttgggaggccaaggcaggcagatcacgaggtcaggagatcaagaacatcctggctaacacggtgaaaccccatctctactaaaaaaaaaaaaaattatatatatatatatatatatatatataaagttagccaagcatagtggcaggcacctgtagtcccagctacttgggaggctgaggcaggagaatgtcgtcaacccattcactcccattcacgaacccatgggaggcggagcttgcttcataccactgcactccagcctggggcgacagagcgagactccgtctcaaaacaaacaaacaaacaaacaaaagtacatatttgtgtaatttaaacttttccacaaagcacttctt

SEQ ID NO: 60206 - DNA, 634 bp, Homo sapiens
tgatcatggaagctccccgtggggtccaggtgagtgctgctgcaggagacttcaaggccacctgcaggaaggagctccatctgcaatctacagaaggggaggtgagtcccagaaagttggaccctcgccctatactgcccactttgaaaacacaagtatttagatgtcctatttataattgacttgtgaaggaatatctttcagtagaaaataaatggagttgtaacttaggaaagtaatattaggttaccatatctcatattcaagaagtatatatttgggaggccaaggcaggcagatcacgaggtcaggagatcaagaacatcctggctaacacggtgaaaccccatctctactaaaaaaaaaaaaaattawatatatatatatatatatatatataaagttagccaagcatagtggcaggcacctgtagtcccagctacttgggaggctgaggcaggagaatgtcgtcaacccattcactcccattcacgaacccatgggaggcggagcttgcttcataccactgcactccagcctggggcgacagagcgagactccgtctcaaaacaaacaaacaaacaaacaaaagtacatatttgtgtaatttaaacttttccacaaagcacttctt

SEQ ID NO: 60207 - DNA, 634 bp, Homo sapiens
tgatcatggaagctccccgtggggtccaggtgagtgctgctgcaggagacttcaaggccacctgcaggaaggagctccatctgcaatctacagaaggggaggtgagtcccagaaagttggaccctcgccctatactgcccactttgaaaacacaagtatttagatgtcctatttataattgacttgtgaaggaatatctttcagtagaaaataaatggagttgtaacttaggaaagtaatattaggttaccatatctcatattcaagaagtatatatttgggaggccaaggcaggcagatcacgaggtcaggagatcaagaacatcctggctaacacggtgaaaccccatctctactaaaaaaaaaaaaaattatatatatatatatatatrtatatataaagttagccaagcatagtggcaggcacctgtagtcccagctacttgggaggctgaggcaggagaatgtcgtcaacccattcactcccattcacgaacccatgggaggcggagcttgcttcataccactgcactccagcctggggcgacagagcgagactccgtctcaaaacaaacaaacaaacaaacaaaagtacatatttgtgtaatttaaacttttccacaaagcacttctt

SEQ ID NO: 60208 - DNA, 729 bp, Homo sapiens
cacatacatctctatatgtgtctgtgtgtatgaatatatatgtgtgtgtgtgtgtaaacactgcaatatgtggtgtatgtatacacaaacacactgctataacaaattgtgacaaattcagaggcttaaaataaaacamctttactatcttaaagttccggaggtcagaagtctaaaattgggtgtctttagtgctgtgtcctttctgaaagtttcaggaaataatccgtttccttgcctttttcagcttccagagggtgctgcattccttggcccaatgctcctttctttcattactccaaactgtttccatcatatctcctcctactaaccacattcttcttataagttccctttgattatattgggacaatccatagaatccagtgtgattccccgatctcagtatatctaacttaatcatatctgcaaagtcactgtaaggtaacatattcacaggttttgggggtcaggatatggacatatttgaggggccattatttaatctactacagctactccctcctccaaaaaaaaaaaaaaaaaaaaaacaacaaaggcacattttaaggtcaattagattaagcattggagttaacccagagagggcttattggaatatgaggccaatgacccatactctatgggccggggctgataccgatagacactggaagactgaccacctgtactgctctcaaagaagccagagctgtggaccacctgttt

SEQ ID NO: 60209 - DNA, 1338 bp, Homo sapiens
aagaagggagttcatagaagagactaatatagacaatggtatattcaagggcacttaacttcaattggtcaagttaagtgtctctcgaattatgcttcttggactgcccatgtcagaatcatccagcaagtgggttaaaatgcagatttatcagctccattcaagacttaatcaatcagaatctctgagaaaagagttccagaaatctgcatcttaaaacacacttgtcacccattcaagtgattctgttgtatactaaaatgtatgaatcactgctacattctgcagcctttatgaactaaagagttcctctcattgtgtttgaagattaagttactaagcctatgtgttctaaggtctcttttccctatcagcccagagcatggagctggaggaagtggaagcaaggctgaagtagacaaagtaggtatggaaggtccttgcataaagaggggctggagttctaaatacaaggaagccgaatacaacggttggaacaaactggaaatcattatgttggcagacagacaaggcagacaaaaagcggaggactcaaaaaaagcagacaaaaagtgaaggattgccaaatagctaatcaatgtatgtggttaaaacttcatgttaaaaactagaacattgggcatggtggcatgcatctgtagttcctgctactctggaggttgaggcagggggatctgtggagccaagagttggagacagccttggcaacatagcaagaccctgtctaaaaaaaaaaaaaaattaaataaggaacaaagtccacaccaggcagatcaggaaaatggaagatcagatctgggatggctacaacatagagaatccaactatataaagctaagtttgtcctcagccaacagtctttaattttttttttctaaataacaggatctatggacctaaattgggctagactgagacttgaagacaattaggagaggagtgaagtagaaaattaaaatacgtagtactacccagccattatttccttcctaagaaacagtatacagtttaagttcctcagcactgtaggamttgtttaaataaaaacaacagttaatattcattgaatccctctatgtactaggtacagttttaagcatcttgcatgtattcactcatttaatcctcataacaatcctatgaaataggtactattgatattgctgtccttcagatgagaaaacagtaaagagagggtaagcaacttgctcaaggccagggtggccccaagtgcagagtcaggatttgaactcaggcagtctaaattcagggtctgaattctaacccactatttatactggctgctgcaacataagt

SEQ ID NO: 60210 - DNA, 1288 bp, Homo sapiens
gcattgattcatcttagctgagtgaattaataatgaaaatgtgatatgtaaatagggcaaggaacagttaacaagttacattaatgacttttacatttttacatttattatttatcatacatatttattataatatatccataactaatattactggggatacacatctttgaaaaatatgtcattgttacatttcttcaaactattattaaacactttttgaatactttcctttgtaggcaagttgatttttctagagtttgacaataatcaacatttaatattatttctcttgtgcacctatttagaaagccccttttttgcccaggaacagtacttcagcacctttttccatatagttgcaaattattaattaaggaaatattcctaatttagtctctaaattgagttcacagtgcttaacttagaaagacataaccacctatttttgttttccaaaatgttttattggtstccttttcaatttaaaaattacaaaactatttatgctcactgtaacaagtcaagtgctataggaggatattaacaactttattcatttaatccaaatatatttgttgaagtcccactgtattccaaacaatctgataaacaggtggatataacgaagtggataggtaggaaatagaaaaatcacattcattcattcaacaaacactgctatacatcaggcactaaattatgccctgaggataccaaaaagagtaagatatcatgcctgcttttcaggaatttgctgcctggtgaaaacataaagaccatacaacatgatctctactggaaagaatagaacacatggtctctctaaggattctagggaaattaggggattctttgctgggtaaggctgaggtaatttaggccaaagagccagcctagtgaaatgtttacacaactgagagtgggattatcaaggaagatgacacaggtggtagtcaaaaataaagtcaaaggtcagagccagagagcaaatctctctgagggatgtagtagaggtcagagactgggaaggcacagagctgggagagataagcttgagatacataacagtagtgagttcagccagaagttgtggccagtataagagtgaccaaggtctgtttttatgtggtgtcaactgtggaatatggaaccgggactggtcaattaaagaagcccagtaggaccacacagattgatgtcaagagcacatgaggtttgtttcataaagaatgagtagtaatctgccaggcagtcaaagtgaaggaggggcagaattggccaatgc

SEQ ID NO: 60211 - DNA, 748 bp, Homo sapiens
atcaccaccaacactatcatcatcactttatcatctccaccagcaccttcatcgttattataaagcctataaaagaaaacattattattttattttactaataaggaaactaacagagaaatattaaacaaatcacccaaagccacccagcttacaaatggcaaagtcagcctttaaactaaaacatatgaaacctcaaagactgtataattcaaattgcgtgactccagcatacacagtggttaggctacaattttatcccatgttgcctacatcatgatgctttagttttatttcaaaatttaagcttgttataaaacttctgtaaaatagcatctgattcttgtgagaatccatacctatgccgattattcagatgaagaaaatgaagctaagctaacccaaataggttaaccaattgctgataaatcttggcaagagacaasaaggggttagaactcatgtatatgaaactcaggggcatgacactgcacacagggtgggaagttatatttgaatcaaatcagctctgctaattccttagggattttgcacacaacattattttcaaactctcaaataaaaaagggaatgaaaggattactatagaacaaaaacatcaacccgagatatgttgcatttaaaagcaataagcatggctttcaaggaactcggtaacacgagggactctgagcccaggagacagtttgtagaaacaaaattgcttctgagaaaaacctgttttaaa

SEQ ID NO: 60212 - DNA, 948 bp, Homo sapiens
tgcttyttttggaaatagaatagtaccttacctgtgagaaggttgacgagatcccatctgcacggccattgtaaatataaatagcaccttgcaagtcatcttcttgtggagctccgatagcaacatctatccaataatttaaacaatggaaaaataaattcttgatacaaagaatgcaacttcgaaaactaaccttatgaaccttaattcatatcacataagaaaactctcttttatgaaaaataacagtcttctcagacagaaaaaaataaaatactatcatcatcatatacaggattgcacacaatagtttgcacatggaagaaagcagagtggaagcatctgagaggcagtgtaacaaaatgattagagcacgggctctacagccagaccactggggtctgatccgagctctgccactgggcactgccacactaggctgggcccatttcttaatctgtgtttcaattccctcacctatataatgggatcataataaaaaccactctcagcataaaaggatatgacctatgtaaagtgcttagagcagtgcctcgcatgtaataacctcataatctatgaatatttgatcataagaatttttattttgggagtctagacttaccttatttgcaaaatgacttttaattcctattccaatgaaaatgattaaggtatctgttagagatatctgcacacacagacacacaggatttcagaaaaaggatttgttctgtaaaataatgattatatcacctttctgtattattgataattatgtcagactatgataccaagggaaaaaagatctgatcaactaatataagaaaacctgagtaaatgacatggttgcttaaatgctataaatatatagcacaaaggagaaaaataatattctacagttgcaagagcatttcattattttaccaagtattgtctatttatgca

SEQ ID NO: 60213 - DNA, 948 bp, Homo sapiens
tgcttcttttggaaatagaatagtaccttacctgtgagaaggttgacgagatcccatctgcacggccattgtaaatataaatagcaccttgcaagtcatcttcttgtggagctccgatagcaacatctatccaataatttaaacaatggaaaaataaattcttgatacaaagaatgcaacttcgaaaactaaccttatgaaccttaattcatatcacataagaaaactctcttttatgaaaaataacagtcttctcagacagaaaaaaataaaatactatcatcatcatatacaggattgcacacaatagtttgcacatggaagaaagcagagtggaagcatctgagaggcagtgtaacaaaatgattagagcrcgggctctacagccagaccactggggtctgatccgagctctgccactgggcactgccacactaggctgggcccatttcttaatctgtgtttcaattccctcacctatataatgggatcataataaaaaccactctcagcataaaaggatatgacctatgtaaagtgcttagagcagtgcctcgcatgtaataacctcataatctatgaatatttgatcataagaatttttattttgggagtctagacttaccttatttgcaaaatgacttttaattcctattccaatgaaaatgattaaggtatctgttagagatatctgcacacacagacacacaggatttcagaaaaaggatttgttctgtaaaataatgattatatcacctttctgtattattgataattatgtcagactatgataccaagggaaaaaagatctgatcaactaatataagaaaacctgagtaaatgacatggttgcttaaatgctataaatatatagcacaaaggagaaaaataatattctacagttgcaagagcatttcattattttaccaagtattgtctatttatgca

SEQ ID NO: 60214 - DNA, 619 bp, Homo sapiens
ctcttcttcccagactgcattaaccactcatggtgatgactccggagcttcattcccagacctgattctctatagactccagacctttgcgttcatatatgtgatgactgtctttagacttggccatatcacagagccttcaaactaatatctttggttgggcgtggtgactcatgcctgtaatcccagcactttgggaggctgaggagggcggatcacttgaggtcaggagttcaagaccagcctggccaacatggtgaaacccccatctctactgaaaatacaaaaattagccgggtgtggtggcaggtgtctgtaatcccagctactcgggaggctgaggcaggagaatggcttgaacccaggaggcagargttgcagtgagccaagatcttgccactacactccagtctgggtgacagagcaagactccatttcaaaacaaagaaacaaacaaaaaaaccccaatatgttcaagttgactttactttagtttccctataacatcttcgtccccaaatctttactccattgtcagtgtcccctgattaatggcattaccacatacttgatgcccaactgagaaatttagatgtctttacctatctttcctcaacac

SEQ ID NO: 60215 - DNA, 528 bp, Homo sapiens
tacgtgaagagaaagaatgagaaatgcatctgagcctcactccaccaaaacaacacactttcccacctctcactccactccaatgaatgtctatgagttttcagactccctgtcaatggtcttaggtaaatgcagtagtatctgctttttagaatttataagacaagggccatgctgggtgcattggctcatgcctgtaatcctagcactttaggaggctgaggcaggcagatcacctaaagtcaggggtttgagaccagcccaaaatggcaaaaccacgtctatattaaaaatacaaaaattagccgggcatggtggcataagcctgtaatcccagctactcagaaggctaagacaggagaatcgcttgaacccaggaggcggaggttgcagtgagccaggattgcaccactgcactcyagccttggtgaaagagtcagactctgtctcaaaaaaaaaaaaaaaaaaaagaagaagacaatggccagtgccttaaaatgagcagaaaattttctgtcaggtatcctt

SEQ ID NO: 60216 - DNA, 1081 bp, Homo sapiens
gtgatgtggggccagtaaagtcaatctgcagcaaagccatagcgataaatgaaggcttcatagactacaaggtgagtccttccctaaaaggcaggaggaaaggacattccaaggttaaaattagctaacatttattgattcattgatgtaggcactctttccacatacaagtaaggaaacaggctrtagcttgcagatttgggatatggacaagttggtgtggttcttgctcctggtaagtctctctggactacaatggcaagtgatctggggcagctggtgcccagtgaaagtggaaggaacaagaaggctgaatgtgggggtgaggccagatcaggggcagcatcaaaactcgtggaagctgctgactttgtcctgtgagtgacggaagaccactgaatagtagacaagagggggacaggggaatgagttggtcagagttgagttataaaaaatatgactccagtggaaacgacaaaaatgacttggggagagagagagagagattagtaccactttcactcatccccccatccctctaccccttgctcatatgcacacacacacacacagaaagagagaaaatggaggtatagctttcaagttgtcttgtttgtgtggctatgaactccaaagttttggcaaatacatctaaattacatatataatagctttttttttttttcaccagagagatccttcctgaagaaggctaaagtgttccttgtagcccaggattgatcactccttgtaattgaaacctctcaaaatagtgtaacgtggctctccacttgcatgattcctttaaggagatgttgaaagccatgtaggaaatggaccgtgcttagtcagttccagtactgtgtttggatgtaaccaatggttggtaatttaataaatgaaacagatggatggatggatggattaattagtggatgaataaaagaagggatgagtgagtggatggtgggtgggtggatggatgaattagtggatggatagatgaatacatagatggatgcgtggatgagtggatggtaggtggatggatagatggatggatggaaacatgcatagacaa

SEQ ID NO: 60217 - DNA, 627 bp, Homo sapiens
gtggtgtaagttgggcagaggagagaccgttctccaaagagaagaggcttcattaagggcaagaacagttcctgcctagttggcttattttcagaaagcaaagagcagttactgtaaggaagctggctgtctgggccggcagctttatcaatgaataatttcctgaaaggaagagaatctgtggagaccttacattatatttgatctcagtgcacgtacacagtatgcaggactatctttgattcgagggaggtgagataattgtttcccaaacagactctccggctggagagcgtgctccctcccattctgttgacccatacaccagaagccccacgtctgccccagacaattatcctgttttgctagggaacaaattgctcttttggggtaattctgagcaagtttgccaagttcacaaccatcccaggggagcctcagggggaaaagcactctccaaatcccctctctggcccttccaaaggaaagcagktcattttttaaagaattccaatgaaagcagctcattctgaatgatccatcccaccttcagagaggcctcctgggcaatttgttggttcctcgtgtttgtctgatactagggagccaatttcccatgcaactcat

SEQ ID NO: 60218 - DNA, 1115 bp, Homo sapiens
  misc_feature (1)...(1115): n = A,T,C or G
gcaaaaactttctgccatctgtacatcgtttatttactctcttgataatttattttgctgtgcagaagctttttagtttaagtctcacttgtcaattgttgtttttttacaactgcttttatttatttatttattttatttttgttattgttgttttgagacagggtctcactctgttgccctggatggagtgcaacctcccaggctcaggaaatcctcccacctcagcctcccaggtagctgagactacaggcacaygtcactacaactggctaatttttctttaaaatattttgtagtcatgtggtctcactatatttcccaggctcaaattccttggttcaactgatcctccaatcttggcctcccaatgtgttaagattacaggcatgagctaccatgcctggcctgcaatagcttttgagtactcatctataaattctttcccagggaagaggcaaaattctttttaatagttagcacacactgcaaacaactcagatttctagctatcagttttggagggttttaacagtatgtgatgaactgtaagggggctgacctattagatctttcaaatattgcttcattctttataaacattgctgtttctgacacctcatctgcaaagcaacctagctaaagttctagtgatttacctggtttctgcttatggntagtcacacatttctttcctttaatgcttcatataagtatgcgtctctgtaactggcatctaaaagagatggaatctttggcccattcaggacaacttcttataaaattctacttattataatggggtcaacctgagacattccacaggttggtgaaaaaaaatgcccacatctagaacaatttcattaatactcacgacatttgtgcagctgtttttgaacctatatcccagcactctccttacaaccacctctgaattccttgtcattaatatgcaataaaatggagattcatttattgcctgggtaacaatataatttgttcaatatattgctactgattctcatagaattctcccaaatctcattaatcagtccatgaggacttcatctttccactccttgaaagccatgtttttttcagcattctatgtatgc

SEQ ID NO: 60219 - DNA, 609 bp, Homo sapiens
ttttcataagtaagcataaaaaggatttttgaaataaaagaaatttatgagtagcaacctatttaagaaaaatgcttataataacagtgactaacaaaatatttagcaaagaggatagaatgctgtcatagcaaaaacatagcaacaaaaggcaggtactctttgggttagtggcagtaagttacttaatttataaatttcttagatgacataggtaagttcaaaagaggttaatattcttagccttctgtgtagctagtttatttttcttataawattagatgctttgtcatactcctctaataatgaatgcacatatatttttagattgatataaccagattcaaagaacagaagtgattatgtcagatttatattgttctttgcaatatggtgttgacatgttaatgattcctatcaggtgctagatgtattttttctctaatacttctattcttcacatattctcaagtgggtgttactagaataaacttgcactggcgccctagatcctctgattatgttgtcatcacttccacttcaaattcacactttctctcttcaccctgcttacatttcatgaaactcctttaagttccaaatagtctg

SEQ ID NO: 60220 - DNA, 661 bp, Homo sapiens
cctcagccctgcgtggaggtgtcattctgcattattattcaaagcatgtgatgaagtgaagtactcacaggaagcccgcgggtgtctgagcgagggccctgctctycagggctggctcctgcgaggcttcagagctgcagcaggagcagacgcgtgacagcctgaccctggcgccccatccttacacacagctcccacacaccgattttggtcgggtttggaatagccgttcatctgcaggttatcattcgtatttccctgggagctgcagttgaatctcttttgtggctgtacctttggctgtttgaattcttcccctcctcgtttttctttggtctgttgcccttatcaatatgcgacgacgtcgctaggctgttagtcctttccctgcaagtctgggtgtgttgtgccttgtgtctgtgtctgggcatctgatcagctttctcactgcacatccctcgaatgcgggtcctgggtgtgtggtgcccgctgttgtgacatcccattcgtgcgtggggccgcacttctgcagccaccagctgtcccaggaggggccaggcatacacaggctgcaggcctggccggatgttatggagctgcctcagtggcctcccttttcctgctccatggatgagaatccctacaaatgaacttagaaacc

SEQ ID NO: 60221 - DNA, 1182 bp, Homo sapiens
gagtgacacttcatctcaaaaaaaaaaaaaaaaaaaaaaactttcctaaaattcatacacttcagaatgtgtcaagtcccgggtggtccctgggggcccaccacgtcattggctggtgacatcaggcctccctcatgccagctgttctaagtttgctacttaaaatttcattcagagggaggtcatggctaaataatatttgaaaaccacagctctagaatataaagtccaaatgtcccaggggaagttggagggcagcacagactaccctacccttccagagtcgcggccccctgccttgctctgcaaaccctgccctgagcccagacagcctccgcattggccacctcctccctacttccttgtaccaccctctgcggtcttcccgggcctcgctcctgtagctcgggctcccctacccacatcccacactctgcatttcagggcaccgcatttcgtgatctcgccctagcttgtctgtgttcaacgttattgctcactgatgtgccgcctcctcctcaccctgtatgctttccacaggcagggccttcagtaacacctcccatcaacaaattatctgcctggccccaaaagagtaccaacaggaaacaagtactcaatcttttcactgcagaggatggaatactaattccatttctgaaagggggtggcattttacctcatacccataaaaaatagcccttcaggttttataatccttgaggaaaaggctcaagtgtgaaggggaagagggcgggaaatctcattttacttataaaggcacccctgagtaatttccaggataacaaatatagaaattgatggggtcaacatgtatcaaaaatcacacctttgcttggaagctaagttttcttcctagaatgtgagaaattgtgtatattttattttcaaggttcaacttattttattttattttttttgccaaaccacagatacaaagaacatggaattgccatttttattaaccaggttctctggctactgtcacaccagtaaacygaactgggcacagcaagcacggcaatttcattaacgctgaagccagaatgtttccggggccaattattcttttctggagatgtgttttccaggaggtaaatgaacgctgctagttactgttttgggctgtggatgaggtcagggtctgaaaacctgcccctg

SEQ ID NO: 60222 - DNA, 1182 bp, Homo sapiens
gagtgacacttcatctcaaaaaaaaaaaaaaaaaaaaaaactttcctaaaattcatacacttcagaatgtgtcaagtcccgggtggtccctgggggcccaccacgtcattggctggtgacatcaggcctccctcatgccagctgttctaagtttgctacttaaaatttcattcagagggaggtcatggctaaataatatttgaaaaccacagctctagaatataaagtccaaatgtcccaggggaagttggagggcagcacagactaccctacccttccagagtcgcggccccctgccttgctctgcaaaccctgccctgagcccagacagcctccgcattggccacctcctccctacttccttgtaccaccctctgcggtcttcccgggcctcgctcctgtagctcgggctcccctacccacatcccacactctgcatttcagggcaccgcatttcgtgatctcgccctagcttgtctgtgttcaacgttattgctcactgatgtgccgcctcctcctcaccctgtatgctttccacaggcagggccttcagtaacacctcccatcaacaaattatctgcctggccccaaaagagtaccaacaggaaacaagtactcaatcttttcactgcagaggatggaatactaattccatttctgaaagggggtggcattttacctcatacccataaaaaatagcccttcaggttttataatccttgaggaaaaggctcaagtgtgaaggggaagagggcgggaaatctcattttacttataaaggcacccctgagtaatttccaggataacaaatatagaaattgatggggtcaacatgtatcaaaaatcacacctttgcttggaagctaagttttcttcctagaatgtgagaaattgtgtatattttattttcaaggttcaacttattttattttattttttttgccaaaccacagatacaaagaacatggaattgccatttttattaaccaggttctctggctactgtcacaccagtaaactgaactgggcacagcaagcacggcaatttcattaacgctgaagccagaatgtttccggggccaattattctttyctggagatgtgttttccaggaggtaaatgaacgctgctagttactgttttgggctgtggatgaggtcagggtctgaaaacctgcccctg

SEQ ID NO: 60223 - DNA, 813 bp, Homo sapiens
agctgtgcctgaagccatcccaaccctgggacttttcaggtataggaacttactctctyttaagcttaagttgatttgagttgggggttctgtcattagcaactgaaatagtcctactagaatgtgaaaacccatctgtcagtcttgtctcttttaccagttcccagaactgtcacctgaatgcctgccctgctctcctgacaaatgtggtggccaacgtgtcctggtcccacaaaagaaacacaaaggacaagtaagagaactgctaagccatgatgtttaaaaaggaaaactatcccaggtgcttggtgcatcctgggccgtattctaactttcaagggtcctaggcccttttgcctgcatgggtcccttcctccattcaaaaaaaaagttaaaaattatattttacaactgcattagtataaagacaaatataatccagactggatattgtgttcattttttttctgattttaaaagaaattaaaacattttagtggacctctacaagtaccatgggcccttggcactatgcctactctgcctgacggataagttggcatatggttcagattgcttgtctacacagtccagtttccctagagactagtccgactctcttctccttgtctggaaggggtggaggaatctggagaaaggtcttgactggcctttctctctctctctctcaccacacatttcccaggatcatcaccctttgatttcatctccagggtgcccaatgcaccagacacacctgtaatctggcattatcgctttgcaccatgagaagctacttccaacctgtcaaga

SEQ ID NO: 60224 - DNA, 813 bp, Homo sapiens
agctgtgcctgaagccatcccaaccctgggacttttcaggtataggaacttactctctcttaagcttaagttgatttgagttgggggttctgtcattagcaactgaaatagtcctactagaatgtgaaaacccatctgtcagtcttgtctcttttaccagttcccagaactgtcacctgaatgcctgccctgctctcctgacaaatgtggtggccaacgtgwcctggtcccacaaaagaaacacaaaggacaagtaagagaactgctaagccatgatgtttaaaaaggaaaactatcccaggtgcttggtgcatcctgggccgtattctaactttcaagggtcctaggcccttttgcctgcatgggtcccttcctccattcaaaaaaaaagttaaaaattatattttacaactgcattagtataaagacaaatataatccagactggatattgtgttcattttttttctgattttaaaagaaattaaaacattttagtggacctctacaagtaccatgggcccttggcactatgcctactctgcctgacggataagttggcatatggttcagattgcttgtctacacagtccagtttccctagagactagtccgactctcttctccttgtctggaaggggtggaggaatctggagaaaggtcttgactggcctttctctctctctctctcaccacacatttcccaggatcatcaccctttgatttcatctccagggtgcccaatgcaccagacacacctgtaatctggcattatcgctttgcaccatgagaagctacttccaacctgtcaaga

SEQ ID NO: 60225 - DNA, 813 bp, Homo sapiens
agctgtgcctgaagccatcccaaccctgggacttttcaggtataggaacttactctctcttaagcttaagttgatttgagttgggggttctgtcattagcaactgaaatagtcctactagaatgtgaaaacccatctgtcagtcttgtctcttttaccagttcccagaactgtcacctgaatgcctgccctgctctcctgacaaatgtggtggccaacgtgtcctggtcccacaaaagaaacacaaaggacaagtaagagaactgctaagccatgatgtttaaaaaggaaaactatcccaggtgcttggtgcatcctgggccgtattctaactttcaagggtcctaggcccttttgcctgcatgggtcccttcctccattcaaaaaaaaagttaaaaattatattttacaactgcattagtataaagacaaatataatccagactggatattgtgttcattttttttctgattttaaaagaaattaaaacattttagtggacctctacaagtaccatgggcccttggcactatgyctactctgcctgacggataagttggcatatggttcagattgcttgtctacacagtccagtttccctagagactagtccgactctcttctccttgtctggaaggggtggaggaatctggagaaaggtcttgactggcctttctctctctctctctcaccacacatttcccaggatcatcaccctttgatttcatctccagggtgcccaatgcaccagacacacctgtaatctggcattatcgctttgcaccatgagaagctacttccaacctgtcaaga

SEQ ID NO: 60226 - DNA, 1314 bp, Homo sapiens
gattccaaattcctcagtgggatgaaatctcacttttaggactcttatttctggtgcagacctccttgtttagaacaatttccccatccgcctctgagctgtgtcttgttgcttgccagaagccgctgggcatctaagatgtgtgagcactagagcctccttgcacagagctggtgggtcactgaaggctggcctcaccacagcccccagaaggtgagttttgtcctaggggtaagtattacagttccctctgctcttgtttatctccacaaacacccaaatctgcttctgttccaagactgtttcattccagactgattttcttttgtatttgaatgaccaccagcattttccccccttgaactctggctgctgatccattctttgtcttaattcctctattcctctctctgctgcagttctcatcactgacatagccaggccattactctgtttttgccaagccctgtggggcagagctggcattttctgagctaatttcttctgagatgtaattgagatactgtaaagcctccacagagttcagttaaactcctcaaatggaatctgggcagacagcttggtaaattgaattttagaagagccaagctcattttgacattaaagaaacactgtgatatgaaaaggtaacaatttaacaatagttagcaaaacaaaaaaaaatttctataaggaattgttctctatttacacctgaagagtaaagagaaatgatcttaaattatagctattcattagtgttggataaaagacaaacttaggaaagagaaactttagagtaagaaattgagaactgtctttaagaaattgagaaggttttagaagatttgcagtagttttagatgagtctatctggaggaagagtactgacccgggagatgwcttccaaaaggaaaaccagtgtcaatggttctaaatcagaagtcaggattatcatcactcagtagaaggaacaaagtagaaagtaaactctatatctaatgataacccttacatcctccagggtgtgaatttattccatttcacccagaaatctataaaattctatagatgtgttactttatatttttgtaagcttggaagataattgtaatacacattttaatagaaaaagagaaaaaatgaattttttctcttgcctccaggaaatttgaaacatccaacttctagaaatcctgtcttctatccgtttgtgaatacatacaaacatatattcattccaccagtgaacaagtgtctgatttcttactgtgtgtagacattctggtcagtttgggggtagacagcagagtg

SEQ ID NO: 60227 - DNA, 1314 bp, Homo sapiens
gattccaaattcctcagtgggatgaaatctcacttttaggactcttatttctggtgcagacctccttgtttagaacaatttccccatccgcctctgagctgtgtcttgttgcttgccagaagccgctgggcatctaagatgtgtgagcactagagcctccttgcacagagctggtgggtcactgaaggctggcctcaccacagcccccagaaggtgagttttgtcctaggggtaagtattacagttccctctgctcttgtttatctccacaaacacccaaatctgcttctgttccaagactgtttcattccagactgattttcttttgtatttgaatgaccaccagcattttccccccttgaactctggctgctgatccattctttgtcttaattcctctattcctctctctgctgcagttctcatcactgacatagccaggccattactctgtttttgccaagccctgtggggcagagctggcattttctgagctaatttcttctgagatgtaattgagatactgtaaagcctccacagagttcagttaaactcctcaaatggaatctgggcagacagcttggtaaattgaattttagaagagccaagctcattttgacattaaagaaacactgtgatatgaaaaggtaacaatttaacaatagttagcaaaacaaaaaaaaatttctataaggaattgttctctatttacacctgaagagtaaagagaaatgatcttaaattatagctattcattagtgttggataaaagacaaacttaggaaagagaaactttagagtaagaaattgagaactgtctttaagaaattgagaaggttttagaagatttgcagtagttttagatgagtctatctggaggaagagtactgacccgggagatgtcttccaaaaggaaaaccagtgtcaatggttctaaatcagaagtcaggattatcatcactcagtagaaggaacaaagtagaaagtaaactctatatctaatgataacccttacatcctccagggtgtgaatttattccatttcacccagaaatctataaaattctatagatgtgttactttatatttttgtaagcttggaagataattgtaatacacattttaatagaaaaagagaaaaaatgaattttttctcttgcctccaggaaatttgaaacatccaacttctagaaatcctgtcttctatccgtttgtgaatacatacaaacatatattcattccaccagtgaacaagtrtctgatttcttactgtgtgtagacattctggtcagtttgggggtagacagcagagtg

SEQ ID NO: 60228 - DNA, 847 bp, Homo sapiens
gggattcaggaggaagagagctgagggactcttgtggtaatcattgattgtaacaagcagcttggtgtctaagaggcatggcttgctgtatattatatgctactgcctatgaaagatacactctttttttgagaagattgagttgcaaatctagaagagaaacacagcactaattggaaagagataactgcctcttcagaaagagaatgttaagtagtctttctgtcctcacatgcattgatttaaataagactggacagttttctttatattcacctgaggtatagcatgaagctggaggatatcagtgattttagaaccatacaactctacaggatggtacaaggaaggacagaaagccgtatttattaactattcgctatgaaccragcattggcctagatacttcacatagattacgtctttatgatttttattttagatagtgaaaacacaattgaaggggccctttaaatatgtgcaaaccattttaactgtatcttaaattatgcttgtttgagcaaaaactttgagatttcaaacccgttttaaaaacttttttaatgtaattgtgcattcccatgcagttttaagtaataatagagagattccttctactctatccatttcccccaatggtaacatcctgtattattatggtataatattacaaccaggaaattgatattgatgcaatctacagcatttagtcagatttcacccattttatatgtacttctattttttttattttactaagtgtgtatttagttttatgcagctttatcatatgtgtagatttcagagagtacctccacagtcaagatacggaacaattccatcccaa

SEQ ID NO: 60229 - DNA, 646 bp, Homo sapiens
aaggaatatgattggtttagtcctggcctcaccatctcccttaaaaatgccagtttatttctctgcatatttaccttattattttttcattgtcctctgcagatttatgattttcaattggttcttttttttttttttttgagatggagtgcagtggcataatcccagctcactgcaacctctgcctcctgatttcaagcgattctcstgcctcagcctcctgcgtagctgggattacaggtgtgcaccaccacacccagctaattttttgtatttttagtagagatgaggtttcaccatgttggtgaggctggtctcaaactgctgacctcaggtgatccacctacctcggcctcccaaagtgctgggattacaggtgtgaaccactgtgcccggccctttaattttttttttttttttaagagataggtcttgctctgtcacccaggctggagtgtagtggtgagatcactgctcactgcagactcaaccccctgggttcaagtgatcctccctcctcagcctccccagtagctgggactgcaggtctgcatcatcatggctgtctttatttatttatttttcagttttttagagagagagtccagctcaggctggacttgaactactgggctcaagcaatcct

SEQ ID NO: 60230 - DNA, 510 bp, Homo sapiens
  misc_feature (1)...(510): n = A,T,C or G
tatccagctcaagcacagaggacaaatttgccttttctycacattttctatttgagcactcaatggactggataaggcccaccacatcaggggtgatctttttttaaaaaaagaaatggggtctcactatatttttctggctggattcaaacttttgggcttaagtgattctcctgcctcagcctcctgagtagttgagactacaggtacactccagcttcttctttactcagtctacttgttcaactgccaatctcttccagaaacaccctcagagacagatccagaaatgatatcataccagttatctgggcttctcttggctcagtcaagttgacacataaaaattaatcatgagagtaggtctacaaatgtaggaactgtgtggctccggagtcctgcnnnnnnnnnnnnnnnnnnnnnnnnnnnnnnnnnnnnnnnnnnnnnnnnnnnnnnnnnnnnnnnnnnnnnnnnnnnnnnnnnnnnnnnnnnnnnnnnnnnncaggaagg

SEQ ID NO: 60231 - DNA, 596 bp, Homo sapiens
tctgtaagatttttgtgtgtgcctgtttttgttgctattggtatcataggtcagcacgttttgtttgtttaaaaattcagtcaatataaaatttaaaaattacatatgaatgtaattgtaatagtatatgaatgtaattgtaatagtaacaaaattaatatggggtacacctcaayagtacatattttgaaaaacatatatcaaaaaatcctatggctttgaagttcctggattgattttataagtttaaaaagaaaaataataagaaaactaactactaatagatttttttgggttttctgggttttcacagtgaaaacccagaaaactcttctagtgccatactttactcaaagacaattttgttcaaatgaaaccttacctgcagtagggtttgtttagaggtggcaaagttaacttctagtgagaattatcttgaggaggtgaatctcatcagtggaatcttgccatttgtgatgcaaagaaaaacattaaaatcaagggagctcagaagggttgagtccagctccagaaatacagcatctccggtcccatttcaaacctgctgaaatataatccacattttaggaagatct

SEQ ID NO: 60232 - DNA, 596 bp, Homo sapiens
tctgtaagatttttgtgtgtgcctgtttttgttgctattggtatcataggtcagcacgttttgtttgtttaaaaattcagtcaatataaaatttaaaaattacatatgaatgtaattgtaatagtatatgaatgtaattgtaatagtaacaaaattaatatggggtacacctcaatagtacatattttgaaaaacatatatcaaaaaatcctatggctttgaagttcctggattgattttataagtttaaaaagaaaaakaataagaaaactaactactaatagatttttttgggttttctgggttttcacagtgaaaacccagaaaactcttctagtgccatactttactcaaagacaattttgttcaaatgaaaccttacctgcagtagggtttgtttagaggtggcaaagttaacttctagtgagaattatcttgaggaggtgaatctcatcagtggaatcttgccatttgtgatgcaaagaaaaacattaaaatcaagggagctcagaagggttgagtccagctccagaaatacagcatctccggtcccatttcaaacctgctgaaatataatccacattttaggaagatct

SEQ ID NO: 60233 - DNA, 596 bp, Homo sapiens
tctgtaagatttttgtgtgtgcctgtttttgttgctattggtatcataggtcagcacgttttgtttgtttaaaaattcagtcaatataaaatttaaaaattacatatgaatgtaattgtaatagtatatgaatgtaattgtaatagtaacaaaattaatatggggtacacctcaatagtacatattttgaaaaacatatatcaaaaaatcctatggctttgaagttcctggattgattttataagtttaaaaagaaaaataataagaaaactaactactaatagatttttttgggttttctgggttttcacagtgaaaacccagaaaactcttctagtgccatactttactcaaagacaattttgttcaaatgaaaccttacctgcagtagggtttgtttagaggtggcaaakttaacttctagtgagaattatcttgaggaggtgaatctcatcagtggaatcttgccatttgtgatgcaaagaaaaacattaaaatcaagggagctcagaagggttgagtccagctccagaaatacagcatctccggtcccatttcaaacctgctgaaatataatccacattttaggaagatct

SEQ ID NO: 60234 - DNA, 1453 bp, Homo sapiens
gccaattacatcctctcacaggaaccaggagtcacccaattgcttcttacttgaagcttgccactcgtagcttctgcctgttcactctgctctggaatgcaagcccttttggccctgcatggtgtatagcattcttctcccccaggctgtgagtttatgtgactcatgtgtactgtctgtcaatagtgatccgtccagggttcaagtgtcatgtgtttggccatctcctataacccttggatgggactcaaggcctcacaatggtgaagagaagcaaataaaaccaaagatattttatgctactttcattatttctatcaactaacttaatgttgttattatcatgtagtgaaaaatagaaatcacctcttactccctaacttccttcacccattcatcagcaggttttttcagacttttattattgccaagtaataaagacataagcattcttatacattgcatcagttttctcttgtggcataataaataatcacaaacttcgtggcttaaaatagccttagtacatagttctgtaggttagaatctactgcatgattggattctctgctcagggtctcaccaggctgaaatcaatgctgtgttggccaggctgtgttcccatctgaagcttaggatcctctttcaaggttactgattgttggcagagttcattcccttcaggtcgtaggaccaaaatcctcattgatctgctagtygttgtctggggaccactcagtcctagagaacacctgcagttccttgccatgtggtccttctaggcagtgtgcagaatgaatgtttgctttggtcaggcaagccagatcacagctctttgacttccttttcctgccattatccagaaccatctctctgcttgtaaagggctcatgtgattcaatcaagcccagccaagtaatttcgctacttgaaggtcatctaaattataactttaattacatctgtaaatcacttcacagtagtgcccagattagtgtttaattgaatgactgtaagaaatgtatgaacactagggattaggaatcttcgaggccatgtgaaaactctacctaccacatacatcaaatggtgcatactcatataaggttttctgtagtttaatattgagatatgaccccgtttggtcaaaatgtgcttttcacttttcataactacaaccaattcatctttcagaaaagccatctcagttttcagttgtaaagactgttttccctatacgcttacatgcttgagtgttgtcaacgttcttaatttgtgccaatcttttaggtgagatggcttcacataactcattctgttttatatttcattaatgagagtgatttttaagaatataatcttggctatttcctttactgtgaactattttgcctacttggtcttttactcttttacctatttatttgcctattttctttgcccatattattat

SEQ ID NO: 60235 - DNA, 1453 bp, Homo sapiens
gccaattacatcctctcacaggaaccaggagtcacccaattgcttcttacttgaagcttgccactcgtagcttctgcctgttcactctgctctggaatgcaagcccttttggccctgcatggtgtatagcattcttctcccccaggctgtgagtttatgtgactcatgtgtactgtctgtcaatagtgatccgtccagggttcaagtgtcatgtgtttggccatctcctataacccttggatgggactcaaggcctcacaatggtgaagagaagcaaataaaaccaaagatattttatgctactttcattatttctatcaactaacttaatgttgttattatcatgtagtgaaaaatagaaatcacctcttactccctaacttccttcacccattcatcagcaggttttttcagacttttattattgccaagtaataaagacataagcattcttatacattgcatcagttttctcttgtggcataataaataatcacaaacttcgtggcttaaaatagccttagtacatagttctgtaggttagaatctactgcatgattggattctctgctcagggtctcaccaggctgaaatcaatgctgtgttggccaggctgtgttcccatctgaagcttaggatcctctttcaaggttactgattgttggcagagttcattcccttcaggtcgtaggaccaaaatcctcattgatctgctagttgttgtctggggaccactcagtcctagagaacacctgcagttccttgccatgtggtccttctaggcagtgtgcagaatgaatgtttgctttggtcaggcaagccagatcacagctctttgacttccttttcctgccattatccagaaccatctctctgcttgtaaagggctcatgtgattcaatcaagcccagccaagtaatttcgctacttgaaggtcatctaaattataactttaattacatctgtaaatcacttcacagtagtgcccagattagtgtttaattgaatgactgtaagaaatgtatgaacactagggattaggaatcttcgaggccatgtgaaaactctacctaccacatacatcaaatggtgcatactcatataaggttttctgtagtttaatattgagatatgaccccgtttggtcaaaatgtgcttttcacttttcataactacaaccaattcatctttcagaaaagccatctcagttttcagttgtaaagactgttttccctatacgcttacatgcttgagtgttgtcaacgttcttaatttgtgccaatcttttaggkgagatggcttcacataactcattctgttttatatttcattaatgagagtgatttttaagaatataatcttggctatttcctttactgtgaactattttgcctacttggtcttttactcttttacctatttatttgcctattttctttgcccatattattat

SEQ ID NO: 60236 - DNA, 836 bp, Homo sapiens
tttatttcatgcatcctctgccttcctgcccagtttcctgcccagttttacctcttgcccaattctcttcaattacttgaacaaatggcagtttttcttgccccaggggccttagcacatcctgacctgccttgagattctctgtccctgctttttgaaaagctaagatctcattttttttccattatctgtatagatatcacttcttcagagtggcctcttctgaccattaccacttctgtttcagtctctccgagcactctgatgatttagatcatcaaatcattcctaatgtttacttattggtaccttgcattaggttgccaactccataaggctaatgacaccaggtatccagctygcttttatatgtccagagcctaacactgtgactgaaatattaaaacatttctccatttcttgaaagaaatgaagactttgcctttccataaaaaaaaacagctacctttatttataaatgagaatttgatttcttgagagtgagggtttgttcccatgctcttttcttatgtgtcatttactctgggttcagggtccttggatcttcgttgaagaaagaaagtgcttcttgaagcattcggtatgtattagtgctaacgtcgtggtaatgatgagctcccgagtagtatgtgtgccttgtcacgttatcatggggctgagaaaatacttcctaatttatctcttcaaatgtaagaccctctttcttcagcaagatcaagttatctaagcattcagaagcctctctctatttcatttgtttctctgaagatgtcagctgtttcttaatattcctcaggtgctttatctcactcaaa

SEQ ID NO: 60237 - DNA, 590 bp, Homo sapiens
ccgggcatggtggtgggcgcctgtagtcccagctacttgggaggctgaggcaggagaatcgattgaagccgggaggcagaagttgcagtgagccgagatcaagccactgcactccagcctgggtgacagagtgagactccatctccaaaaaaaaagaaaaacaacaaacaaacaaaaaacacaaaacaaaccactggtaccaaacggttaattaaactgcagactttrttctgattccatcagtttttccattaatggcccttttcagtccaggaaaccacattttgtgtgtatttctcatagctcctttgtctcttctcatctgtgatggtttctcagtctcttcctatggttttcattaccgtaacaggtttgaggagtaccggtcaggtattttatagactttccctcaatttgggcttgtactatgttttatcatgattaaattagggttatgggtttggggaaagaatatcagaaaggtaaaatgtcattctcatcatctcagggagtatgacacatacatggaagcagcaccttttctgcatcaaatatttggccaggagtaattcaataaacatttattcagc

SEQ ID NO: 60238 - DNA, 789 bp, Homo sapiens
ttctgctttccattgattttaaaatgtaggctatatctgtcttttatatacttttgacctatttgattacttttgacctatttaaccctagaaagattagctaacttttaccaaaacaatttacttcaaagtaattatacatgaataggttcttaaacaaaaatgcaaaatgactggatttcagaattaaagatataaattatttgatttgaatattaataagaatagtaaaaggaatttatctctcatatagtttagacaaattaagtatctttctttaaaagaagtcctagactattagggtgatgtgagaccaaaattcaaagaatatttcaagcaactgtggaaaacttttgatgttaagggaagtggttcagaataattcagattgattgtstacctagcttgagtttgccaaatgatggccaagtttccactacattctgctttgcagtccttccttgtaaagcagagtcagcaaaatcatcttgaagtttcctacaggaatcacagtctggagcagaatatacacctgaggcagccagctccactccctagccgctgacattttcattttatttattcttgtgtttgcatctgataatgatccatctttgcttccccatttatttgtatgaagcagaaagactaaaagaaagcaaaatagaaacacaatatggaagaatatcaatgtcccttcgtataagtcattataatgctacttgaatcaaagatacttaaactggttaactgttttaagaccaaaacaatttattcacatcacatttt

SEQ ID NO: 60239 - DNA, 1105 bp, Homo sapiens
gattgctcctggcaatgaagctcatctagtctacttatcttagttgcaaaaataaaacaggtctgcacagtcacaaaggagaaaaagatgtggtagacaatttaaaaataatgaataaagtttcaaaatttagcaaggatggttggtgagagaagagtattttgcagcagtaaattaamtcctggcttttacgggcagtacagaatatccaactggctcatgcttaagatgtggcaatattaagaacaaagatctagtgcttggaatggtgccgggtctgtattatcactcaaccgatattttgaaggatgactattttcttttatcaaagaagagatctataaatattaatgtcctctgtcttaatggcatctgttcatccttcttgttaacagatctgtggtacatggcctggccttttccaacattagaaaccagtgactatgagtcacgaagacctggaagactggtagtttgggacctagtgcacaacccaccccaccccagccccatcaacttattttatttcctccagttcaggttgccagacccatctgtaagcacttatcataatgtgaacaaatgcacatagatgaacaatgagcactgtttgtttagagtgatgatatactggctgtgtatcctctgtattttaaaaattcttttctaaggacaactaaatttaccaatcagtttatccaagcaggcaatcctggaaagatattttttgaaaaagtttccatctgccacctaatgttgtatatccagacctgcttcttttatcacttcttacacccaaagttctctcaacacatcttgattcaactcttcagatttctattctggctcaccacatgtcaaatcttgctaagcaaatggagaaacaacactcaacatatctccgcctgtcaacagcaacatctgtgttcaagtcattaaagactagaacctgaatttcatccccctgctttttctcaaatcacactctgcaaggaatgtatacaggaactttctcttattattacgggttgaggtatgcaagggctcagaatcagtgctctaaggtttagcattttgtgccttgactagtaatgaaagtaactaa

SEQ ID NO: 60240 - DNA, 1934 bp, Homo sapiens
aagcaacaaagtgacctcactttacatgtttagggtggtcagaggccatctcagagagtggcatttaaagctgagacctggcaggtgaggagctagccatgtgagtggctgcaaggctgatgtaatcagagtgaggaatgtagggaaaatgctgactctggagagggcctgggtatttgaggagctgaaagaccaacatgcagtgagcttgaggggaaaggcagataacacagggacttaaaggctgtgggaagcgtttggatcttactgttttattccaagtgctaaaaggaagccactcatctggctgccaagcggagaaggggctggagtgaccagtggaagctggaaaggtacatttttaaggtacaactttaagttctaatttccaccacaatgccaccagagttctggcagtgacctgccttacacctcaccttgccttttcacgcaaaggctgctaagaatggggaagaatagcaacttaatttcttaaggtctgcagagtggacagattcaatcctagacaaacttacaacatagtacttatttcaggtcctctcctagcactttttttctggtaattcttctgctgtattctcctctcacattcactggtgttctcttcccacctctggctatctagaaatcttccatcccaaatagatgggttcatgcttcccatgataggcagaataattattccatcagtgctttttgaatgtcagtaaaacaaattaagccagtcataggaacagattaaaggtagctgcattttaagagggatttatttatttttagctcaaacaaatctcaaaatagattgggacggtatagcccattatttatgggaatatacatttggggaaggaaatatgcttgccagcctgatacactgacaatgttagaccatccttggaagtaagaggaggaggggttcgcataagaagtagtagttgtgagttagtgtcattctcagagcctccaccagtgatgatgggagatgtgtaaaacctaagttttacaaactagtggatgtggtgcccaggctctggtaatgagctgccctgtttctccgtatgagacaagtgataggggctcacaagacattgttccattcattgactactgaaaatataatcaggggattataaattgcctccaagtctccatcactatcctgtttggaagagtgaggttgagagcctggtttgggaattgttaacaaaagtaatgacactgatttgggtgaattatgcctaatattcatgaataaaatcgttatgcatgtaaatgtcagactaactttgtatattaaagtttaaatacaaactttattttgcacagctatttagagggaacatttattgaatagcttttggtattatgaaacttttgaattaactcagtatcttaaatttaagagcagcttggtttctgatgtaattaaaatacttcatttggctgttttcttctgaatctttctacatttttcaaatatattttagagaagaaatgggtctaaagatagcctgatggaagaaaaacctcagacatctacaaacaacctggytggaaaacacacagcaaaaacaataaaaactatacaagcttcccgcctcaagacagagacttgatcctgatgaagggtcaagggtaggggtgggaaggttgtgtgcgccactggtacttttgaaactgtgaaataggtatcttaattcaaatctcagacctgcaagtatttcttcagcatgagaaaatacattatcttttgcttctttttttttttttttttgagatgttatcactctgtcgcccaggctggagtgcagcggcaccgtgtcagctcaccgcagcctccacttactgggttaagcgattctcctgtctcaggctcccgagcagctgggattacaggcgtgcaccacaacacc

SEQ ID NO: 60241 - DNA, 1411 bp, Homo sapiens
tgcaagcataagcacacacattagcttaggcctaaacagggtcaggatcatcaatattatcgtcttccacctccacgtcttgtcccactagaaggtcttcagggcaataacaggcatggagctgtcatctgccatgataacaatgcctccttctggaatagctcctgaaggaccagctggaggccctctgagaagctgggaggaatgtgcctcagaattatctacctgagggtcagaagaggagagcaattatatcccttggttcttacaccgccatgcttagggcttctctatggactattaatttcctgcaattcaggctccttcatgcatccaacagaccacatgggttcggcaagtgtcccacacagcagcatcagagaaaccctgggtcagacaatgggagatatctccctcctttaaatccactccattacagaaacttcactatggcagtggctacaacatttccaaaagacttaatagaggaaggttagtagaacaagcaggttgttgctgctgtcattgttctgagcctacaatggggtatttatcatctcccatttctaccacctgttctggtttcttccaccttcaggcagcacttcagaaagcctaggtttctatcagatatagtgatctagaccttcattcctgagggatctgagtcttcaatgctttgcccttactgggccataattttttttagctcaaatgttatttaagcctcagattaaccctatgagatgggcaatcattgttgtaacagtgtttttaatctcatcttaatgttcactaaggaaacacgaggagatgtcctagtgggtttcttgggtttcaaatatgctgtttccggttcccattgtatagtggcaactctagcacctcatggtattcagggccaattatctgtacccccatggtgatttttttctttgcctgctatgacaaagtccatatggttgtcaaaactccaggttgagtggaaccccggctgggtctcttgaaggaagtatctagtagaggataatgttgaggggacaggaagcacaaattctgcaaatgagtcatggagtgtgataatgagagaccaatcctatttgcatcctgtttttgtattccagctatgaacaacatagcctgctatattgatcactgattccatgcmtataacttcatctgggaggatggtgccctgaccacatagagtcttctcctagaactggctccttagttgagcctttaatgggccatttcattgtcctgttaggctgtggacatgtgtccattgttgtatctccttcactgcaaattactgctttgaatcttatgccagtgaatcaagaatctgccagctctcggacagctgttttatattgaccatagttgtagaaaacccctggtagagatg

SEQ ID NO: 60242 - DNA, 581 bp, Homo sapiens
gtattacctaatttatcctcaagacaattccatgaggcaggaattagcagccccctttcaaagacaaggacaccaaagcttccttaagggacttggccagactgatgggtttcactcctgcctctctccccctctaacaccaatgggcttcacctcrgcattctaccatatcccatatcaaacagtgcatatctttccccagctcatagcttcttaaacagtatttaggaaaataaaggtatggttaggaatttcaaacaagaattttaaaatgttttcatcacattgcaagaatgaggaagcaagcagaatttgaggattggagctggaagagcttgtaggggaacccgagctggaagtagccctgattcacaggactctccacatactggagaggtgagctgtgcttttgcaattgaaatgtgttgctttgctgttattcaaagcttatttttaattgatttgaagcctgctttcctctcaaaataaggctgtatttttagtaaaatgtattttcatatgttgtcacataagctaattgttttcttggcatacattttgttcctatttgtaaaagagta

SEQ ID NO: 60243 - DNA, 760 bp, Homo sapiens
aagcgtggttatcagctgggagagagggtggaggaagggatgagggagataaaaggagaagaggataagttttgaaaatgggtaaaggctgattcttctagagcaatagttttcgagtgtggttcctggatcagtagcttcggcatcacctagaaacttggtaacttatttgaaatgaaaattcttaggccccacccaagaccagctagatcagaaactctctgggttggaccaagcaaactgttttaacaagccctctaggcgattctgattartttgagaactactgttctagagaaaagtaacaagatttctggacaatattttgaggataagagcttaaatttaaagtgaaaccagtcttttttgtattctgtgatttttctcagtgtttagcagcttgggtagaggcatgaatgagagattgctgggattcagccagaactgagctgtcccgagtacagcagagggagagaggctgatgggtttggaggtggttcaggggactgattctgatggtagatcacagctccttaagctggacaagagggcagaaaatttagagggggctaatgggagtcagaaagtactgggtcagtagattggaagtctcgccaatagtagcggggcaacaccattgcacagaaggcctttattggaacttattggcccacagagatagtgctttttgagatctgaataaatgagtttgcataccaagtctatagaacaaatactttctttggcctgtgtgcatgca

SEQ ID NO: 60244 - DNA, 1126 bp, Homo sapiens
tttggggaatgaatgaatgaatgacgctgaaatgatacataattcgaacagtagttttgaagctagagacacctaatatgaaatgaaacatatagtcattaaaattagctcaatgagttagttaagaagcagtttagagatagccaaagagaggatttaatgcgtggtccctggatctgatgaacactactacatatgttgtagttgtagtcaaaatacaaatcagattgtgtcatgtacagtgagataccccatctaccacccacccacataagatcactcaatgactcccaagtctacagagaaaagaaaaaaatccttcacatgatccagaagcccttcctaacctctccaggttaggtgcccccattgcttagctttattattttctgtgaccttccttaagggtttttttaatgtcatgcttctactttccacaggcctttgaacaagctggaatatcctactcacattattctcattagctaattcaactcccagctcaagggtcacttccccagggaagctttccttcaccctacaggttaataggggtgctttgttactaatgatcaaggaaactagctactcccctttaaggtactaattcagtttgtaatttcacattcattgctgtgaatcagcattcatcttycctacccaatggtaaaccctgggaggacaggactatatttgttgggctaaccattgtgtccccagcataatgcttgtagttagtaggtgctaaacaaatacttctatatgattggattccagaaaaacacagaatgtaagctttgatattaaaatagctccaaagactattgattttccaatttcttttgttccctggttagtttttccttttagccacattatcagaaatgtattcctttttttttttttcaaatcttcttaagccaaattatattatttctttgcacagattcattattattttaaatgggcccttttcggcattcagcgtttagtgcaggtcctcagatttcttgcaagatactctataaagccctgtgaaaccatagcagatatccatttgaattccttgagtagtgcagtttttaccaaggcacaggctagacacatcttgcaaatggtgtcacac

SEQ ID NO: 60245 - DNA, 674 bp, Homo sapiens
tttctaatagttcaccaaaggaaagtatttattcaggggtatttcttgaaaaacaaaatataaaatattgattaaattgttaaaaatttaccacttastaaaaagaggtttcttaaactcagtcatgcagcagaagattttgtttctgattcaaagaagcacaaaaatgcaaacagattttatgtttctggatttctaaaatagtcatacttacatgtaagacagaaatatagagccatagcaatctattttcataatgaagatgtgcgaccttgtatgtcattgccaaatttaagtagtttttatttttagactaaaagtaagcatgcttttaatactttttagtgtcatgtgatctctacagttttgtatttttttcagaagggcgattgaaatagaaaattaggcttattaagtaattaaacaatattccttcatcttagtgtttataaactctcacttagcaaaacacaagtcaaatataaacttttggaatgacagagctcctctttagatcctgctaaccatccctccccatccgaccttaaaattgtattttcatgagcatttcacaatatttctcatcccttgtttccagtcttgacccactgacccaagaatcaagaaaatgtcatgttagtgcctactaattagtgcacccagagaaccttttc

SEQ ID NO: 60246 - DNA, 674 bp, Homo sapiens
tttctaatagttcaccaaaggaaagtatttattcaggggtatttcttgaaaaacaaaatataaaatattgattaaattgttaaaaatttaccacttactaaaaagaggtttcttaaactcagtcatgcagcagaagattttgtttctgattcaaagaagcacaaaaatgcaaacagattttatgtttctggatttctaaaatagtcatacttacatgtaagacagaaatatagagccatagcaatctattttcataatgaagatgtgcgaccttgtatgtcattgccaaatttaagtagtttttatttttagactaaaagtaagcatgcttttaatactttttagtgtcatgtgatctctacagttttgtatttttttcagaagggcgattgaaatagaaaattaggcttattaagtaattaaacaatattccttcatcttagtgtttataaactctcacttagcaaaacacaagtcaaatayaaacttttggaatgacagagctcctctttagatcctgctaaccatccctccccatccgaccttaaaattgtattttcatgagcatttcacaatatttctcatcccttgtttccagtcttgacccactgacccaagaatcaagaaaatgtcatgttagtgcctactaattagtgcacccagagaaccttttc

SEQ ID NO: 60247 - DNA, 709 bp, Homo sapiens
tatctccattcgagaaagagactgacagtgagagagcaatgcttcctccaaaggaatggcttttgcatatgatcactgtaaagatttctagctaatgtggcaaagctcaggctcccctctttgaaataaacacaaaactcaatgtgaagaaaaatcataagtacaaaatataaatggaaatatgaaatataaaggtatatgtgtgatatggtttcactctgtgtccccatccaaaatctcatctcaaattgtaatcatcacatgtcaaaggagggacccagtgggaggtgatgggatcatggtggcgatttctcctatgctgttcttgtgatagtgagtgagttctcaggagatctaatggttttaaagtttttggcagttgcctccttactctrtctctttctctctctcctgctggcatgtaagtcatgccttgcttccccttcacattcctccatgattgtaagtttcctgaggcctccccagtcatgcagaactgtgagttaattaagcctcttttagttatgaattacctagtctcaggtagttcattatagcagtgtaagaacagactaatacagataattggtacctagagaagtgggacactgctataagatacctgaaaatgtggaagcaactttggaaatgggtaatgggcagaggttgaaacagtttggagggctcaaaagaagacaggaagatgtgg

SEQ ID NO: 60248 - DNA, 894 bp, Homo sapiens
atatatttggcttagcttttcactagaaaaattctttaaagaaatattgtccttccaattttagtggtactgaggaacagctctggttataaggggggaaatactatatgtcctttgttcaatcttactaatctttattaattttatgattttccccatttattttttaaaaatcattaataaaattatccttgattgagtttctcctatgtgctaggcattgtgataggactttagtaaacatcatctctaaccctttcaataaccctgcaaggtagggtcatattttatagataaggaaactgaggctcagagaagttatgtcttgaaattatatagtagcaagtggttaagccaggtttccaacacaggtttgtctgactctaaaaccagcatctgccccatctcctcaccattcgcgaccagaatgtgatgcacgtctaccaaaaagagagtagcaaaaggtgatttatagaagcagttayagtcctctgaagagaaggcaaaactattggggatagggaaaaagtaactataaagatcatatttatataatcgaatattaacttaatggcttgaattaggtggcaaataaaatatattagcaagcaatgttacaaaccatggtgagagctatgtagtagatgaagcagaatgatggctgggctcagggagctcatacatttggaacccagataaatctttgctccttcttcccagagcccatcatcactttttaaaaacacgtctttgctgggctcagtggcttacatctgtaatctcagcactttgggaggcaaggcaggaggattacttgagcccaggagtttgagaccagcctgggcaacatagggagatgctgtctctacaaaaaataacaaagaacaaaaccat

SEQ ID NO: 60249 - DNA, 1298 bp, Homo sapiens
gatatacgtattgaatgaatacataaatatagagaataatgagataaatagaacgtggattatttggagttcatcctcctgagctaatgatgggcatttctggaagtgctgggttgcaaataagyccagaccagagaggattgtgtttaaaggcccagaatctcaactgataatcctcagaagctcagatttacttttttcattccaagtaaattaaactggagtggtaagaaaaagaaaaatggttatgaccatcaaccccagaaacagggaccacatttaattgaatttataatgtccctaacatctctgctgtgtttgaaaggttaaaaatttcctagagaaaacagcttttgctactacttgccaaagtactcataaaatggactgattgctaagaacagaaaacaaaccaaatcaaaataaaatgaaccaaaaagcaacagaaataaatgtgccttaatgtagttggatgattaccacatctactctcctcagaccaccagccttcagagtaagggcacatccttccaaataagtgcatccttgtcagggacatttggtgaggtgcaaccccttcaatgtgtccgtttcctgggtcatttggggtcttaggaaaatcttcttgttggtgcgcactgaattgcacatgcattatgtaactcattgcaacccaatagctgaactcatggtttcatagctattaaaatatgccacaaaccaaaccacctgtgaggcgccaactcagcaaatgtgccttttcagaaagtagtcataaaaggtacaaaaaatgaggatgaaagaaccctgaataacaacctagagctcatacatttggagccatgaggaaaagtattccatgtaagttgaaggaagatagcagtcaggagcattggtgttgaagaccaccctcactatgagaaagggtcatatatataatgtggaatgaatcagagctaccactgtgggtcccctgttggaaaaactgcaattttggataattatgtgcaagcactaggagaaatgccagatgttagaatccatgtttaatgtgaaaattgcattttgttgtttgcagaacctcaatatatagctttctctataaaatgtgggcatatttctgaaggaaagaaaaatgccagggtttcgttttaacatcctgttacgttttagttaaattcaaaggaacatgacttttcaaagagaaaactgtctctctctcataaaatagcattaagtggttccaaacatatcttaggttataattgaaattggactctgtggaacaaaattaatga

SEQ ID NO: 60250 - DNA, 2187 bp, Homo sapiens
agcctggagtgcaacggcgcgatctcggctcactgcaatctccgcctcccgggttcaagcgattctcctgcctcagcctcctgagtagctgctgctagagacgcccgccaccaagcccggctaatgtttttgtatttttagtagagatggggtatcaccatgttggccagggtggtctccatctcctgacctcgtgatccgcccgccttggcctcccaaagtgctcagattacaggtgtgaaccaccacaccctgcagagtcctactatttttaacaagcaaatcacaaggtaactatgagtaagttctagtatttgatagtacagtagggaaattataactaacaataatttatggtatatttcaaaatagctagaagatggcaatgttctcaacacaaagaataggtaaatgtctgagttgatggatgtcccaattaccctgacttgatcattacatactgtatacatgtatcaaagtatcccatgcattttcacaatatacaagtaagaatacaaaaaaattaaaaaagtaatacgtcattgattctttttttaagcatcacttctcatcctttcagtccagaggaactcagacagttgagacacactgagaatgaaccactggtgtccgatttccttaagaagcacactctgtagtggagataaacatgctggtggtttatttgcagtgtgctcttgggatcgacacttttgaacacaactatagccactagccctacaacttgaaataagtgaccccactgtggtaatttacggttaataacactttcttctcaaaaatagtatttccaccaaaagataaatgattttaaataatcatctcatctttcattccagcacagagtttgatccagctctctccaatggctaaagaaagactaggatttaacttgtggtaataaatattacatgttttcatcaaaacacagttctcctccctttgcaggcattttcaamcacttgcagttaacaaagtcacaagactagtcttggcacgggatatgtgaggaagtgatgtgaattcctggccaaagcatagaagtgcagaggcaagaccatccaggtgactcttgcgaagcatcagctatggaggcaatgtggtccacgacacttgtgacaggttagcggcttgggcagagagtgggaggaatattaagcatgggtacataattgctctgaaaagtcgtggactggtaccagacttcgtacgaataagaaataaatatgttaagcaatttcgatttgggggcttgcaccacttttgtctcttctgatacaacaatcgattgtgcaaaacagtctacaaatcagacttttaaataaatactttccactcaggaatgggtgaagtttatcaaggtcatttccaggtgtctgggaaatttatttgaccgggttacaccaatattaaaatatgaatccattgaatctatataaattgtaaaacataactttaattcaaaaacaagcttttagaaagtttcaaagatacctgtttattctctgcagtgtgtcaatcaaatcacttaatgcattttataccaaaatttaatagtcaagcaaatgatcaggatagtaaattttctaacacattttttataagagagagaaagcctttccgttttgaaaaagagaatgcagaatggagagtgatatttgtcatactgaatagcattatgggtcccttattcgggcaagttccaagtttggatgaggagcttgtctttttgtggtcaatggcagggtgaaagcagaacacaagcctatcactttctgcacagggtttccaaatgcctgccgcttcatcccagactgtgtggaatatgctctacctctttctgacagtgctccaagggttagcctaataggaaggtgaaaggcagaggccaagggtgtgggaagtgatttctggccattagctattttactatcaattctgatttccttaaggggcttaaaactgtcactatgttcaaaggtttacacacttacaacagcctcagacagcaaaaaagatagtcaattttccactataatattataatagcactcgtgctatttagtgctctctactctgatgaatttctgggacttgtggggtatgattcccagtgtggcaacttgactttagctgttcccacacttaccagcattgacatttgat

SEQ ID NO: 60251 - DNA, 1111 bp, Homo sapiens
ctttctcacaaaatcctgtttagtccccttttaaacaatccttgatttcactaacagtacaagagttatggaacagaattcctctccatcctcttttacaaactgcatattcgaacatcgggtgggaaggaggtcttgtctcagaacactttggtatcatggtatctgtcacactgcaacctccaatgaaagtgaagtttgtctccattgtgagttacagtaatcatttagctactccatacatggcaagcaaaaataaataaatagattaacaaggaaaataataagctctgattgtgtgtgtgtgtgtgtgtgtgtgtgtagatacaaacacacattttcactcccgagattttgtgatactctagctttaacaagaattgttcagctatttccctagcattagaggttaaaagatattgagcttactgacatctaagctttggggctgccactgaggttatttattttcaattttgtatcaagtggcagcaacaatgctgtgctgtgaattaagtagctttgattctctgttaagtgtgaattcaaagcttgaatacggatataaacagccatgataaagacgcagtccaacagaggtcctgccaataacaggatttagtttaaatagctgagtattcaacatgaactctcccttcattctatatagcaagtagtgaccattgtaattaagaattaaatgtactaacaccaggaactacaggaaaataaattgagatgtcaacaataacatttattgtactccataattatgcaattatttgatttttattccctgtctgcatcaccaaaatatatatgcgaatagggcagacatcttgtctttcctattcatcatatatttataagtagttaraagaataatgtctagcacagggtaagcatttggtaaatatatgatggattaaaatagattgaaggattaatgaataaattaatagaaacgaatgtttgaatgaatactggaatcaattctagaatggagatttaatttttaaagcacaattgatatatgctttttattaattttatttataattaataaataattcaatttatttataattgacacataagtgtacatgtttat

SEQ ID NO: 60252 - DNA, 722 bp, Homo sapiens
ttgcaatccactttttaaaagtttgttctgtgcttgattgatgattttaattattgtactyaactttttaattaatattgaatttcttttgagttatgatataaagtttaactttattttcatattagtattagtataattaatgatatcgtttggctctgtgtaccattcaaatctcatctcaaattgtaatcctcttatgtcaatgggaggaacctggtgggaggtgactggatgatgggggcggtttcccccatgttattctgatgatagtgagtgagttctcacgagatctgatggttttataaggagccctttccctttcattcagcacttctcctttctgtcaccttgtgaagaaggtgccttgcttccccttcaccttctgccatgactgtaagtttcctgaggtctccccagccatgcagaactgtgagttaaacttctttcctttataaattaaccagtctcagtatcgttacagcagtgtgaaaatggactgatacatagaatttgtaccaagagtggagtactgctagaaagataatctgaaaatgtggaagcaactttggaactgggtaacacgtagaggttggaacagttcggaagacaggaaaatttgggaaagtttagaacttcctagagacttgttgaatggttttgaccaaaatgctgatagtgatatggacaataaagtccaggctgaggtggtctcagatgga

SEQ ID NO: 60253 - DNA, 1445 bp, Homo sapiens
aaactctttgtagctagaattactttgttattaccaatttatgtattaagaaatgtcacccacaacacctccagagatgttaaataaatcaatggtgactttcttgacagggatgagatcaccaccagcttccagttcaagaatttctgaaagatctttggcacccagagctaatgagatgaaatgatcccggaactcttgctgatctcagaaacttgctgctgttttgcttcatctgggataaagttgaaacagcttttagacataaagctcttctttcaaatagctaggtggtgtcatgcaaatcaaaaacattagccgagggtgaaaggcttctaaataatgcagaggctgaaatcgacggttgtatgtatttataattttttaaatctctaattagaatgcatctgactttgtattctgtgtttaagaactattaaagattcttttgaaatttgaaagcttattattaagatgacaaagttcccctttgtttttgtaatccttttcttacaaccattccggtgagaatgttagacaatttaaccacagtaattcattcataaaattcttaaactcagtgcaaaatgcatcactttctaaaatgttgtaaaactaacacagttttacttgaagttgacaagtatgaaaaaaagatcaacatttttgcatggatcctttagtcaaaaaagtttggaaaaaactaactctaaagtctctacctctcaccccccacccccctttatttcaagttcagtttctagagccggttaatataggaatatcccttgcacaccttcaggggaacagagaatccgatattttccaaactttctctgggccaaagtttaggacattaattataatcaaaggctgcaggtgattattcctggctccggacttcaatatcaatgacataagtgtgggaygctggtctatatgtcaaaatttacctagaaggaaagatttaaaatggtacccccagagggaaatagaaagaggtggagaaaagaaaaacaagattctttaggtttcattaaaaataataaacatattgggaataagccaaggtaaacactttggtttagggggaaaaaaatcaacactgtgttctatgtctgaatcatggagcgagaacatcccaacaccatggcagtaatggccactgggcgtagttaggaaggaaaattagacaacttgaaaattcagtgattcaggccaggcgctatggctcacgcctgtaatctcagcactttgggaggccaaggtgggtggaccacctgaggtcaggaattccagaccagcctggccaactggccaacatggtgaaaccccgtctctactaaaaatacaaaaattagcctggcatggtggcatgcacctgtaatctcagctactcaggaggctgaggcaggagaatcgcttgaacctgggaggcagaggtt

SEQ ID NO: 60254 - DNA, 1359 bp, Homo sapiens
tttctataggcttgctaaccatatagcaggattatttcaacaagttgggtattttccagaacccatgcaaagttttaggcctctgagcagctttagttagtcaaaatgacatacatgggggtccttttttgttagtagggctgtctaatgcagggaatggtttaggttgatatgtgccctttctgatatgttcagtttctctgtgtctggtatcaactttaacttcaaggagaactttgaacctggtggacaagaaatgagagtagaaaaggaaacctcgacttctcctatatcctgaaaaccaaactcatattgtcttaaatgtcttctatcattaatttctctctatgggtcctaatttgggaaaagaaaaatgtattttgtcatgtaacttcttctttaatagctccattcacaatcagacaaatattgaacttaaacccagtgatataacatgatcttgtttcccagtgtcttgccagaaatgaggagttgtatgtctggtaccactttatttgggatctataccaagctgagcaacacctgggggatgccagggaactctcccctcactgaaaaaagatattcaccaacagttgggaggacctaaaataaaaaggaccatcaggatatggcttcccagctcttactcactcaacaaatatttgggggatcctcttttgccccaggcattgatcttagtgctgggaataaagtgataaagaaaacacataccttggcctggaarcattcacagcttcacgtgttagccttcctctctgggatctttctgtcccggagacaagtctttttctctctgtcccagttgctttctattttatcaggaaggtggcaggtctttactgcggtgtttatacatctccttattgaaggacacctattaaagctgtaggagcagcaggacttaagaagaataaaaggactagagttttagatgactaaaaatgtaacagtcaacagcagctgcactgtgactgctaaaatctcttaagacatgtagaactgcatgaatgaaagtccagtctgtttctcatagaaatcctgttacattccactctggtcagacaacagctagagtatctggttgttctaagtatcacatactacaaggagaaaatgacaaactaggatgtgccagtaaaatattacacagaaaagtcagctcccgaagcaattccctgctacaagtctcactctctcgaaaacttaaagaaattgaaggttagaaaacaaagtgtgcattgcatgtattttaggtatttggaggattgtgatataaaatataggggttaggcttaaaattcatttcaaattttagcattaaaagagatcctatgg

SEQ ID NO: 60255 - DNA, 561 bp, Homo sapiens
tttccccagagatagccccttttcttttctccaagtaccacactgttgaatatggctggggtagggaacattaaatgtagcgaamcatggtaatgaattaacccttcatcctgaagggtttccaggaaataaacatgaattcagccatgaaaaaaaagagtataaaagtcaattatatttcaatggcttccaaataataaaatatatttttaagaacaagtcaaacctaacatgatggctcacacctgcaatcctagtgacccaagaggttgaggtaagaggatacctctggcttctcctaaacttagaaaataagtagattaaggaaaagaaggaaataactaaatctgctctcccatgtggccttctagctcctgccctatctttttaccctcacatgctcatctactggtccacctcccactcactcatcagcccactggcatctgacctctatcactactacttcacctaaagcaccattgccaggatgcacatggtccctttatgtagagtccacaggagacttcagtcagtatcttactggatctctatcctgca

SEQ ID NO: 60256 - DNA, 561 bp, Homo sapiens
tttccccagagatagccccttttcttttctccaagtaccacactgttgaatatggctggggtagggaacattaaatgtagcgaaacatggtaatgaattaacccttcatcctgaagggtttccaggaaataaacatgaattcagccatgaaaaaaaagagtataaaagtcaattatatttcaatggcttccaaataataaaatatatttttaagaacaagtcaaacctaacatgatggctcacacctgcaatcctagtgacccaagaggttgaggtaagaggatacctstggcttctcctaaacttagaaaataagtagattaaggaaaagaaggaaataactaaatctgctctcccatgtggccttctagctcctgccctatctttttaccctcacatgctcatctactggtccacctcccactcactcatcagcccactggcatctgacctctatcactactacttcacctaaagcaccattgccaggatgcacatggtccctttatgtagagtccacaggagacttcagtcagtatcttactggatctctatcctgca

SEQ ID NO: 60257 - DNA, 947 bp, Homo sapiens
tccagggtcccaactgctgtattttaagtctgttgctgtgtttgtaccttgacctcactttccaaggctgctgctggccaatgatgtggtattgtgaggggaccccctcctctgagaagctgggctccttctttagctgactctggcacacggactccccagtggctttgctggagcttccttccactgagcggcagtctagcattctaagtttccacccagtcttctctcagtctccccttcactcagggtcaggctaacactgtgatctgactgctagcccggccttctccacctcccttgctgtgtcattycacataggcatttcccctaataaattcctggaatacttactagtatcttgatatctgctttggaggaccctaacaaggcagaatggttgaactgtgtctgctggggcaaagaggaagaggctcagattattccctagatataaattagtactcctgaaggtttcttaagattatcataagtatggaagccagagagcactgtagaggagttcaagttgattaattgcatctgtgatatacatatatatgtgtgtgtgtgtgtatatagtatatatatgtgtgtgtttatgtatttttatatgtatgtttatatgtgtgtgtttgtgtatatgtgtgtttgtgtatatgtgtgtgtgtatatatatattttatatatatgtatatataaatagagagagtgtccactatacaagtctagaccagaaaggaaacatcaagtgaaaggcctactcccatagcaggaggaaaaatgggagcagataacacatacctggaagcaggctaatgtcttagccatggtgatctcctaaatgcaatgggcatccattcatagtatccccctgtgacctacaagcactgcttgatttctatatgtggtgagagttgaggaatttcctccagatcccgttggct

SEQ ID NO: 60258 - DNA, 824 bp, Homo sapiens
ccatggagctgctgcccatggaggtacaaggtgccataccaaggtacaaggatgcaagggtcaggggcaaggttggatcagggaccgtgattatatatccaaggtggctggagggagtttgcaaatcatcattgtgccgtgaatggggagagagagggtagtaagagtcaaaactggagttgtatctaatgtcatgttcaagggcatggcaaaaccttaacagggaaggtggagtatcagaagatgagactaggaacagggcaagaagctgaatgtgagtcccagaagcttcaaggtgagaactaatgctgtgaggggaacaggggggctgcgatgtattttcagatggtgtgaattgcatagaacatggtcaggcctgctggaaaaaggggccatgcagaaagaattatgagggctttaaatcacttagtctcraccctctgcctactctgtgagctttttcctggctgcacaggacccactttgtactctagattgcagtcaactgcttcaatattatccagtatttgggcttacttaaatagccaagttttctaaagtgctttatgattatatcgtaagctctttgacaacagagctgtgtcgtctttagaatttctcatagaacctagcatcatctttgctggaataatagatgtagagcaattgaagtatggcttccttgcagcacctacgcttaccatagtttctgttgaggcaaggtaaaattccctaatgcacccatgcttctaaaggactctgcccattacctgtagatttggaggggccaggccccttgcttaggcttatgccttgttttccta

SEQ ID NO: 60259 - DNA, 824 bp, Homo sapiens
ccatggagctgctgcccatggaggtacaaggtgccataccaaggtacaaggatgcaagggtcaggggcaaggttggatcagggaccgtgattatatatccaaggtggctggagggagtttgcaaatcatcattgtgccgtgaatggggagagagagggtagtaagagtcaaaactggagttgtatctaatgtcatgttcaagggcatggcaaaaccttaacagggaaggtggagtatcagaagatgagactaggaacagggcaagaagctgaatgtgagtcccagaagcttcaaggtgagaactaatgctgtgaggggaacaggggggctgcgatgtattttcagatggtgtgaattgcatagaacatggtcaggcctgctggaaaaaggggccatgcagaaagaattatgagggctttaaatcacttagtctcgaccctctgcctactctgtgagctttttcctggctgcacaggacccactttgtactctagattgcagtcaactgcttcaatattatccagtatttgggcttacttaaatagccaagttttctaaagtgctttatgattatatcgtaagctctttgacaacagagctgtgtcgtctttagaatttctcatagaacctagcatcatctttgctggaataatagatgtagagcaattgaagtatggcttccttgcagcacctacgcttaccatagtttctgttgaggcaaggtaaaattccctaatgcacscatgcttctaaaggactctgcccattacctgtagatttggaggggccaggccccttgcttaggcttatgccttgttttccta

SEQ ID NO: 60260 - DNA, 263 bp, Homo sapiens
gggagagtttgcttgataagaattcttgtgaaaaatggccattatcccaacatctgttagccttgcaaataagctagtaaacattaatgttttcctgggctatagatatagacsaagtggtattgtcctgatcatgagagaaaatggccccattgtactctgcactgtaagaccatatccagaatcatgtccccagccataggcatcacataagacagatactgagaacttagcctccagagggtgcaaaccaagaggctaat

SEQ ID NO: 60261 - DNA, 1347 bp, Homo sapiens
  misc_feature (1)...(1347): n = A,T,C or G
agnnnnnnnnnnnnnnnnnnnnnnnnnnnnnnnnnnnnnnnnnnnnnnnnnnnnnnnnnnnnnnnnnnnnnnnnnnnnnnnnnnnnnnnnnnnnnnnnnnnncgtcacagcctttttcatccagggacccggaaagaaggagtgtctcggggaagacagcagtgggggcctcatggtctggagccctctccccaccagatagatggaagttctggaatgttcctagccggttctgcttctcttggcctgcctcttgctgtgggccctcaggcaggccactggccttcctgagacctgatttccttgtccatgaaaatgacatggaaggtgacagcagcaggatggctcatgggagacgtggctgagcactgggcctgctggcgcctcttctccagcatcagctcttcctttccagttaccgggggtgggggggaactatattgcccagtacctgtccccgctttttcctcagtcacagagccccaactcgtaactgggcacctggccattaagagtgaaaattacatttcccagcgtgccttgcaactagatgcagccatgtgtctgagttctgggcaacgagggtgaacagcaatgtcacgtgcagcagaaagtatccttaaacataaggctgtgctcttccttcctgctagttggaatgtaggtgtgatggctggatcctaagcagctattttggrtcatgagaaagaagccacagtgaaggatggcagagcaacaagctagaggagccagggttcctgatgatcctagaggcatcagagtggccctggaggccttaagtaaaagaataagaaacatcccccttccttaagtcactacgacttctgtgctgtttctgtgaagcctgaatctaatcctgatgtctatgttggttacccatcagtctaccctcagtctctttggctcttctctgtgaccagccctgctggcccacacccaacatccactctccacttctccctgctctcgttctgctgggaccccctctttgagggtcccactctccacttcttctccccccctcccccgttctgctgggacccccctttgatactcccagggccctgtggtctctgaggttgaggtctactctcagcttgatgttgctgccaagccagcccctctcacagcacagagtgctcagcacagcctgtaattatgtatttattgtggggttatatgattgctgcctccccaggactgtcactaatgtgagggcagggcccctgcctggtattcacatgatatcctcagctccccgctggggggtctgggctcaagcaggtacccagtgaaccctgggcaggtgaacctcgtcctggtgag

SEQ ID NO: 60262 - DNA, 1347 bp, Homo sapiens
  misc_feature (1)...(1347): n = A,T,C or G
agnnnnnnnnnnnnnnnnnnnnnnnnnnnnnnnnnnnnnnnnnnnnnnnnnnnnnnnnnnnnnnnnnnnnnnnnnnnnnnnnnnnnnnnnnnnnnnnnnnnncgtcacagcctttttcatccagggacccggaaagaaggagtgtctcggggaagacagcagtgggggcctcatggtctggagccctctccccaccagatagatggaagttctggaatgttcctagccggttctgcttctcttggcctgcctcttgctgtgggccctcaggcaggccactggccttcctgagacctgatttccttgtccatgaaaatgacatggaaggtgacagcagcaggatggctcatgggagacgtggctgagcactgggcctgctggcgcctcttctccagcatcagctcttcctttccagttaccgggggtgggggggaactatattgcccagtacctgtccccgctttttcctcagtcacagagccccaactcgtaactgggcacctggccattaagagtgaaaattacatttcccagcgtgccttgcaactagatgcagccatgtgtctgagttctgggcaacgagggtgaacagcaatgtcacgtgcagcagaaagtatccttaaacataaggctgtgctcttccttcctgctagttggaatgtaggtgtgatggctggatcctaagcagctattttgggtcatgagaaagaagccacagtgaaggatggcagagcaacaagctagaggagccagggttcctgatgatcctagaggcatcagagtggccctggaggccttaagtaaaagaataagaaacatcccccttccttaagtcactacgacttctgtgctgtttctgtgaagcctgaatctaatcctgatgtctatgttggttacccatcagtctaccctcagtctctttggctcttctctgtgaccagccctgctggcccacacccaacatccactctccacttctccctgctctcgttctgctgggacccccyctttgagggtcccactctccacttcttctccccccctcccccgttctgctgggacccccctttgatactcccagggccctgtggtctctgaggttgaggtctactctcagcttgatgttgctgccaagccagcccctctcacagcacagagtgctcagcacagcctgtaattatgtatttattgtggggttatatgattgctgcctccccaggactgtcactaatgtgagggcagggcccctgcctggtattcacatgatatcctcagctccccgctggggggtctgggctcaagcaggtacccagtgaaccctgggcaggtgaacctcgtcctggtgag

SEQ ID NO: 60263 - DNA, 1347 bp, Homo sapiens
  misc_feature (1)...(1347): n = A,T,C or G
agnnnnnnnnnnnnnnnnnnnnnnnnnnnnnnnnnnnnnnnnnnnnnnnnnnnnnnnnnnnnnnnnnnnnnnnnnnnnnnnnnnnnnnnnnnnnnnnnnnnncgtcacagcctttttcatccagggacccggaaagaaggagtgtctcggggaagacagcagtgggggcctcatggtctggagccctctccccaccagatagatggaagttctggaatgttcctagccggttctgcttctcttggcctgcctcttgctgtgggccctcaggcaggccactggccttcctgagacctgatttccttgtccatgaaaatgacatggaaggtgacagcagcaggatggctcatgggagacgtggctgagcactgggcctgctggcgcctcttctccagcatcagctcttcctttccagttaccgggggtgggggggaactatattgcccagtacctgtccccgctttttcctcagtcacagagccccaactcgtaactgggcacctggccattaagagtgaaaattacatttcccagcgtgccttgcaactagatgcagccatgtgtctgagttctgggcaacgagggtgaacagcaatgtcacgtgcagcagaaagtatccttaaacataaggctgtgctcttccttcctgctagttggaatgtaggtgtgatggctggatcctaagcagctattttgggtcatgagaaagaagccacagtgaaggatggcagagcaacaagctagaggagccagggttcctgatgatcctagaggcatcagagtggccctggaggccttaagtaaaagaataagaaacatcccccttccttaagtcactacgacttctgtgctgtttctgtgaagcctgaatctaatcctgatgtctatgttggttacccatcagtctaccctcagtctctttggctcttctctgtgaccagccctgctggcccacacccaacatccactctccacttctccctgctctcgttctgctgggaccccctctttgagggtcccactctccacttcttctcccccsctcccccgttctgctgggacccccctttgatactcccagggccctgtggtctctgaggttgaggtctactctcagcttgatgttgctgccaagccagcccctctcacagcacagagtgctcagcacagcctgtaattatgtatttattgtggggttatatgattgctgcctccccaggactgtcactaatgtgagggcagggcccctgcctggtattcacatgatatcctcagctccccgctggggggtctgggctcaagcaggtacccagtgaaccctgggcaggtgaacctcgtcctggtgag

SEQ ID NO: 60264 - DNA, 1347 bp, Homo sapiens
  misc_feature (1)...(1347): n = A,T,C or G
agnnnnnnnnnnnnnnnnnnnnnnnnnnnnnnnnnnnnnnnnnnnnnnnnnnnnnnnnnnnnnnnnnnnnnnnnnnnnnnnnnnnnnnnnnnnnnnnnnnnncgtcacagcctttttcatccagggacccggaaagaaggagtgtctcggggaagacagcagtgggggcctcatggtctggagccctctccccaccagatagatggaagttctggaatgttcctagccggttctgcttctcttggcctgcctcttgctgtgggccctcaggcaggccactggccttcctgagacctgatttccttgtccatgaaaatgacatggaaggtgacagcagcaggatggctcatgggagacgtggctgagcactgggcctgctggcgcctcttctccagcatcagctcttcctttccagttaccgggggtgggggggaactatattgcccagtacctgtccccgctttttcctcagtcacagagccccaactcgtaactgggcacctggccattaagagtgaaaattacatttcccagcgtgccttgcaactagatgcagccatgtgtctgagttctgggcaacgagggtgaacagcaatgtcacgtgcagcagaaagtatccttaaacataaggctgtgctcttccttcctgctagttggaatgtaggtgtgatggctggatcctaagcagctattttgggtcatgagaaagaagccacagtgaaggatggcagagcaacaagctagaggagccagggttcctgatgatcctagaggcatcagagtggccctggaggccttaagtaaaagaataagaaacatcccccttccttaagtcactacgacttctgtgctgtttctgtgaagcctgaatctaatcctgatgtctatgttggttacccatcagtctaccctcagtctctttggctcttctctgtgaccagccctgctggcccacacccaacatccactctccacttctccctgctctcgttctgctgggaccccctctttgagggtcccactctccacttcttctccccccctcccccgttctgctgggacccccctttgakactcccagggccctgtggtctctgaggttgaggtctactctcagcttgatgttgctgccaagccagcccctctcacagcacagagtgctcagcacagcctgtaattatgtatttattgtggggttatatgattgctgcctccccaggactgtcactaatgtgagggcagggcccctgcctggtattcacatgatatcctcagctccccgctggggggtctgggctcaagcaggtacccagtgaaccctgggcaggtgaacctcgtcctggtgag

SEQ ID NO: 60265 - DNA, 762 bp, Homo sapiens
ctggtgcccacctttctcatcaccctagccccaccggcttcctcaggacctggccttgccctgcagcccccagcagcccggggatggtggggtggctcaggaggaggatgcatcctgtgggggctggaggaagcccacagaagcccgcacttcctggcttacacacccggtggcctcggctagacctgggctgcacgaggcccagcccccagcccccagccccccagccccgtgtcctggtggacagaggggctgctcaccccattggcagcaggcatccctgaagaagggatgcagactttgtctttgctgagaagtcagagccggtggggccttggggaagaggaagctcaggcccagcagagmcgagtcctggtgccagcgagtcccctcagggtaccggagagggcctggctggaggtgggatgggtgtgggtccttatctccaagttgggtttcctctggtagggcgacatctcatttgcattttaaaaagttctccttggggtgacaccaggaggctggagcaggaagccatcggttagttaccaggttccagtgagaagcgatacaggtgtggggccccacaggggccggcatcggtgatatctaggagggagattgggggcagggagggatagaggggtctaggtggcccccggtttctggcctgggctatgggagggtgcacctggggagcagcagttggacggtggggtgagttctgcttcagtgcagaggggctggggcgtctccccaagg

SEQ ID NO: 60266 - DNA, 597 bp, Homo sapiens
attgcttttttttcctaaattatgttttttctaattacaatcttaaaccttgacctaactgtctcatctttggggtctctgcatttagcttggtgcccagctttgtgtctggctataggcactctataaatcatatagtcaaataggcttatgtggtgaccactcatttgttgtcgtttggatgtattcatcctgaactcatcccgaactcacccttgactaggtaccttgaatttgtggtcattgatcaggggactttaaatgctgatctgagtcactgytttcattggcaaaggaatgagggctgtgaattggggattgttctcagacccaatgacgtactgagagaagagatcatggctccacactctgctaacaaactcttttttactgactataaatgctctacagctgaactctgtacaaaaccctaagcactttcaagatctcaaaatactctctatatatttaaagcaaacaaagataaagctctcccgtgatgaaaaaaaaaaaaaaaaacctgagtaaatggaaagaaatgcaattcagaacaagtaccatttttaatctaccaaattggcaaagactaaagagagg

SEQ ID NO: 60267 - DNA, 597 bp, Homo sapiens
attgcttttttttcctaaattatgttttttctaattacaatcttaaaccttgacctaactgtctcatctttggggtctctgcatttagcttggtgcccagctttgtgtctggctataggcactctataaatcatatagtcaaataggcttatgtggtgaccactcatttgttgtcgtttggatgtattcatcctgaactcatcccgaactcacccttgactaggtaccttgaatttgtggtcattgatcaggggactttaaatgctgatctgagtcactgctttcattggcaaaggaatgagggctgtgaattggggattgttctcagacccaatgacgtactgagagaagagatcatggctccacactctgctaacaaactcttttttactgactataaatgctctacagctgaactctgtacaaaaccctaagcactttcaagatctcaaaatactctctatatatttaaagcaaacaaagataaagctctcccgtgatgaaaaaaaaaaaaaaaaacctgagtaaatggaaagaaatgcaattcagaacaagtaccatttttaatctaccaaattggcaaagactaaaragagg

SEQ ID NO: 60268 - DNA, 2415 bp, Homo sapiens
accttaaagaatttgtgcaaataactccagcatcacaagcatgtatagaggtagaaaaacaatggggattttcattccttcccccatcatagaaaacaacagaagatttaacagaagagtttgaagaacttaagactgatcttgctgattgttgactgtggacctgattgaatagaaactatctgtatttaatgatatataatatacctttatttttcattcttaacttggaaatgcttttcaagggactattatacattggcattacattagatattacacattaataaacttctaattagtcaaatttagaagaatcagtgttccagacactggaaatgtgtcaagtaataaagctgaaccttgaactggagaaaaaaaggaaatatgacccctagatgttatctacactaggcatctgttgatatgatcaatattctttaccctcttcctttctggtaacagcgttagcccatctcctttgtggagttgaacaacccccattctacgtggtaggaagagcaccctggccaaaggcatagagctagcttggccaatcaggatactccatccatttgtccacagtgattggtccaggggtgggcatatgatctaaacagggccgactgttggagatcagaatcgttaggggttccatccatagtaagagcacacattccctggagaaatgtcaggtgtggaagattgtcaaatttggtatagtcagctgtggactaattagggctctttgaattacaagtgtcagatgttcaactcaaaaccaatctttccctggatttcacacacacatgctggaagagagaagctctgtctttcctctggggttacttgctacatagaggaagtcatccatcaaagagagaatgagaccaatctacagagagaagcaggactgagggaaggagttagagagccctaatgactttgagtctttggagccaatcatgctcaaggcgaactccaaccctgccacaaagagctaatgaatcccctttttttcattaatattagttttgagttgagcatctgacacttgtaatccaaagagcccttattagtccacagctgactataccaactttgactatcttccacacctgacacttctccagggaatgtgtgatcttactatggatggaacccctaatgattctgatctccaacagtgtactcacacaatgttactacagtgaccaccaaagtaagaatagctaacatcttccaatcaaaatcttatcaaaagcactgtgctaagtgctttgtatgcattgtttcctttactcaccacaaaagccctacacagcattatttatttccacttccctacttttaatttgaagaacctaaggtttggagaacttgagaaattgttcatggttccaccaccagtaggtgttggagagaatgtttaaagccaggcagtctgactctctggaacatgtgccgttgaccttacattgttattacttccttcctagacttaacctctcaagaacagcacagccaagaagggtcaatctgaattccaaggtgctatttatctactagttgggcagccagtattatgagatagtgaatgatgctgagggcacattttgcactaggattatagagcgaaccctttcaacaatgcaaaaagatagaaatgagtgttctagtttaactttctagattaagaaactgggatggttaagtgacatgctcatggttacgctgccccaagtgctaaagttgggaaaggctcccggaaatgtgtgacttcatccccaagaggactgaaaagaaagtgttctgaccttgaaaggtatacagaaatcaaaggattcaggtcgatggggtgaaaggtttgttttagtaaaaaatgtcttatccttgtttgatcggttattttattctagggaggaggccttgtctagttttcctttttatggaaaggtcagccggtgggtcaggaagctggggaatgtgtgccttgtcatgaattcaggcttcctgattcatggggtgaaatttcgctttcttattgcctctcggagaaggatgagctcattggtggtgacaagagcagccttctgtccttcctgctccaaatgctgaaagaagtgggatgtgagctstcaaatgtcacagaagcctacaaaacgctgactcccggatgccaggcataactggggttggctcagaacatggggacagggcaataccatcatctgctaagaattcattgttctgtagcttgccctggacacaatggcaagactgagacaggaggaatagatgtggggcggggtgggggcagacaaactgggtgtgtctttgcaaacatagcctttttgggggtggggagagataggatcaatcaagaggcagactgtatgtgggtttagggcacca

SEQ ID NO: 60269 - DNA, 474 bp, Homo sapiens
tgtctctgacaggggtgtttaataagcattcgccaaactgccaaatgagcatcttagttctcagtggagattaaaggttaagcaggtgtttttccaggctctacgtataatttaaatttcaatygttattttacacagattaatctagaagttgttagaagcaaacatggagccatgcatatttccatcataaacaggaaaaataaaatatctacagacttcgaggggccttcggggtcttggcaccctgccagttgcatctcccctgtggaggcatttggcttatgatcttgcaggggctgtttgtttccaagtcctgctctacctgtttctcggtgtcttagttcttgcttttagtagagaatatattttattctttcctcttcaaagattttgtatgtgtggctatgaatgagcaattcatgttcattgtaaaaacatgccaagtgcagaatggtataaagaagccgcaac

SEQ ID NO: 60270 - DNA, 2388 bp, Homo sapiens
tgcatgagagttctaattcctccacatcctcatcaatacttatcttctgttttttaaaaaaaagttattatagccatcctcataggtattaagtggtatgtcattgcagttttgatttacatttcctaatgaccaattaatttttgcatatggtgtgagggaaggatccaacttcattgttttgcctgtgtctactcagtgctgtttgttgaaaagactcttctttccccacatagcaatcttggtacccccgtagaaaatcagttgatcatagatgtatgggtttcttcctgggctgttaatcttactccattaatcracatgtctattcctgtgctagtattacactgtcttgattgctttatagtaaccaggaacctctgtagtaagttttgaaatcaggaagtgtagtcctcctactttgttatttttcagtactgttttggctagtctgggtcccttgaaactccatatgaattttacaatcgttattgattcctacgaagaaatcagttgggattctgatagggtttttgttgaacctgcagatcagtttggggagtttcactatcttatcagtgttaagtctactgacccataagcagggaatttttccatttatttagaccttctttaatgtctgaaacagttcatttataaggcccatccatgtggtcaactttctgggacttacattttgaacctatgaaacattcagggaaagaagttttgtggaaggtggggaagggtataatgaattctggcttgatgcctcattcttgaattctccagaggtgatgaggatctccccttctgagctgcaccctttacagtaagtcttagtggccttcaggagagggctgctgagcaggctcatgaaacctactggaagtccctggtcaactgtcctggagaaggcaggggccacttcctgccctgctagggagactgatttctggggtgaggaagaatgaatcacgaccctcttggacccaatctacctgcctatgagaggttgtagtgagtcacccttacttgctaatgacaatgtttaaatgactctgaatgacctcagaggtttgcctctactctcctgaaagttctaatttatagaatgatgccctctggtttcataactggacaaaatgcatatcaacagttgagaaagagtgagaaagagagagtgagaaagttgggggagagaatatactaagccctcatgaagtttctataataacctatgacatagaaaactcccaccaactctttagatgtgactccattttataaagaaatctctttctcttttccttttttcttttgccattctcttctctgctgcaggaagtccttatctgtcccttgaacgcccagtttcagtttttccctcttggtgaggctcctctgggcaatcccgtccactcatcactgtcttttctgcatttctggtgtgtgtggtcagagtttctacccaacacttgctcacacgcagtctggattgctttctgatagtccccggcattaatctcctcttccctgtgctgtcatctccacaagggcagggcagggctgtgctgccgacctcatctgcatgccctgggggatcgagctgacactgggtgcagcaggaagtgtggccctggtagaatgttctcacccattccagtataggattgggacttcctgtcctcatccaggctgtggcggttacatttaaacctttcccacacctgggtctctacctcagttgttgtcctagcaggttgggttggttcatcctgccctgggcattcctaaggctattataagtgtgtcaggtctgggtctttatcttgattagaataataacttcctgaatttgtccagtgggcagcctttccttaatgaatgaaaaaagaactggaatgttactgcaaatgagtatctaccctgttctctttccacagaactcttagcattctgttgttatgaaatctcctggatatctaattggatgtatattactagagtgcttctgtattctgacatcaagtttcattttaattatatgggagaaaaactaattcttttaattaaaccaacatggatattaactattatcattgacttctagcagataaatcttacatgcaaaaaacagggcaaatacctcctgcactccttgggttgcctgtggagcagcctctgggaactcagtctcaaggagatgaagggcccatgggcattcctagttccatggaggatggggactagtgtggagcaaacttgtcaggatcatttattcattcacttttagttgtatgtttgctaaatccttacaaataaggtgtaaaccaaaaataaaatcctaagcaccccctcgctacctacctgaaactgaatggatcc

SEQ ID NO: 60271 - DNA, 1228 bp, Homo sapiens
ccaccgtgccaggcctgagtttgagaattcttgatccaaatcaaccttctcatgaaactgggccctagaaagacatgggtttcatgtcatcacagtgggtgtcagaaattagaatacacatggatatctctgactgtcatcccagtgtgttttctatacacctctgaaatgacatggcttgaataccccggcctctgtcctccccatcctctgggtcacattctcttgaagccacttcatgataacactccttgttgcaaggtaggccatggagctgagtgcaagtgggggctgagtggggcctcacttttctcatctgggattttaccttcaaagataataacagtagcttctgtttactgagcacccaytgtgcaccagatataccaggcacataaagataggacttctaaccctctccacagctttgcagatgttactgttatccttatttggcagacaagtgtcaaaaccacattcagacttagtaagaagacactttaattcaaaaggattgttgcagccggacatggtgctgtacaactgcagtgtcagctactctggagggctatttgggaagcaggaggatcacttgagctcaggaattctagttcagcttggacaacacagccggatcccatctttaaaaaaagaagattgctgcaataggggaggggactattgcaatagagggagaaggactgttgcattagggggagggtacaattgagtaggaggaggggagtatcgcactggggtaggggactgttgcaatgggggagagagaatattgtaatagtggaggggactaatgcagtgggggaagggactacgtcagtagggagcaccttgtgaccttaacatctgcaaagatcttgagagttagacaaagaagagaagaagagttttttctttttcttttttttttttttttttttgagacagagtcttactttgtcacccaggttggagtgcagcagtgtgatctctgctcactgcaacctctgcctcccgggttcaagtgattctcatatctcagcctcccgagtagctgggattacaggcatgtgccaccacacccatctacattttttatttttagtagagatggggttttgccacgttggccaggctggctgagacctcaggtgacctcctgacctcaagtgatctgccctcctcagcctcccaaagtactgggattacaaatgtgagccactgtgcctgg

SEQ ID NO: 60272 - DNA, 1228 bp, Homo sapiens
ccaccgtgccaggcctgagtttgagaattcttgatccaaatcaaccttctcatgaaactgggccctagaaagacatgggtttcatgtcatcacagtgggtgtcagaaattagaatacacatggatatctctgactgtcatcccagtgtgttttctatacacctctgaaatgacatggcttgaataccccggcctctgtcctccccatcctctgggtcacattctcttgaagccacttcatgataacactccttgttgcaaggtaggccatggagctgagtgcaagtgggggctgagtggggcctcacttttctcatctgggattttaccttcaaagataataacagtagcttctgtttactgagcacccattgtgcaccagatataccaggcacataaagataggacttctaaccctctccacagctttgcagatgttactgttatccttatttgrcagacaagtgtcaaaaccacattcagacttagtaagaagacactttaattcaaaaggattgttgcagccggacatggtgctgtacaactgcagtgtcagctactctggagggctatttgggaagcaggaggatcacttgagctcaggaattctagttcagcttggacaacacagccggatcccatctttaaaaaaagaagattgctgcaataggggaggggactattgcaatagagggagaaggactgttgcattagggggagggtacaattgagtaggaggaggggagtatcgcactggggtaggggactgttgcaatgggggagagagaatattgtaatagtggaggggactaatgcagtgggggaagggactacgtcagtagggagcaccttgtgaccttaacatctgcaaagatcttgagagttagacaaagaagagaagaagagttttttctttttcttttttttttttttttttttgagacagagtcttactttgtcacccaggttggagtgcagcagtgtgatctctgctcactgcaacctctgcctcccgggttcaagtgattctcatatctcagcctcccgagtagctgggattacaggcatgtgccaccacacccatctacattttttatttttagtagagatggggttttgccacgttggccaggctggctgagacctcaggtgacctcctgacctcaagtgatctgccctcctcagcctcccaaagtactgggattacaaatgtgagccactgtgcctgg

SEQ ID NO: 60273 - DNA, 1228 bp, Homo sapiens
ccaccgtgccaggcctgagtttgagaattcttgatccaaatcaaccttctcatgaaactgggccctagaaagacatgggtttcatgtcatcacagtgggtgtcagaaattagaatacacatggatatctctgactgtcatcccagtgtgttttctatacacctctgaaatgacatggcttgaataccccggcctctgtcctccccatcctctgggtcacattctcttgaagccacttcatgataacactccttgttgcaaggtaggccatggagctgagtgcaagtgggggctgagtggggcctcacttttctcatctgggattttaccttcaaagataataacagtagcttctgtttactgagcacccattgtgcaccagatataccaggcacataaagataggacttctaaccctctccacagctttgcagatgttactgttatccttatttggcagacaagtgtcaaaaccacattcagacttagtaagragacactttaattcaaaaggattgttgcagccggacatggtgctgtacaactgcagtgtcagctactctggagggctatttgggaagcaggaggatcacttgagctcaggaattctagttcagcttggacaacacagccggatcccatctttaaaaaaagaagattgctgcaataggggaggggactattgcaatagagggagaaggactgttgcattagggggagggtacaattgagtaggaggaggggagtatcgcactggggtaggggactgttgcaatgggggagagagaatattgtaatagtggaggggactaatgcagtgggggaagggactacgtcagtagggagcaccttgtgaccttaacatctgcaaagatcttgagagttagacaaagaagagaagaagagttttttctttttcttttttttttttttttttttgagacagagtcttactttgtcacccaggttggagtgcagcagtgtgatctctgctcactgcaacctctgcctcccgggttcaagtgattctcatatctcagcctcccgagtagctgggattacaggcatgtgccaccacacccatctacattttttatttttagtagagatggggttttgccacgttggccaggctggctgagacctcaggtgacctcctgacctcaagtgatctgccctcctcagcctcccaaagtactgggattacaaatgtgagccactgtgcctgg

SEQ ID NO: 60274 - DNA, 1228 bp, Homo sapiens
ccaccgtgccaggcctgagtttgagaattcttgatccaaatcaaccttctcatgaaactgggccctagaaagacatgggtttcatgtcatcacagtgggtgtcagaaattagaatacacatggatatctctgactgtcatcccagtgtgttttctatacacctctgaaatgacatggcttgaataccccggcctctgtcctccccatcctctgggtcacattctcttgaagccacttcatgataacactccttgttgcaaggtaggccatggagctgagtgcaagtgggggctgagtggggcctcacttttctcatctgggattttaccttcaaagataataacagtagcttctgtttactgagcacccattgtgcaccagatataccaggcacataaagataggacttctaaccctctccacagctttgcagatgttactgttatccttatttggcagacaagtgtcaaaaccacattcagacttagtaagaagacactttaattcaaaaggattgttgcagccggacatggtgctgtacaactgcagtgtcagctactctggagggctatttgggaagcaggaggatcacttgagctcaggaattctagttcagcttggacaacacagccggatcccatctttaaaaaaagaagattgctgcaataggggaggggactattgcaatagagggagaaggactgttgcattagggkgagggtacaattgagtaggaggaggggagtatcgcactggggtaggggactgttgcaatgggggagagagaatattgtaatagtggaggggactaatgcagtgggggaagggactacgtcagtagggagcaccttgtgaccttaacatctgcaaagatcttgagagttagacaaagaagagaagaagagttttttctttttcttttttttttttttttttttgagacagagtcttactttgtcacccaggttggagtgcagcagtgtgatctctgctcactgcaacctctgcctcccgggttcaagtgattctcatatctcagcctcccgagtagctgggattacaggcatgtgccaccacacccatctacattttttatttttagtagagatggggttttgccacgttggccaggctggctgagacctcaggtgacctcctgacctcaagtgatctgccctcctcagcctcccaaagtactgggattacaaatgtgagccactgtgcctgg

SEQ ID NO: 60275 - DNA, 1228 bp, Homo sapiens
ccaccgtgccaggcctgagtttgagaattcttgatccaaatcaaccttctcatgaaactgggccctagaaagacatgggtttcatgtcatcacagtgggtgtcagaaattagaatacacatggatatctctgactgtcatcccagtgtgttttctatacacctctgaaatgacatggcttgaataccccggcctctgtcctccccatcctctgggtcacattctcttgaagccacttcatgataacactccttgttgcaaggtaggccatggagctgagtgcaagtgggggctgagtggggcctcacttttctcatctgggattttaccttcaaagataataacagtagcttctgtttactgagcacccattgtgcaccagatataccaggcacataaagataggacttctaaccctctccacagctttgcagatgttactgttatccttatttggcagacaagtgtcaaaaccacattcagacttagtaagaagacactttaattcaaaaggattgttgcagccggacatggtgctgtacaactgcagtgtcagctactctggagggctatttgggaagcaggaggatcacttgagctcaggaattctagttcagcttggacaacacagccggatcccatctttaaaaaaagaagattgctgcaataggggaggggactattgcaatagagggagaaggactgttgcattagggggagggtacaattgagtaggaggaggggagtatcgcactggggtaggggactgttgcaatgggggagagagaatattgtaatagtggaggggactaatgcagtgggggaagggactacgtcagtagggagcaccttgtgaccttaacatctgcaaagatcttgagagttagacaaagaagagaagaagagttttttctttttcttttytttttttttttttttgagacagagtcttactttgtcacccaggttggagtgcagcagtgtgatctctgctcactgcaacctctgcctcccgggttcaagtgattctcatatctcagcctcccgagtagctgggattacaggcatgtgccaccacacccatctacattttttatttttagtagagatggggttttgccacgttggccaggctggctgagacctcaggtgacctcctgacctcaagtgatctgccctcctcagcctcccaaagtactgggattacaaatgtgagccactgtgcctgg

SEQ ID NO: 60276 - DNA, 1228 bp, Homo sapiens
ccaccgtgccaggcctgagtttgagaattcttgatccaaatcaaccttctcatgaaactgggccctagaaagacatgggtttcatgtcatcacagtgggtgtcagaaattagaatacacatggatatctctgactgtcatcccagtgtgttttctatacacctctgaaatgacatggcttgaataccccggcctctgtcctccccatcctctgggtcacattctcttgaagccacttcatgataacactccttgttgcaaggtaggccatggagctgagtgcaagtgggggctgagtggggcctcacttttctcatctgggattttaccttcaaagataataacagtagcttctgtttactgagcacccattgtgcaccagatataccaggcacataaagataggacttctaaccctctccacagctttgcagatgttactgttatccttatttggcagacaagtgtcaaaaccacattcagacttagtaagaagacactttaattcaaaaggattgttgcagccggacatggtgctgtacaactgcagtgtcagctactctggagggctatttgggaagcaggaggatcacttgagctcaggaattctagttcagcttggacaacacagccggatcccatctttaaaaaaagaagattgctgcaataggggaggggactattgcaatagagggagaaggactgttgcattagggggagggtacaattgagtaggaggaggggagtatcgcactggggtaggggactgttgcaatgggggagagagaatattgtaatagtggaggggactaatgcagtgggggaagggactacgtcagtagggagcaccttgtgaccttaacatctgcaaagatcttgagagttagacaaagaagagaagaagagttttttctttttcttttttttttttttttttttgagacagagtcttactttgtcacccaggttggagtgcagcagtgtgatctctgctcactgcaacctctgcctcccgggttcaagtgattctcatatctcagcctccygagtagctgggattacaggcatgtgccaccacacccatctacattttttatttttagtagagatggggttttgccacgttggccaggctggctgagacctcaggtgacctcctgacctcaagtgatctgccctcctcagcctcccaaagtactgggattacaaatgtgagccactgtgcctgg

SEQ ID NO: 60277 - DNA, 2420 bp, Homo sapiens
tacttgtaccccatacatttgtataaataacttaaaaagaaccacaagagtttactatcttgtttgtttataaatgcaaatacattatgaatgtttcccatgacattaactattattgatgcaggagctaaaaagaaattttaattttaataaaaacagcccccatattatttcttttctaacatagagcagtgtgtaaaattgagctgcagacatagataagcaagacggaagcttgcacagataaacgccggcagctgtgtcaataagaaaaggtgctacctggggactaggcatgttcagaatggtggctctatcttccctttcctttgtaaaccatgtgtacagtaagaagcaggcaacatggcatcagccaggcaaagaccgcatctgcattatagaagattaggtgggggcagtcagcttccccgtgcactgtgtaaacatcacacctggctcaaccaatatttgggccatatgtaaatcagaccctgcctcctcaagccggtctataaaatctggtgcgctttgctgcaggccggaagtccactcaggcaaccctctccctcacaggagagagagctattttcctttctctttcttttgcctattaaacctccacttctaaacctacttcttgtgtgtccacatactcaatttccttggcatgagacgacaaaacccaagtatttaccccagacagacgacactgcttcattataagtgataaatttattagttaaaattgctatattaagaaatatagcacattttaaggctgctgatgcacagtgcaataactgccatatacaaataggacaccaattatacttagagcccaggcacagagactcacacctgtaatcccagcactttaggctcccagggcaggtggatcacttgaagtcagaggtttaagatcagcctgaccaaaatggtgaaaccccatctccactaaaaatatgaacttttttttttagtagaaaaaaacttttttctattagtaggcatggtggtgcactcctgtaaccctacaagggtgagttaagagaattgcttgaacccaggaggcagaggatgcagtgagttgagatcacatcactccagcctgggtgacagagtgagaccccgtctcaaaaaaaaaaaaaaaaagtattacaaagctcttgtttccctgcacttaccatttatgaatagttcaatgaaatatgttatttttaaaaacattttccattttggtatgtaaaaaactggcatctcattattttaatatgcattttagtaactaggtaacttggttttatatatgtttagtgtattactttttgaattgcctagtcatgtcttctgcttattttgctattcaattatttaatattttagtgattcatatgagctccccattatagtaaccatttgtccaaaattattatatatatatatctccattcagattccagtgttcattctcaatgtttttgagagaaaaggacttcctcccctctaaagatttccactctctaaagagcttaaacaagtaccaattactcaaacacaattagggaagtttaaacattatctaattgaactttatttgtggaaaataaatgttcttacctttccattattatttaaccatgtatagaaaggagcccatacattctaggctgataaatctctttttaaaaagggaaaatgtattctgtcaaagaggggaccaaattccaagttcacactgcactttgctaaacacattgcctttgtgttggctgtgttctctctgaaacacagagctgctcacatgacagccctgttccaaaacatttgatggctcatagcagccagcacaaccgaccccccattcatttttccaaggtcaacacctcttattatcacaactctatgcaacacttccaaactctattctctactcacactccacttcttgtcctactcggtcctcaagtaagcctcatatttttrtactccaaggcctatacttaaactgtttttttcctaaatgtacattttcccattcccacatctttcttttccacatggcaaaccctgcacatttgagagcattactttctctttccacttgaatgttctccacttgttcttgctgattgtgaggcactggtgagttttagaactggaatcatattttatccatctttgcagttctagagccttgcgctggggtaattgtcaaaaaatggttcccaatgcaaacttgctgatggtgatattcaacagatgagaaaatgagccagaatgcctgtctactaatccagatggtttttcactattattttgctaaaactcccccattgtcattagcaaaataacaatgataataatgatactagtactaaatacacaaaataagtcagttataattgagctggtagcatgca

SEQ ID NO: 60278 - DNA, 1426 bp, Homo sapiens
catcacccaagtgatatgactttcttgccttcttttcacacacaggtagaattgtgacttctacctaggcccagcacacagaaattataatgtctctcagatgtagaaccagccaaatggtgagattttgactctcatagataggtttagggcaaatgataaggtcctgaatcgcctacttgtagaaaggttacagaaggttcctacacacacacatatattatgaagtccttggctggtacagacagcgtcataatacaaactagaacacaggtgaaattgtgactttcataggcacacccagcagaagattaggattgtcactctcatatgtggacagagcctactagtaasctcctgaatctcacatgttgattaagtccacagttggaattgtgactgttacatgtaaatctggccacaggtgggatggtgactcatttctggtcccagctcataggcatggtaaggactctaataccaagacccagtcaatagaagagatgtttacttcagtaactaggcttagggcagcaggtaatgtcctggatttcttacttgtacaaaagtcaaagagccttacaacacgcaaacatattatacaatgctctcaggaggtatagagaatttcataacagggcccagcacacagatgaaattgtgactcttgttttcacactcagctgatggtaaggattattacccttccatatggacacagcccattgttgaggttctgaatctcacagctggaggcaattgaaagttggatgtgtgattcttatacatggatccagatcacaggtaagatgatgacttctgaatcaagatcaaacacccttgtgaggctgtgtctcccctatcaggatactatttgcagatgaggttgggggtctcatacacagatctagtccacggttgaggttgtgactcaggtacttggacagaattcacaagagctgctaattcttatatttggagccaggccatatgcaatattgttaatctcatccctggacctttctgcaggtgtgattttgattcatacctttgcccagcacctaactgattttacatttctgcatgggttcagactaaatgtgggattgtgacatatacctaggccaagcacataggtgatgggactctcctgcctgggccaatctctcagaggtgacttagaaatatcttatgcagccatcacctagctaatgtgactctcctctcctgcctgggctcagcccacaggggcattaggacgtattactgggttcatcacctaggtgacatgactctcctcttctgcctgggccccacccccatttggaatttggacatatccgtgggcctatcacctaggtgatatgaatctcctcttttgccttggaccttcttacatggggaattgagacaaattactgggccc

SEQ ID NO: 60279 - DNA, 1426 bp, Homo sapiens
catcacccaagtgatatgactttcttgccttcttttcacacacaggtagaattgtgacttctacctaggcccagcacacagaaattataatgtctctcagatgtagaaccagccaaatggtgagattttgactctcatagataggtttagggcaaatgataaggtcctgaatcgcctacttgtagaaaggttacagaaggttcctacacacacacatatattatgaagtccttggctggtacagacagcgtcataatacaaactagaacacaggtgaaattgtgactttcataggcacacccagcagaagattaggattgtcactctcatatgtggacagagcctactagtaagctcctgaatctcacatgttgattaagtccacagttggaattgtgactgttacatgtaaatctggccacaggtgggatggtgactcatttctggtcccagctcataggcatggtaaggactctaataccaagacccagtcaatagaagagatgtttacttcagtaactaggcttagggcagcaggtaatgtcctggrtttcttacttgtacaaaagtcaaagagccttacaacacgcaaacatattatacaatgctctcaggaggtatagagaatttcataacagggcccagcacacagatgaaattgtgactcttgttttcacactcagctgatggtaaggattattacccttccatatggacacagcccattgttgaggttctgaatctcacagctggaggcaattgaaagttggatgtgtgattcttatacatggatccagatcacaggtaagatgatgacttctgaatcaagatcaaacacccttgtgaggctgtgtctcccctatcaggatactatttgcagatgaggttgggggtctcatacacagatctagtccacggttgaggttgtgactcaggtacttggacagaattcacaagagctgctaattcttatatttggagccaggccatatgcaatattgttaatctcatccctggacctttctgcaggtgtgattttgattcatacctttgcccagcacctaactgattttacatttctgcatgggttcagactaaatgtgggattgtgacatatacctaggccaagcacataggtgatgggactctcctgcctgggccaatctctcagaggtgacttagaaatatcttatgcagccatcacctagctaatgtgactctcctctcctgcctgggctcagcccacaggggcattaggacgtattactgggttcatcacctaggtgacatgactctcctcttctgcctgggccccacccccatttggaatttggacatatccgtgggcctatcacctaggtgatatgaatctcctcttttgccttggaccttcttacatggggaattgagacaaattactgggccc

SEQ ID NO: 60280 - DNA, 894 bp, Homo sapiens
aatcagagggaaagatctgaataactcaaatttaatttaatcagggaaatttgttgaagttttttccaaatgcactctaaaaaaggtttttccaaagctttcttatccaaaaagagttattaattttggaataaatatggatgatttcaccactaaatatattttaaggatttaccacaggtcaatttagacaattataccctacaggactctatggtgaataatgaacacatactgcatgctttctctctaggctgctcacaatgattgtgtccagaatttattccttctggtgggttcttggtctcactgacttcaaaaatgaagccatggaccttcatggtgggtgttatagctcttaaagatggtgtgtccggtgcttgtcccttcacatgtgtccagagtttcttccttctggtgagttcgtggtctcactgacttcaagaatgaagctgctgacctttgcagcgagtgttacagctcttaaaggtggtgcggacccaaagagtgagcagcagcaagatttattgtgaagagcaaaagaacaaaccttccacagcgtggaaggggacccaaccaagttgccgctgctggcrcagtggccagcttttattcccttatttggccccgcccacatcctgttgattggtccattttacagagtgctgattggtccattttacagagtgctgatttgcacgtttacaatcctttagctagacacagagggatgcttggtacatttacaatcctttagctagacacagaagttctccaagtctccaccagacctagaagcccagctggcttcacctctcatgatgacctattaagatgagaattacaaatatggcaatatcccctacagagtaaatatccagaaaatcaccatgc

SEQ ID NO: 60281 - DNA, 1285 bp, Homo sapiens
taaatttgagaaatgtcaggaaataaaatatttcaccttagcatattgacaggttagaagatatggaaatcttttactaaataatattatttgttttcatgtggattttataaaatgcaactaaatatatagtatgtttataattgttttatctcaaaaagatgcagaaattttaggtgatttatataaataagcaatcataagcgttcgttttgtaagaatacattttatatcttaaatagtagtagctagatagcaagaatagtgatagtacaaaaaaaatgtaaccctgaatgtattgacagtattaaattttaactaaaccctgtgctcctggaaaacactgattattaggaaatgtctccaccctcttgtgttctgcaaaacatctcactgaaaagaatcactcttgccacatgacttatataagactgaaggatgcccttcttgtgtatccatgaccaagacagaggtcttctacatttccattcttttttctcattaatgattagctgaactgcttgatcccagtgatcaattggaacaaatgcttgttaaccaaactttggttaaaattatcttctttttccatgtccctgaactttcacccactcacagaatgaagagcatacaatctctgcttaaacagtctatccccaaccacctccctttagcaataggctggcctcaaggtcagtagtctctgatctactatctgatcaagacttcagatgatctcacttgcccacaaccctttccttctagcctggtttaccgctccttatgaaagaaacacttttttttttggcataacccttgagatgcttgcagagcttatggtcaaagcatgttctccttatggcaataattcctcttccccaaccattgcaacagttcctttgcccccttttgtgtaataatccagtactttttactaaattctctttttactaagtctgaatttgatttttatttgtcaataaaacgcaaggaatataaaccccttgcagagggctttggtcagtgacacattgacaatgttcttgactatttattatcactaaattttgcccccaaagactgaaacaaatgctaaycaaaatcatctccaaaatttgactaaccattttcacgttttcattactacaatgccagtgccttttctgtgactattttatctttcttaatgaaggacttatcaatgtttcacctatgatctagtaagtgtttaacttttaacaaacactcatagagaatagagcaaaagttatatttataattttta

SEQ ID NO: 60282 - DNA, 711 bp, Homo sapiens
tataaattcttctctttttttcacatagatacagagaaaaaggcttcccaaaagttaaattttatattacaggatttttataaaaaataaarttaaggagcaaaatgatagatttcctgaccatgaagagtctccaaccatgagttccttccaatgtccatgtgtagaagagttaacacaaataaaactatttttgttatctgttataatgtatgcatgcttccaagttgtgtttgttaaccttggaactacacaaaattgtaccaccggtgaaactagtgtgcacctttctcattttccttctccagtaacttaacgagaattggtgatttgttagtagcaccgtttgtccattgtaactttgagaagactgcacttcaatttatttccactgtattgaagtggaaatggcaggtaccttatcatgaaatatgttcgtcatgacttctccagctccattttgttttcaggttaagtgcttctttcagtctaaagagtgggttaagtttttaaaaaatgtttatttgtttccttctaataagttacttttatatcttcagaattcattttctgtgcagtttttgagcctcaatggcttcttgagtgttttgcagtaaacaggagatcaaaagaccttatctaattagctttcaaaatgttggttgccaaaaatttcaaattatccacagtatctaccaaatataacattct

SEQ ID NO: 60283 - DNA, 711 bp, Homo sapiens
tataaattcttctctttttttcacatagatacagagaaaaaggcttcccaaaagttaaattttatattacaggatttttataaaaaataaagttaaggagcaaaatgatagatttcctgaccatgaagagtctccaaccatgagttccttccaatgtccatgtgtagaagagttaacacaaataaaactatttttgttatctgttataatgtatgcatgcttccaagttgtgtttgttaaccttggaactacacaaaattgtaccaccggtgaaactagtgtgcacctttctcattttccttctccagtaacttaacgagaattggtgatttgttagtagcaccgtttgtccattgtaactttgagaagactgcacttcaatttatttccactgtattgaagtggaaatggcaggtaccttatcatgaaatatgttcrtcatgacttctccagctccattttgttttcaggttaagtgcttctttcagtctaaagagtgggttaagtttttaaaaaatgtttatttgtttccttctaataagttacttttatatcttcagaattcattttctgtgcagtttttgagcctcaatggcttcttgagtgttttgcagtaaacaggagatcaaaagaccttatctaattagctttcaaaatgttggttgccaaaaatttcaaattatccacagtatctaccaaatataacattct

SEQ ID NO: 60284 - DNA, 757 bp, Homo sapiens
atatagacacatgcagagagaagagtatatttagtgtgcattggaaggagtataaagtcctcatcaattcatgaaactataagcaattttcttcctcagttgctgtctccttgcttttgactgttggttcttagtgatgaccattgaagataatatatrtgaaagttcttcataaattataacataaaatattagattcatcactcttgaatcatttcctaaatatttgttgaaaaaataaatcattacagtgataagattgaattaatgtgttttgtactcattctctaatagttgagaatctaatatccatattattctagaatcagtgtattattcagattaatgatgaggaattcagagccaaatcttctctcctagctttgaccttggttaagttatttaggctttctttgctcatttccccatctataaagtgaagataatagtaatgaatatctgatacagtggttgataagattaaataaattaatatatgtggtatcagagagaactcccatagccactgcacaggcatcaggctaaattgtgtctgaatcgtagccacttccccataattatttagggcacatacatctgtctattccttcttcttgtcctgtgcccactctcctgtcaactcctaagcaacagaggggaaatgcatcagcacactttattgatttggtgtaagaaacatttacctatttaataattataatttatacaattatgtattgtctgtggatcaggatcc

SEQ ID NO: 60285 - DNA, 563 bp, Homo sapiens
agtgttctttttaaagatgatagcttaaagaatacaaatgtaaaggtaaagcagtatgataataatattctcctcaactatacatagagtgattacatccatccctgttcctgtccccatgctttatacattttctgtatcagatccttttttaaaaaaaaaaaattttagtctaattcctttaggagattgccctacatcacactctaacagctctttttaaaagccaactctggtaaggataagtaagccaatggctccagaacaattatagtcataaaaacacataagaattctttaacaaatgttgctgaaacaattgaacatccatattaaaaataaatttagacatagamcttacatatttcatagaaattaactcaaaaaagatcatagaactaaatgtgaaacacaaatctgtaagacttctagaacacataggagaaaatctgtgtaacttcaggtttgataataacttttagatacaatccccaaagaaaaatccatgaaattcaataattgataagttagacattattaaaattaaaaacattctgatctat

SEQ ID NO: 60286 - DNA, 1026 bp, Homo sapiens
ataccaggaactagcaaggatttttataagcagaaacaactgataatcaaagaattggttaaataagttctggaatcgccattcgctggaacactgtctatacagtattaaagaggctgttgtggaaaaatattgaatggyacaaaatgttaagtgataaaagcaggttacaaaacagtaagttctaaagcagtgtgatctcattttttgaaacagagtatttcctctcagaggctttgtttttccttcttcacattttaatgtatctgaaatggagatgtgttttacaattgatacaggcttttaatgcgatagcatttctggctctccacaaacacacactaaagcagaaacaaacaagagaaacaaacaacaacaaaccctactaataaaacagtggtataccttgtaactttgtaatcaatgctatattcaaattgagaaaagaagggtgtgtgtgcatgttataaaaacatctttaagatgtctttaaatatctttaagagtttaaccagtgttccagcatatatcttaggtgctagaagaggtggtgctatttattttttttctcattgactaattttactacaaagggcacgtgtattgtttgaaataaaggggaaaagagaatgtcaaacaaaatgggcagatgttgtttctgtcctgaaagaccttaaattaaactggcatgatgatccaagacaataaagcaactctatatctgcaacttctgcataatctctgatccacatagaatctacaaatcaggccatctctatactcagttaataacgaagctctagaatgtagagtacagatcagaaaaagctttagcattcaggaaagaaaatgcagaattcagaggaggctcccccagtactgaggatggggtgaaagagcagagataagccacaggcagctacttcacaagtttgcttacagcaggctgagaactggagctgtctgggtggtggagtttctgccaagtgtaacacactctgggaggtagaggactctcaggatcct

SEQ ID NO: 60287 - DNA, 1026 bp, Homo sapiens
ataccaggaactagcaaggatttttataagcagaaacaactgataatcaaagaattggttaaataagttctggaatcgccattcgctggaacactgtctatacagtattaaagaggctgttgtggaaaaatattgaatggtacaaaatgttaagtgataaaagcaggttacaaaacagtaagttctaaagcagtgtgatctcattttttgaaacagagtatttcctctcagaggctttgtttttccttcttcacattttaatgtatctgaaatggagatgtgttttacaattgatacaggcttttaatgcgatagcatttctggctctccacaaacacacactaaagcagaaacaaacaagagaaacaaacaacaacaaaccctactaataaaacagtgstataccttgtaactttgtaatcaatgctatattcaaattgagaaaagaagggtgtgtgtgcatgttataaaaacatctttaagatgtctttaaatatctttaagagtttaaccagtgttccagcatatatcttaggtgctagaagaggtggtgctatttattttttttctcattgactaattttactacaaagggcacgtgtattgtttgaaataaaggggaaaagagaatgtcaaacaaaatgggcagatgttgtttctgtcctgaaagaccttaaattaaactggcatgatgatccaagacaataaagcaactctatatctgcaacttctgcataatctctgatccacatagaatctacaaatcaggccatctctatactcagttaataacgaagctctagaatgtagagtacagatcagaaaaagctttagcattcaggaaagaaaatgcagaattcagaggaggctcccccagtactgaggatggggtgaaagagcagagataagccacaggcagctacttcacaagtttgcttacagcaggctgagaactggagctgtctgggtggtggagtttctgccaagtgtaacacactctgggaggtagaggactctcaggatcct

SEQ ID NO: 60288 - DNA, 1088 bp, Homo sapiens
tcaccaccaagccatgccataaaacaagcagtgatggagacagcctcagagctggctatctcagagaggtaagaaaataacaacacagccctcaactgrcaagttctcaatcaggcacatacactgaccaatctgcttagtacattttagagcccatgaatcacagcacagagcatcaagaaccgaatcaccaaccatcctggtttgatggggcagaacggtttcctgggatgcaggattttcagtgctaaaaccaggaccatctgaacaaaccaggattgattgctttctcctacttgggagaagttctgaacacactctgtcattacagtgaagaaaaaaccgaaaattcatctttcttatggtttccggtgacagagatcacctccggacatgatccccacaaattctcaatttgcacagggacaaaatgtgccctttctgataggaaaacttagggaaaaataactaagcaccctactctttaaaattttgcaggcatatgttcattcattgattccacaaatattctactgaacacgtgctctgtatctatctctgtggaggcacccgggatgcagtggtggtgaatcggtcaaatccatgccagcaaataccctgacggtgcagttcatttggccaatatatcgatacttttttgaaacataacttatttgccaatatttaaaaaccaagagatttcaaataacttgcacatatatatttttttttgaagtactggctgatccagcaaggtaaggtctacattttcaaagtgataaccatgagccggtgctgagtggcagctgttctctttaggtgacaaacatgttccagttctctagtttgcatcaatccatggaatcagatgttatttggcaagtagaataaccaattttcctttataggcctggcccttggaggcatttatgtttgtagcctctttatttgatctgagatgtaagtacacacacaaacacacacacacacacaactttagatacggcgttcatatagaacttttacaatataatacctactttatcttcagtatttccattctgagtaagacactgacatattagtgg

SEQ ID NO: 60289 - DNA, 1088 bp, Homo sapiens
tcaccaccaagccatgccataaaacaagcagtgatggagacagcctcagagctggctatctcagagaggtaagaaaataacaacacagccctcaactgacaagttctcaatcaggcacatacactgaccaatctgcttagtacattttagagcccatgaatcacagcacagagcatcaagaaccgaatcaccaaccatcctggtttgatggggcagaacggtttcctgggatgcaggattttcagtgctaaaaccaggaccatctgaacaaaccaggattgattgctttctyctacttgggagaagttctgaacacactctgtcattacagtgaagaaaaaaccgaaaattcatctttcttatggtttccggtgacagagatcacctccggacatgatccccacaaattctcaatttgcacagggacaaaatgtgccctttctgataggaaaacttagggaaaaataactaagcaccctactctttaaaattttgcaggcatatgttcattcattgattccacaaatattctactgaacacgtgctctgtatctatctctgtggaggcacccgggatgcagtggtggtgaatcggtcaaatccatgccagcaaataccctgacggtgcagttcatttggccaatatatcgatacttttttgaaacataacttatttgccaatatttaaaaaccaagagatttcaaataacttgcacatatatatttttttttgaagtactggctgatccagcaaggtaaggtctacattttcaaagtgataaccatgagccggtgctgagtggcagctgttctctttaggtgacaaacatgttccagttctctagtttgcatcaatccatggaatcagatgttatttggcaagtagaataaccaattttcctttataggcctggcccttggaggcatttatgtttgtagcctctttatttgatctgagatgtaagtacacacacaaacacacacacacacacaactttagatacggcgttcatatagaacttttacaatataatacctactttatcttcagtatttccattctgagtaagacactgacatattagtgg

SEQ ID NO: 60290 - DNA, 1088 bp, Homo sapiens
tcaccaccaagccatgccataaaacaagcagtgatggagacagcctcagagctggctatctcagagaggtaagaaaataacaacacagccctcaactgacaagttctcaatcaggcacatacactgaccaatctgcttagtacattttagagcccatgaatcacagcacagagcatcaagaaccgaatcaccaaccatcctggtttgatggggcagaacggtttcctgggatgcaggattttcagtgctaaaaccaggaccatctgaacaaaccaggattgattgctttctcctacttgggagaagttctgaacacactctgtcattacagtgaagaaaaaaccgaaaattcatctttcttatggtttccggtgacagagatcacctccggacatgatccccacaaattctcaatttgcacagggacaaaatgtgccctttctgataggaaaacttagggaaaaataactaagcaccctactctttaaaattttgcaggcatatgttcattcattgattccacaaatattctactgaacacgtgctctgtatctatctctgtggaggcacccgggatgcagtggtggtgaatckgtcaaatccatgccagcaaataccctgacggtgcagttcatttggccaatatatcgatacttttttgaaacataacttatttgccaatatttaaaaaccaagagatttcaaataacttgcacatatatatttttttttgaagtactggctgatccagcaaggtaaggtctacattttcaaagtgataaccatgagccggtgctgagtggcagctgttctctttaggtgacaaacatgttccagttctctagtttgcatcaatccatggaatcagatgttatttggcaagtagaataaccaattttcctttataggcctggcccttggaggcatttatgtttgtagcctctttatttgatctgagatgtaagtacacacacaaacacacacacacacacaactttagatacggcgttcatatagaacttttacaatataatacctactttatcttcagtatttccattctgagtaagacactgacatattagtgg

SEQ ID NO: 60291 - DNA, 1146 bp, Homo sapiens
cattcttaccttgagctaaggcaatctcaatagacatcaaggtaacgtaccatgtttgtcaaaacaagtgaatatagacctgggttcaattcccagctccacaattagctatggttctaactcttaacctccctttttctctaagtgtgaattaaagagaatctctggactaatatgtgcattgcttagcatttgtttgtgcctaatgactataggctttaagattctcatgcaaatactatcaaaacactctgaagtgacttagatgtttgcaaaacttttttcccccttggagtgaattaaaccatttcarttggtaatagtttttttttgttgttatttatttgttattctctgggtatagggttttacacaagttactgtgggggaaaaacacataaggatcagggccttacacagaaagacatgtaccccatgaactcacttccatgtagcgtctaaaaaaattaaactcataaaagcaagagtagaatggtgattaccagaggcttggaggctggaggatttaggagatattggtcaaataatacaaactttcacttagacaggaggaatgagttcatcagatctactgtgcaacatggcggctacaggtaatcacagcgtattatattccccaaaactgctgagagcgtaaattttaagtattcttaccctaaaaaataaggtaagtatgtgaggtcatgcaatgctaattagttcaatttagccatttcacaatgtacacatactaaaacaccatgctgtatacaataaggatataccattttaatttgtcaattttagaaaaatggtattaaaaagggtcagcgtcttagatagatggcagctttgctgcagaagcaggttcagaaaaacccatgcaaaaccatggagcatgtggacagaggaacgaggcagggtgcttggagatgatgctgaacacgagtgggcaggtggagtgtatcaggggaaaggtggcattcaagatgagacgtgcacctgaagaaagcagattacacggctccatcagatcatccctaaaaggaccacacgggcaccttctaccttcgctacaagaaagctagatagaagcaaaatttctaagtaagctaggggcactaaaccatgaaatattagaatgca

SEQ ID NO: 60292 - DNA, 592 bp, Homo sapiens
tttgaaggtgccagagcaatgtgagttgttcttggttactgagaacaatcaggaaggtcaggagagttctaccttcacattactttagtggaaaacatcccaacatagtggaaagaacaggacatacctgatccaaagatgtgaattccaagccaaactcagccacttaccacttatattcctagttttctcagctgaaaatggaaatactagtaaccatcttacttgtctcactctaagragatatgattcatgtgttagatcttagataactataacctgcttgtgggaaagatcactgacagtcttcaatatctatttttttgtttcttatgtagaatataaggtgaagctagacgtagggccactcagccccctcgcagctatgtatgcctaagttcaggccactggtatacagtaaattacagcttatgctcttatacagcaagcttgtgcctctcctctctccacccctactcccagtctctatcctgcataccacctggaatgtgactatgagagaagcatctaggaaagccatctgaaagataaataaaaacctcatgttaagatggcaaaaaaatagacagaa

SEQ ID NO: 60293 - DNA, 643 bp, Homo sapiens
cacggtacccctccctttggttcctgctcagtggaggaagccacctctcagctcatttgcaaaacatgcccagtgtcctgagtgaccaatcagtgaaggccacagctctrcccacttcccctgtttttctggaaactaacaaagagaagacttacctgaacctgaaacccaactaagacatcttccccagccagagggacaggtgcccatggtgcccccgccaaggaccctcctccactgactggggcaggagtctgccaaggtttcactctgctgcctgctcccaagcagcacctgggtcaggctggtcctgctttgagggaaccttttttatttttgagatggagtttcactctttcacccaggctggagtgaagtggcgcgatctcggctcactgcaacctccgccccaccaggttcaagtgattctcttgcctcagcctcccaagtagctgggattacaggtacatgccaccacacctggctaattttttttttgtatttttagtagagacagggtttcgccatgttagccaggctggtcttaaactcttgacctcaggtgatccacccatcttggcctcccaaagtgctaggattacgggtgtgagccaccgtgcccagctgggggaacattattaaa

SEQ ID NO: 60294 - DNA, 1759 bp, Homo sapiens
gggctcaagcaatcctcttgcttcagcctcccagaatgctgggattacaggtatgaaccaccctgctcaaccaagcagacaatggttttggttcctttttttttttatggagacagagtcttgctctgtcacccaggctggagtgcagtggcgtgatcttggctcactgcaacctctgtctcctggttcaagcaactcttctgcctcagcctccgagtagctgggactacaggtgtgcgccaccacacccaactaatttttgtatttttagtagagacggggttttgccatgttggccaggctggtctcgaactcctgacctcaagtgatccwcccccctcggcctcccaaatgggattacaggtgtgagccaccatacccagcttggttttggttctgcgagccacagccatgggcaatctgactcagctctccactgtgccagtccttccagaaccaaccctgctcaggggtgttgcaccaagtcatggccaggactccacacctattaagtgaagatctcctgccttttcttccccttctttcctcctccctaggccaaaaggcctaagcactcaaaccatgcagacagaagtaaggctggctctggctcagggagatcacaatctcagggctgccacatcggataaaagactcaaagctccaaagcgcagcacagagccttctccagaaacagcagaataagtgcctgtcggggatccccaagcagagacactaagagaaagggaaacgacggcagtaagaaaatacgcgggggctctccttctcagtcatgcataataaacacaagagaaatttcgagaaatttcatttgcatgttgaaatttcattgcaacatggtcccacggagggattcgacgctgagaaagctactgtgcttggggcgggggggtcttgctgtggcagaagaaggaagagaaaaaaaggaggaaaaaaatggttgggaaaagtaaagctggtgataatgatcctaacaattctaaaatacctgcacagagacacagatgcacagacacacttctgctcccacaactgcttgcgacgcaggcaaggcgggagaggaaaccacgctcggagaagggacgggactcagcttctaggaatcagctgagaagtggagacgctgggaccgcggactccaggacccgggctcagtcacccacgccgggaagctgcccaggatggcaagaacccagcccaggcccacgccgcccccatagctcagtggacccggacctcagggtgcccctgtcctgggaaagttgcttcctgaccctgaggaaacgccagcaggaaagactccacttggtaaacacttttggtggggactgctctgtgacttccgccaatttttctccaggggcagcagcttgatttggaggagctctatcgccccctggtggagatttagccacatgcttctgcaggggccaccgtcaccgttcagactgcagcagctgtgggggcagaggcacgaaaagggacgggacggaggacgttttagagaccaactttttagaatatttgtttggcataataatcttctagaggagctggcatcactcggggacctgggcaactggggctcctgccctggcttggctttagcaggccccactctggtcctctgtggggcagtaagtccagggagctcacccaaagcccacagccgtccttcccctgcacctggagctccaggccctaaacctgctcccacggctgcatgggcctctctctt

SEQ ID NO: 60295 - DNA, 729 bp, Homo sapiens
gggatcccttcaaaccatagcatctgctcccctgcttgacttgccacaggtagataatggcttttctctgggtgagcttagggacttcctggaggcttgagggctaccatatacataactgtttccatttcagggatgttyatttaaaataacatcgcgggaaactactttgacatttaaaatctagaaaaagccagcaagcctgtttcttggcacctaatggacaccttatgggatggcgtgttccaagagtctcactccagtgacgtgagctaccgaaccactgggcttcaggctgggtattattcagaatttccagccctctatccaaaagagggtgttctatgattgcactgaatctttagcaaggcaggaaagggagtgccaaacataatcaatcaaaggtaaacctttccagaactctccatatatggtaagtcagaaagaaggtccccttccttgttgtgcaccctggatggtgggcattgcactgaagacgtgctgggaagggaggaagtgggtaatggcagaagatggccttgatcaggtgtcagattcactgacctcaactggctgtttgtagatctgggcatgggaagagtttccttcgccctacctgcttttcttgttttggccaaaagaatgccagggcttcaagaaaatgatactagatttggggaatgaaaaacaagttttttgtgtgtttgtttctgggtttttttttttttt

SEQ ID NO: 60296 - DNA, 2331 bp, Homo sapiens
gggcttcctaatttataagccctgtatctggatttttaggaataaaacagatttgagcagaagaagtctgttggatgcagggagtataaaaggggaaagcatcctgctgtttccagtggcagaagagaaagagaagtaccatgaagaggggtgaacaacatcactctcgtgccggacacagacaaggaatgattaggcttgcagtcccccagtctcagcctctctccactctcacaagcaggaagggatctgagctctgttagtgggaaatcttggagtttgcatttctctgatcacgaggctacctcctatcctgttttgaaagaggaacagaaaagcagagcttgtcccaggaattgtgaaatgggctgcaatgtcttcagaggcagtagcagttttaggaagtgtgccctcctggctctggggaaaggttgaattggggtcttgtgggcacttgttttctcatgggatgtatcagtcagacccatgcacagttctgggcggcagggaagtgtgtctctttctggacttgagccagtgagctgttggcatgcctttttaaaggcattagaaaaaaggtttctttcttttttttcctttcctgttcacaccaccttcatatgaacatggagaagggaggtttctaagtgggcccctgatttactcctatgtcaataatcgtgccagaccctaaggggcagaaaaggcagccaggggatcctgactcagaggctgtagttcgtcagccctgctaaagggccaggggtttgtctctcagtgcctgggtgggcatgcttgactgctaaccccttagctgaaaggagatggcaggagtcctccacagggtcccttcttccctcctggcttacagcttcctctgaagacgggccagttccttgctgtctggcaagaggaaacagctggggtgcacttcactgggagttgggcaagatgtcggcagtttcctggtgcccttcaagtcctccaaaagtatcgagctaaaaggtgacaagtcttccttcaataaccaagaagagttccagcttaatgtctgctgaatctagaatcttctgacttgtattttggcccagcccacaatcttggatgcagggtgcagcagtgtttacaaacctcacaccccatttccagaatagcaggtagaggcactggagctttgattactccagagcccccaacaagcaagatggggcctgggtaaggagttgacagtgaccttagtacaggacaaacagctcatttggggctacagttgcttagaggggtcaccttcaccgtagctggtcttcccaactccgcagcgttctctcgttttcagcagagggctactttggagctgataattaggcctttcttgccttgaatgttaaggatgcccacctgctctgtgtctcggctgctcactcagaatccttcagagtgagagagagacagagtgagagtgggagtgtgtgcgtgtgtgatctaagacctaactgtgtggttcaggcctgctgggccctgtagagagaccgtggtggctttgtgcagcactatgtctggtctccgtcacttgagttgtgttgttagttctctgctctcagtgcttgctgccttccagccttggaggctgctggatcctttgggaagacaccgggcactgtctcagcccttccttccagttgttggtggctttcgtgcaggctaaggctttggctcccttagcctgggtcccctatagccttttcactggcttctccaatggtttcgacataaccatcagctagaaatctgggtagcaacagctgttttgggaagctgaggtgtcctttcccctggcccagcccactccctcccatttttttccccagctttattgaggtgtgattaacaaagtagtatgtatttaaggtgtacaaaattttttttttttttttggagacagagtcttgccctgtcactcaggctggagtgcagtggcrcgatctcagctcactgcagcctctgcctcctgggctcaagcgatcttctgcctcagccttccgagtagctgggaccacaggcacacgccaccacgcccagctaacttttgtatttttggtggagatggggttttgccattttggccaggctggtcttgaactcctgagctcaagtgatccacccgcctcggcctttcagtgttgggattacaggaatgagccactgcacccggccaaggtgtacaacatgttttttgtttttttttttttttgagatggagtctcactttgtcgcccaggccggagtacaatggcgcgatctcgtctcactgcaagccccgcctcctaggtt

SEQ ID NO: 60297 - DNA, 2331 bp, Homo sapiens
gggcttcctaatttataagccctgtatctggatttttaggaataaaacagatttgagcagaagaagtctgttggatgcagggagtataaaaggggaaagcatcctgctgtttccagtggcagaagagaaagagaagtaccatgaagaggggtgaacaacatcactctcgtgccggacacagacaaggaatgattaggcttgcagtcccccagtctcagcctctctccactctcacaagcaggaagggatctgagctctgttagtgggaaatcttggagtttgcatttctctgatcacgaggctacctcctatcctgttttgaaagaggaacagaaaagcagagcttgtcccaggaattgtgaaatgggctgcaatgtcttcagaggcagtagcagttttaggaagtgtgccctcctggctctggggaaaggttgaattggggtcttgtgggcacttgttttctcatgggatgtatcagtcagacccatgcacagttctgggcggcagggaagtgtgtctctttctggacttgagccagtgagctgttggcatgcctttttaaaggcattagaaaaaaggtttctttcttttttttcctttcctgttcacaccaccttcatatgaacatggagaagggaggtttctaagtgggcccctgatttactcctatgtcaataatcgtgccagaccctaaggggcagaaaaggcagccaggggatcctgactcagaggctgtagttcgtcagccctgctaaagggccaggggtttgtctctcagtgcctgggtgggcatgcttgactgctaaccccttagctgaaaggagatggcaggagtcctccacagggtcccttcttccctcctggcttacagcttcctctgaagacgggccagttccttgctgtctggcaagaggaaacagctggggtgcacttcactgggagttgggcaagatgtcggcagtttcctggtgcccttcaagtcctccaaaagtatcgagctaaaaggtgacaagtcttccttcaataaccaagaagagttccagcttaatgtctgctgaatctagaatcttctgacttgtattttggcccagcccacaatcttggatgcagggtgcagcagtgtttacaaacctcacaccccatttccagaatagcaggtagaggcactggagctttgattactccagagcccccaacaagcaagatggggcctgggtaaggagttgacagtgaccttagtacaggacaaacagctcatttggggctacagttgcttagaggggtcaccttcaccgtagctggtcttcccaactccgcagcgttctctcgttttcagcagagggctactttggagctgataattaggcctttcttgccttgaatgttaaggatgcccacctgctctgtgtctcggctgctcactcagaatccttcagagtgagagagagacagagtgagagtgggagtgtgtgcgtgtgtgatctaagacctaactgtgtggttcaggcctgctgggccctgtagagagaccgtggtggctttgtgcagcactatgtctggtctccgtcacttgagttgtgttgttagttctctgctctcagtgcttgctgccttccagccttggaggctgctggatcctttgggaagacaccgggcactgtctcagcccttccttccagttgttggtggctttcgtgcaggctaaggctttggctcccttagcctgggtcccctatagccttttcactggcttctccaatggtttcgacataaccatcagctagaaatctgggtagcaacagctgttttgggaagctgaggtgtcctttcccctggcccagcccactccctcccatttttttccccagctttattgaggtgtgattaacaaagtagtatgtatttaaggtgtacaaaattttttttttttttttggagacagagtcttgccctgtcactcaggctggagtgcagtggcacgatctcagctcactgcarcctctgcctcctgggctcaagcgatcttctgcctcagccttccgagtagctgggaccacaggcacacgccaccacgcccagctaacttttgtatttttggtggagatggggttttgccattttggccaggctggtcttgaactcctgagctcaagtgatccacccgcctcggcctttcagtgttgggattacaggaatgagccactgcacccggccaaggtgtacaacatgttttttgtttttttttttttttgagatggagtctcactttgtcgcccaggccggagtacaatggcgcgatctcgtctcactgcaagccccgcctcctaggtt

SEQ ID NO: 60298 - DNA, 767 bp, Homo sapiens
ttcttgctcacccccactcttgtgggacgcggcctgtgccctgattttccttcttgccttggtgtctgaatctgcagcatcgccctgagcaactggtggtttgtggcccacctgacagacctgctggaccactgcaagctcctccagtcacacaacctctagtaagtggccgggaggcaccgatcctcctcttcttaccaccaggcccccgagggtggtgtgaactgaatgcctgaaagggaggttgggctaagggggccctgaacagggcaggccaggagtcttggtcttttgttatgttttattccagtttcggttccaacatgagagagttcctcctgctggagtacgcctcgggactgtttgctcatcccaggtaggaaggaccccatgggtgtgggctatgcgggtgctcttcagcatgcgggtgccattggagcttggactgttctctcccagttggctccttgaaggcttcggaagggtcagtgaaagggagctgtaggtgccagtcctcggagccatgaggcagcacctcatgtctgtcctcctcgaacctttgcagcctgtggcagctgggggtcgattactttgattactgccccgagctgggccgagtctccctggagctgcacattgagcggatacctctgaacaccgagcagaaagccctgaaggtgctgcggatctgtgagcagcggcagatgactgaacaaggtgagctggccctgctcccagcctacygtctgtgggacgcaggagtcagg

SEQ ID NO: 60299 - DNA, 1345 bp, Homo sapiens
aagctggccccagcacaaggcatccaaagcccattccgctcctgccttctcaagtttccagaaaggcctgcctgcctgctccagcctgccacagcccacccttccagaagtgggcacaaatccctttccctctcagttcagcaagttcaatggctgatacgctttttttttcccctttcttaaatgtaaaaacctaaaacaaggccggcccrggcacggtggttcacgcctgtaatcccagcactttggaaggctgaagtgagtggatcacctgaggtcacgagtccgagaccagcctggccaacatggtgaaactgtctctactaaaaatacaaaaattagccgggtgtggtggcaggtgcctgtaatcccagctacttgtgaggctgaggcaggagaattgcttgaacctgggactcggaggttgcagtgagccgagattgcatcactgcactccagcctgggcaacagagctagactctgtctcagaaataaataaataaataaaaaactaaaaccctgtaatgtatcatcaccttagaacagtttataaaagttataaaaatataagatgatggtttcatgggtatatacttatgccaaaatttatcaaattgtaccctttaaatatgtacagtttattatgtccatcatatagcaataaaactgttaaaatactagaatgggctgggcacagtggctcacacctgtaattccagtgctttggcaggccaaggcaggaggatcccttgagcccaggaattcgagaccagccttggcgacatggcaaaactctgtcgctaccaaaacacacacaattagccaggcatgatggtacacgcctgtagtctcagctacttgagaggctgaggtgggaggactgcttgggcccacgaagtggagctgcagtaagccatgaacgcaccactgcactccagcctgggcgacagagtgagaccctgtctcaaaaacaaacaaatggctgggagcggtggctcacgcctataatcccagcactttgggaggccgaggtgggtggatcaccctgaggtcaggagttccagaccagcctggccaacatggtgaaaccccgtctctactaaaaacacaaaaattagctgggcctgtggcacatgcttgtaatcccagctacttgggaggctgaggcagaatagcttgaacccggtaggtggaggttgccgagatggcaccactgcattccagcctgggcaacagagcaaatactacgtctcaatgttaggcggctgacctaacatttgtttttcattctacaatttgaaatatgtgaatatatgtaagtatttagtaaaaatgggatactctg

SEQ ID NO: 60300 - DNA, 853 bp, Homo sapiens
cagcccttctggtcagctgtgtgaccttgggacagcaatttaacctctctaaacttcaatgtcctcattkgaaaaatgaatataataagatcttcaattggggcttgtgatgaagattaaatgacatgatatatgcaaaattctcacgcatactatgtgttccatatatataaaatgaatgaatgaatgaagaaatgaagaaagaatgagtgatcaattagagtccaaggaagcaatcaaagactactgtgggtattcaggtggaaaaggagaatgaaccaagactcaaccttcatgccccaaggacttcattgtctccctccaaatctggtctcagaagaagtcttaacatgaggcattgaactttaggtgaacatgtaagttgacatgctccctctctgaaaaatatttgcatttttaaggcaaatttccaataatctggtttaggtaatattttgtagaattccagagggctcacagtttcctctgaagcccatctatgaaccctgtcctacccattaagaacctcttatgtctccacaagtattaattggggggtcacagagaaattgttaagagacttttctggtaggatgcattttaattggaagcaagtcaggatacgattttagtaattgaggcatgaagagtccttcatactccagtggtgccagtatgattggacaaaaaaagtagattccagagactaaatgttgagaactgaacatagtgaggcccaagctgatgctgtctttcatagagagaaataaagaacaattcagataaggttccaagttttgaacctgagcagacaaggtaatgacaccctaaggtagtatagaagggagctggt

SEQ ID NO: 60301 - DNA, 729 bp, Homo sapiens
aacataaaacgaagcagtagaacactactaatccatgtacgcaagtgttctcacaaaacccttgcaatgttagagatttcttggaatcaaatttatagtaaatgtaaatatccatactgaaattgaccatcaccattgacacaggaaaatgactgaagttaaatgtaacatctggtataaaggctttcgtttccatgttgaatttgttcaaatagtgtttaaattgcaaagcatttccattccctgcagggtgcttcacaaaataaaagaacactatggtaggtgtcatgtaaagaagaagaagaaaacaaacgaggtttaacaccaagacaattttgctggaagtggatctattgagttgtgaaataaccctccaagtaaagtaatcatggttaattcccgaaggaacaaggttggttctcagtatctggaaaactttttatttttctgaaaattttcaaagatttcaagccaaagttttatttggatcaatgagttccaatgagaacttttacctttcaaccattttgaagaataaaaagacttgaagagatgaagcagagaattgttttyaaaaaaagtcattgctcctcttgtagtggagaaactcattgatctttttggaagtggtgaagtggaggaagattttctttgatcttaaaggtttgattacatttaagattttaaaaatactattcatttttattatttctttattttaaaaagatg

SEQ ID NO: 60302 - DNA, 1581 bp, Homo sapiens
gatcaggcaagaatgagatggcacatgcagatgaggtaattatgaattttgtaaagagtgagcagggtagaagggaactgcaggaatagatagcaccctagggctgaagatgcaagaggagagaatgattaccagaactgtgagtacagctttaggagaggggtgccctggaagggctgacatcagggccttaggtagagcaactcaggctcttacgaaccttagcctaaaatggaaagagccaggggaatcatctacctaaattccgactcttctggcactttcatctgctagcattgccttaacataagccataggacagggatgtccaattgatttaactcatagaaggctgttttccagggaacagaacaggatgtagatacatggatctgaagtacagtggagagcaaagcatccagtatgcaaatgaacctagagacacaaagcaacatggaagggtggcagaatggagaagtagaaaaaaatcttgggtccctgatgatgttcctgtgttattatgctgtatctggaatgacaactttgttttttattttcctttaacttttcattttgaaataatttcagacttacagaaaagttgtacagttagtagagggtttctatatacccttcggccagattccctcagtgttaagatcttgcatgaccgtagtacaattatcagaagtaagaattaacattagtataataatgttaactaatctatagatatttggattttaccagtttttctgctaatatctttcttttttccctgttccaagatccaatgcaggatcccaaatataacttaattgttgtgtttccttagtccattatttctgcagcaatttttttttctttgagatggagtttcactcttgttgcccaggctggagtgcaatagcacgatctccactcactgcaatctccgcttccycggttaaagcaattcttctgcctcagcctcccgagtagatgggattataggcacctgtcatcatggctggctaatttttgtagttttagtagagatgaggtttcaccatgttggccaggctggtcttgaattcctgacctcaggtgatctgcctacctcagcctcccaaagtgctagggattataggcatgagccaccacgcccggccaacaacttgttaaccattactgtcttttatagtcttcacactttggaagagtgctagttaattatttactagaatgtcccataatttgagcttatccaatgttttctcatgatggactatgcattttaggccagaaaaacaaagaagtgatgatcccctccctgtgtatcatatcagaatataaatgatatcagttgtcttatacatttattaattattacataattactaatacatcttatgcatatgatatcaactttgttctcataatgtggtttcagctaggttcaacctttttgatatgaaattattaagtatcttatcacttaagcaacttaataaaattgctattatcttgcttgcagatgaatacatcataacaaatatgccagtcctttgagttatctttcttttctccattgtaccttat

SEQ ID NO: 60303 - DNA, 1581 bp, Homo sapiens
gatcaggcaagaatgagatggcacatgcagatgaggtaattatgaattttgtaaagagtgagcagggtagaagggaactgcaggaatagatagcaccctagggctgaagatgcaagaggagagaatgattaccagaactgtgagtacagctttaggagaggggtgccctggaagggctgacatcagggccttaggtagagcaactcaggctcttacgaaccttagcctaaaatggaaagagccaggggaatcatctacctaaattccgactcttctggcactttcatctgctagcattgccttaacataagccataggacagggatgtccaattgatttaactcatagaaggctgttttccagggaacagaacaggatgtagatacatggatctgaagtacagtggagagcaaagcatccagtatgcaaatgaacctagagacacaaagcaacatggaagggtggcagaatggagaagtagaaaaaaatcttgggtccctgatgatgttcctgtgttattatgctgtatctggaatgacaactttgttttttattttcctttaacttttcattttgaaataatttcagacttacagaaaagttgtacagttagtagagggtttctatatacccttcggccagattccctcagtgttaagatcttgcatgaccgtagtacaattatcagaagtaagaattaacattagtataataatgttaactaatctatagatatttggattttaccagtttttctgctaatatctttcttttttccctgttccaagatccaatgcaggatcccaaatataacttaattgttgtgtttccttagtccattatttctgcagcaatttttttttctttgagatggagtttcactcttgttgcccaggctggagtgcaatagcacgatctccactcactgcaatctccgcttccccggttaaagcaattcttctgcctcagcctcccgagtagatgggattataggcacctgtcatcatggctggctaatttttgtagttttagtagagatgaggtttcaccatgttggccaggctggtcttgaattcctgacctcaggtgatctgcctacctcagcctcccaaagtgctagggattataggcatgagccaccacgcccggccaacaayttgttaaccattactgtcttttatagtcttcacactttggaagagtgctagttaattatttactagaatgtcccataatttgagcttatccaatgttttctcatgatggactatgcattttaggccagaaaaacaaagaagtgatgatcccctccctgtgtatcatatcagaatataaatgatatcagttgtcttatacatttattaattattacataattactaatacatcttatgcatatgatatcaactttgttctcataatgtggtttcagctaggttcaacctttttgatatgaaattattaagtatcttatcacttaagcaacttaataaaattgctattatcttgcttgcagatgaatacatcataacaaatatgccagtcctttgagttatctttcttttctccattgtaccttat

SEQ ID NO: 60304 - DNA, 1581 bp, Homo sapiens
gatcaggcaagaatgagatggcacatgcagatgaggtaattatgaattttgtaaagagtgagcagggtagaagggaactgcaggaatagatagcaccctagggctgaagatgcaagaggagagaatgattaccagaactgtgagtacagctttaggagaggggtgccctggaagggctgacatcagggccttaggtagagcaactcaggctcttacgaaccttagcctaaaatggaaagagccaggggaatcatctacctaaattccgactcttctggcactttcatctgctagcattgccttaacataagccataggacagggatgtccaattgatttaactcatagaaggctgttttccagggaacagaacaggatgtagatacatggatctgaagtacagtggagagcaaagcatccagtatgcaaatgaacctagagacacaaagcaacatggaagggtggcagaatggagaagtagaaaaaaatcttgggtccctgatgatgttcctgtgttattatgctgtatctggaatgacaactttgttttttattttcctttaacttttcattttgaaataatttcagacttacagaaaagttgtacagttagtagagggtttctatatacccttcggccagattccctcagtgttaagatcttgcatgaccgtagtacaattatcagaagtaagaattaacattagtataataatgttaactaatctatagatatttggattttaccagtttttctgctaatatctttcttttttccctgttccaagatccaatgcaggatcccaaatataacttaattgttgtgtttccttagtccattatttctgcagcaatttttttttctttgagatggagtttcactcttgttgcccaggctggagtgcaatagcacgatctccactcactgcaatctccgcttccccggttaaagcaattcttctgcctcagcctcccgagtagatgggattataggcacctgtcatcatggctggctaatttttgtagttttagtagagatgaggtttcaccatgttggccaggctggtcttgaattcctgacctcaggtgatctgcctacctcagcctcccaaagtgctagggattataggcatgagccaccacgcccggccaacaacttgttaaycattactgtcttttatagtcttcacactttggaagagtgctagttaattatttactagaatgtcccataatttgagcttatccaatgttttctcatgatggactatgcattttaggccagaaaaacaaagaagtgatgatcccctccctgtgtatcatatcagaatataaatgatatcagttgtcttatacatttattaattattacataattactaatacatcttatgcatatgatatcaactttgttctcataatgtggtttcagctaggttcaacctttttgatatgaaattattaagtatcttatcacttaagcaacttaataaaattgctattatcttgcttgcagatgaatacatcataacaaatatgccagtcctttgagttatctttcttttctccattgtaccttat

SEQ ID NO: 60305 - DNA, 2259 bp, Homo sapiens
taccttttatgaatattatctctgggctgggtgaggtggttcatgcctgtaatcctagcactttgggaggmcaaggtgggaggattgcttgagcctaggcattcaagaccagcctaggcaacaaagtgagaccccatctctatttttaaaaaaattaagaaataatattatttctgaattagtcttgctgttttttaaaacttggagtcaccctattggttagataataccaaccatctattagcaaacaaacatcaagctgccctgaaatatgactgatgtggagtgttgccttgatccttcctcttttattaaggctggtttgtgggagcttggagcaggaagaagggaggtagcaaaaaggacagagaaggtgaaggagacctttaatgtgggggttggggaagcaaaaggataactaaacataagcctcttgacagcatctgtgaccgaccatgcaccaaagccatgatatggcaacagctgtgtaaaggcccaagatgtttaattcttttagcagttgttcctgtaacttcttgtggtgtatcaccccagcatagaatggggaagatgggaatagcttagatttaaaaaaaaaaaaaaaaaaaggctagcttactattcttcctctgaaaagcgttttatcacataaccaactagtttagtctaatggtggaagataatagcacaaatctaaataaattaaaagtacgaattgttaaatatttttaaaagcaggcttttacttttagatatacacaattacttggaggaaatttcaacagctgctgctaagtagaggcactgctgggccatttttaatgtagtagacaggactttaaatattgacatccattttcacaacacaaatgttcctttaggaaattctttttaataaacaaatagtaattaaaagatttaacaaatgcatgacattaattttaaatttaacaagatagccttttaaaggaatatattcccctacccagccccaaaaagcatttatgtcctgatgaccacaatgaataactgagctgaagaaacaacttgtctttgtcagggagataaaattcttctgccacgtttttaccttccattccttagcattgtgtctgtggctcttcctaatatcactttccccaggagtgggaagaccctcttacaattattggaacatttccactgtagaacctgtgacaagttaatctttttggaatggcagtcagatagctggaggtaaagccttacgtgccagatcttctactttgacacctttgctacactatatttctaaaatatccatgtacttggctgacttcttaaatgctgagcaaaatttatccttgatggctcagaattattgttatgagggtatctattactattatgtattaaaatgtacattaatgggcactaatccgagtaataattcaggaacttgcattaaaaagagttactcatgtcagtttaccatttgccctggtctttcaaaaatgcaatgagacttattcagccatatagtcccttaggaagtacctttcagttaacttcattagcacataggtcatcaaaagtcttttcctaaataattttatttgcccttcagaaaaccatctctgtttattgttcttgctgtaattactcttaattcaccagcatcattcataatgttatgaaattgtttagacctaatctcacatataactaaaggcattagctttcatatagtctgttaagttagaaagctctcacccaagattctatccttttcccccaaaataagaaaagctttttttctctgagacagtaaatttaacttatcacattaaactgccaatttagggaactcatactctcatcttctctcacctgaattctttgtgtgtgtgtgtgtgtgtgtgtgtgtgtgtgtgtgtgtgtttttcttccagctattcttgtattccttataacccatcagttctcaaactctttggtcttaagatctcttcacatttttaaaaattaagagccccaaagagcttttgtttatataggttatatctagaaatgtttactgtattagaagttaaaactgagaaatttaaaaaatgtttattaattcatttactacaataaactaatcattattaaaattatatttttataaagatattttttctacaaaaaattacttttctacaaaaaaatttagaggagtggtattgttttaatttctgacttaatataaaatatttggattcttacatctttcatgca

SEQ ID NO: 60306 - DNA, 2259 bp, Homo sapiens
taccttttatgaatattatctctgggctgggtgaggtggttcatgcctgtaatcctagcactttgggaggccaaggtgggaggattgcttgagcctaggcattcaagaccagcctaggcaacaaagtgagaccccatctctatttttaaaaaaattaagaaataatattatttctgaattagtcttgctgttttttaaaacttggagtcaccctattggttagataataccaaccatctattagcaaacaaacatcaagctgccctgaaatatgactgatgtggagtgttgccttgatccttcctcttttattaaggctggtttgtgggagcttggagcaggaagaagggaggtagcaaaaaggacagagaaggtgaaggagacctttaatgtgggggttggggaagcaaaaggataactaaacataagcctcttgacagcatctgtgaccgaccatgcaccaaagccatgatatrgcaacagctgtgtaaaggcccaagatgtttaattcttttagcagttgttcctgtaacttcttgtggtgtatcaccccagcatagaatggggaagatgggaatagcttagatttaaaaaaaaaaaaaaaaaaaggctagcttactattcttcctctgaaaagcgttttatcacataaccaactagtttagtctaatggtggaagataatagcacaaatctaaataaattaaaagtacgaattgttaaatatttttaaaagcaggcttttacttttagatatacacaattacttggaggaaatttcaacagctgctgctaagtagaggcactgctgggccatttttaatgtagtagacaggactttaaatattgacatccattttcacaacacaaatgttcctttaggaaattctttttaataaacaaatagtaattaaaagatttaacaaatgcatgacattaattttaaatttaacaagatagccttttaaaggaatatattcccctacccagccccaaaaagcatttatgtcctgatgaccacaatgaataactgagctgaagaaacaacttgtctttgtcagggagataaaattcttctgccacgtttttaccttccattccttagcattgtgtctgtggctcttcctaatatcactttccccaggagtgggaagaccctcttacaattattggaacatttccactgtagaacctgtgacaagttaatctttttggaatggcagtcagatagctggaggtaaagccttacgtgccagatcttctactttgacacctttgctacactatatttctaaaatatccatgtacttggctgacttcttaaatgctgagcaaaatttatccttgatggctcagaattattgttatgagggtatctattactattatgtattaaaatgtacattaatgggcactaatccgagtaataattcaggaacttgcattaaaaagagttactcatgtcagtttaccatttgccctggtctttcaaaaatgcaatgagacttattcagccatatagtcccttaggaagtacctttcagttaacttcattagcacataggtcatcaaaagtcttttcctaaataattttatttgcccttcagaaaaccatctctgtttattgttcttgctgtaattactcttaattcaccagcatcattcataatgttatgaaattgtttagacctaatctcacatataactaaaggcattagctttcatatagtctgttaagttagaaagctctcacccaagattctatccttttcccccaaaataagaaaagctttttttctctgagacagtaaatttaacttatcacattaaactgccaatttagggaactcatactctcatcttctctcacctgaattctttgtgtgtgtgtgtgtgtgtgtgtgtgtgtgtgtgtgtgtgtttttcttccagctattcttgtattccttataacccatcagttctcaaactctttggtcttaagatctcttcacatttttaaaaattaagagccccaaagagcttttgtttatataggttatatctagaaatgtttactgtattagaagttaaaactgagaaatttaaaaaatgtttattaattcatttactacaataaactaatcattattaaaattatatttttataaagatattttttctacaaaaaattacttttctacaaaaaaatttagaggagtggtattgttttaatttctgacttaatataaaatatttggattcttacatctttcatgca

SEQ ID NO: 60307 - DNA, 2259 bp, Homo sapiens
taccttttatgaatattatctctgggctgggtgaggtggttcatgcctgtaatcctagcactttgggaggccaaggtgggaggattgcttgagcctaggcattcaagaccagcctaggcaacaaagtgagaccccatctctatttttaaaaaaattaagaaataatattatttctgaattagtcttgctgttttttaaaacttggagtcaccctattggttagataataccaaccatctattagcaaacaaacatcaagctgccctgaaatatgactgatgtggagtgttgccttgatccttcctcttttattaaggctggtttgtgggagcttggagcaggaagaagggaggtagcaaaaaggacagagaaggtgaaggagacctttaatgtgggggttggggaagcaaaaggataactaaacataagcctcttgacagcatctgtgaccgaccatgcaccaaagccatgatatggcaacagctgtgtaaaggcccaagatgtttaattcttttagcagttgttcctgtaacttcttgtggtrtatcaccccagcatagaatggggaagatgggaatagcttagatttaaaaaaaaaaaaaaaaaaaggctagcttactattcttcctctgaaaagcgttttatcacataaccaactagtttagtctaatggtggaagataatagcacaaatctaaataaattaaaagtacgaattgttaaatatttttaaaagcaggcttttacttttagatatacacaattacttggaggaaatttcaacagctgctgctaagtagaggcactgctgggccatttttaatgtagtagacaggactttaaatattgacatccattttcacaacacaaatgttcctttaggaaattctttttaataaacaaatagtaattaaaagatttaacaaatgcatgacattaattttaaatttaacaagatagccttttaaaggaatatattcccctacccagccccaaaaagcatttatgtcctgatgaccacaatgaataactgagctgaagaaacaacttgtctttgtcagggagataaaattcttctgccacgtttttaccttccattccttagcattgtgtctgtggctcttcctaatatcactttccccaggagtgggaagaccctcttacaattattggaacatttccactgtagaacctgtgacaagttaatctttttggaatggcagtcagatagctggaggtaaagccttacgtgccagatcttctactttgacacctttgctacactatatttctaaaatatccatgtacttggctgacttcttaaatgctgagcaaaatttatccttgatggctcagaattattgttatgagggtatctattactattatgtattaaaatgtacattaatgggcactaatccgagtaataattcaggaacttgcattaaaaagagttactcatgtcagtttaccatttgccctggtctttcaaaaatgcaatgagacttattcagccatatagtcccttaggaagtacctttcagttaacttcattagcacataggtcatcaaaagtcttttcctaaataattttatttgcccttcagaaaaccatctctgtttattgttcttgctgtaattactcttaattcaccagcatcattcataatgttatgaaattgtttagacctaatctcacatataactaaaggcattagctttcatatagtctgttaagttagaaagctctcacccaagattctatccttttcccccaaaataagaaaagctttttttctctgagacagtaaatttaacttatcacattaaactgccaatttagggaactcatactctcatcttctctcacctgaattctttgtgtgtgtgtgtgtgtgtgtgtgtgtgtgtgtgtgtgtgtttttcttccagctattcttgtattccttataacccatcagttctcaaactctttggtcttaagatctcttcacatttttaaaaattaagagccccaaagagcttttgtttatataggttatatctagaaatgtttactgtattagaagttaaaactgagaaatttaaaaaatgtttattaattcatttactacaataaactaatcattattaaaattatatttttataaagatattttttctacaaaaaattacttttctacaaaaaaatttagaggagtggtattgttttaatttctgacttaatataaaatatttggattcttacatctttcatgca

SEQ ID NO: 60308 - DNA, 2259 bp, Homo sapiens
taccttttatgaatattatctctgggctgggtgaggtggttcatgcctgtaatcctagcactttgggaggccaaggtgggaggattgcttgagcctaggcattcaagaccagcctaggcaacaaagtgagaccccatctctatttttaaaaaaattaagaaataatattatttctgaattagtcttgctgttttttaaaacttggagtcaccctattggttagataataccaaccatctattagcaaacaaacatcaagctgccctgaaatatgactgatgtggagtgttgccttgatccttcctcttttattaaggctggtttgtgggagcttggagcaggaagaagggaggtagcaaaaaggacagagaaggtgaaggagacctttaatgtgggggttggggaagcaaaaggataactaaacataagcctcttgacagcatctgtgaccgaccatgcaccaaagccatgatatggcaacagctgtgtaaaggcccaagatgtttaattcttttagcagttgttcctgtaacttcttgtggtgtatcaccccagcatagaatggggaagatgggaatagcttagatttaaaaaaaaaaaaaaaaaaaggctagcttactattcttcctctgaaaagcgttttatcacataaccaactagtttagtctaatggtggaagataatagcacaaatctaaataaattaaaagtacgaattgttaaatatttttaaaagcaggcttttacttttagatatacacaattacttggaggaaatttcaacagctgctgctaagtagaggcactgctgggccatttttaatgtagtagacaggactttaaatattgacatccattttcacaacacaaatgttcctttaggaaattctttttaataaacaaatagtaattaaaagatttaacaaatgcatgacattaattttaaatttaacaagatagccttttaaaggaatatattcccctacccagccccaaaaagcatttatgtcctgatgaccacaatgaataactgagctgaagaaacaacttgtctttgtcagggagataaaattcttctgccacgtttttaccttccattccttagcattgtgtctgtggctcttcctaatatcactttccccaggagtgggaagaccctcttayaattattggaacatttccactgtagaacctgtgacaagttaatctttttggaatggcagtcagatagctggaggtaaagccttacgtgccagatcttctactttgacacctttgctacactatatttctaaaatatccatgtacttggctgacttcttaaatgctgagcaaaatttatccttgatggctcagaattattgttatgagggtatctattactattatgtattaaaatgtacattaatgggcactaatccgagtaataattcaggaacttgcattaaaaagagttactcatgtcagtttaccatttgccctggtctttcaaaaatgcaatgagacttattcagccatatagtcccttaggaagtacctttcagttaacttcattagcacataggtcatcaaaagtcttttcctaaataattttatttgcccttcagaaaaccatctctgtttattgttcttgctgtaattactcttaattcaccagcatcattcataatgttatgaaattgtttagacctaatctcacatataactaaaggcattagctttcatatagtctgttaagttagaaagctctcacccaagattctatccttttcccccaaaataagaaaagctttttttctctgagacagtaaatttaacttatcacattaaactgccaatttagggaactcatactctcatcttctctcacctgaattctttgtgtgtgtgtgtgtgtgtgtgtgtgtgtgtgtgtgtgtgtttttcttccagctattcttgtattccttataacccatcagttctcaaactctttggtcttaagatctcttcacatttttaaaaattaagagccccaaagagcttttgtttatataggttatatctagaaatgtttactgtattagaagttaaaactgagaaatttaaaaaatgtttattaattcatttactacaataaactaatcattattaaaattatatttttataaagatattttttctacaaaaaattacttttctacaaaaaaatttagaggagtggtattgttttaatttctgacttaatataaaatatttggattcttacatctttcatgca

SEQ ID NO: 60309 - DNA, 480 bp, Homo sapiens
gacgtagtcattgtttacttatgtgtgagcttcttcaaagattggcacaatgtctgcacttcacttgggttatgytcattgtcagaagtacaaatgttgaatttaagtgggatcagaaatgtcttcagaaagattacattatgacactgcactgttgcatttgaaacgctgcaacctaaggcaggagaaataagcaaatctcagatttctaggtaacgagaggacagtgtgagtcattcatgtgttgcacattactatccttaatacaataattatatgtagtggtcctaaaataatggtgcatcttataattgatagtgtcttgaatatgatgaaatacggcacaaaattacttgattaagtgatatgtatggaaaatgcattttttccagaggtttcaaggtgtgtgcggcactctcttaggtctcttgctttgccttcagacttctgtctagtagtccgatgcactaggaaggccta

SEQ ID NO: 60310 - DNA, 632 bp, Homo sapiens
tgccccyggccctttaacgctgaataatactccattgtatatatgtgtgtgtgtgtgtgtatatatatatatatatatatatatattttacattttctttatccattcatccattgatggacatttaggttgtctccatatcttttgagcctcatcttttgcaggctttcatcttatacaaaaagtataggaaagtatctcaaacttttctgataacagttcagttttctatttcccagtctaaactccatagcagccaaccattattggtctaccaagatggttaataccttgccaaatctcattaactgaatcataatgtctttatgaacaaagctcctagatttcaccagacagctattctagtgttctgacccctttttactgctaaagtctctgaaatacatcaggtttctgaatattctgatggtctgaacttactactcatttctaggaaggtctgcaagtctgtactttgggttcatgcataatgaatgaaaaccagggtctccaccacacgtctcagactgcaagggattttagaaggcggctggcgggggtgctatttcattgtctggcaataatgagaactcttggacgtacagttctatacatctgagcaagccaaattt

SEQ ID NO: 60311 - DNA, 632 bp, Homo sapiens
tgcccccggccctttaacgctgaataatactccattgtatatatgtgtgtgtgtgtgtrtatatatatatatatatatatatatattttacattttctttatccattcatccattgatggacatttaggttgtctccatatcttttgagcctcatcttttgcaggctttcatcttatacaaaaagtataggaaagtatctcaaacttttctgataacagttcagttttctatttcccagtctaaactccatagcagccaaccattattggtctaccaagatggttaataccttgccaaatctcattaactgaatcataatgtctttatgaacaaagctcctagatttcaccagacagctattctagtgttctgacccctttttactgctaaagtctctgaaatacatcaggtttctgaatattctgatggtctgaacttactactcatttctaggaaggtctgcaagtctgtactttgggttcatgcataatgaatgaaaaccagggtctccaccacacgtctcagactgcaagggattttagaaggcggctggcgggggtgctatttcattgtctggcaataatgagaactcttggacgtacagttctatacatctgagcaagccaaattt

SEQ ID NO: 60312 - DNA, 715 bp, Homo sapiens
agttgataggtgcagcaaaccaccatggcacatgtatacctatgtaacagacctgcacattctgcacatgtatcccagaacttaaagtaaaataaaaaaacaaaattaatatcaacacagtttctacatttgaatatgtaatttcttctcgcccacattttaatgttttgcaaytgagatgtatgtatcttgtcaattagtatatttaatattgctttatttttttccctggaagtcttatttttgtagcagtggtgttccctaataggaagaagtcttacaatcgaggtaacatggttttaatagtgaccccacgttatcaagaaaagtttatattgtgttcaaagtgttttattaggaaggtcatataatatttaacgaatattagagtacttcccattgagggtagaacggtaaataagtacagtgaagaatattaaaattatacttcagttatctggaaaattcacttattgaattctcatacaatagcagaaaaatgaggcttgatgatgaataaaaccgagtgcttcagtgtactcctttaacaagtaaaaagaaaacactctgccaaacggcctatattctgttaaagcatacatattttttgcacaatttctgtttctttcatattgatttataaaatgttagcgtactatatgtaactatataagtatatacttttctggttcataagctaatcttttgccttttg

SEQ ID NO: 60313 - DNA, 605 bp, Homo sapiens
cctgcactctgggccacggctatgcctggccttttgggggacatttaaatttccctcacaaactttggaatctatgttgggtttagattttggaggtgaattctttggcaccagcctgtgctaaatttcctcttagaagttccaacagcccctaagggtcctgttggaacagaactcctcactcctctccacacacagctgccttgaacttctaccccatgtctagtatctccttaagtcttctttgagctacagggagagatgactcctggaaattgcatcctcaacgctggtcaatttctttccatcttatctagtctgtttgaaccatattcaccagcwggctgttaggtctggttctgtttatcgatttgcctgtggatctgtgcttagttgtttgatgaggggcctttaatggtaacctcttcttccaagggcattatcagtttcctgttgcttctcggctgcctccagcttatacttctcatttcattttatttcagctggagctacttattaaatgtcatgaaaacttcctgcttatcagtaggagtttctgcagttctcagctataggtagacctgagaatattgacaagtgttgag

SEQ ID NO: 60314 - DNA, 560 bp, Homo sapiens
  misc_feature (1)...(560): n = A,T,C or G
cctccctcnnnnnnnnnnnnnnnnnnnnnnnnnnnnnnnnnnnnnnnnnnnnnnnnnnnnnnnnnnnnnnnnnnnnnnnnnnnnnnnnnnnnnnnnnnnnnnnnnnnncaaacgtttttgagatggagtttttctcttgttgcccaggctggagcacgatctyggttcaccgcaacctctgcctcctgggtttaagcgattctcctgcctcagcctcctgagtagctgggattaattacaggcaagcgctaccatgcccggctaattttgtatttttagtagagacaggggtttcttccatgttggtcaggctggtctcgaactcccaacctcaggtaatctgcccgccttggcctcccaaagtgctgggattacaggcatgagccaccgcgcctggcctcacatttttgtgtctctccagtcaaaagcaaaaataatcccaactgacaggaaatttacaacttttatctaaaagtatgcctgttgaacaagaatgctgtatattgtcaggcaaagataaggtgcaggttgtggcagaattgacaggttagcagatggtt

SEQ ID NO: 60315 - DNA, 327 bp, Homo sapiens
tttttttttttttttttttttttttttycctgcaatctcagctcactgtaagctccgcctcccgggttcatgccattgtcctgcctcagcctcccgagtagctgggactgcaggtgcctgccaccacgcctggctgatttttttgtaattttagtagagacggggtttcaccgtgttagccaggatggtcttgatctcctgacctcatgatccacccgccttggcctcccaaagtgctgggattacaggcttgagccactatgcccggccaccacacatctcttggcatccacaaagtggagtgccactgggtggatgtctgccctg

SEQ ID NO: 60316 - DNA, 3308 bp, Homo sapiens
gcatactcaaactttctaaatccttttttgtgctccttaacatctttattaaactatacacatatgcacacacatacacacagctttaaaaatactcgactagagcatttaattatgactcattatctacagttaaaaattaaagtaaatcctctgttacttttgctgtattctgtaagtgttgagaattttgttgtatattcctaaacagtaagttgcatagacatgtaagttggtgtaaagcattaaggtaaaaagttattgaatttttatttggaaataaagataaaccttgaggggaaacaagtatcacttaacagcttggattggaccttcaacacatggttgacttcatattctgtgcttgtaagccttaatcatgactggcaagacacaaggagaaaatgtaagttcttatacttaatctcaaccagccatttggttaaggcaatcaaattatttcaattatttgaaaacttctctaaaaccaattagagccatgggttatctgttttctgcagtaaagttatctggcattatcaaggaagaatgtgtttaaagatgtaaatgtttcaatcaattttgaacccagtttttcatttctccctgtacccatcactcttgacttgtaatcttgcagttctacaagaaatagataactttctcaactcttgctttggggcttggacgtgattttctctgactcataaaatgttaacaggtgagacccaaacaggaacgttaagtatgcttttatttttggaatactctattgtggctctgctttcaacaaagactatcagccaaagagtccaaagaagatgacatacatacaggtctctagttccaaaggtagctgatctagttaccccattcttgacacccaaatggtcgaactgatatcaacagagctaccccagtcaagtcacttatttgaaaggattgcttactgttagatatcactgagtttatgaatatttcttttatcaatacataactaatgcttgaataatgtatgtgtattatctcaatatcattatcctggttgttatattgtactatcttagggggaaactggttaaaagataattggaattcctctatattatttcttacaaaggaaaatgaatagaaaattatctcaataaaatttttaataaataaataacatgcacaatcatattggcatcagtggcagaactagggtgatgggcatttatttgcaaaaatatttaccatcttcttattatcatgcataaagaaaaatataatttataataccaagtataacttaactwtaccagattctggacttcgtaaggaagataattttcttatttatttttgtttgtctgtaaatcttctaatgccaaagttgcccatacagaattaattgtaattattttatagatagtgttttatactgaacagctcttatcatagtaattttatgttatcaggtaaacttcctcattataaactactattcttcagatcatctcaaaaatttttacattttgcaagatttaaattgaactgaaatttgacctggacaatcacaataaacgtatactaacacaaaaacttttgtattacaatattctcgatcaaaaatttagtttaaatggtctgagattccatacttacagtatttataactttaaagttattttactaaacatcagtgtgaatagatattgtactgtcagttggagggttatcataatttcatgcaatgactagttattgaacaactgcagtgctgctctcaaggataaataattaatatttctagcattacattttatgacataataatttggtaatgactaacttcctgactgtctcttttacatctttgttcctgaggctatagatcaaggggttcagcatgggaatgaccactgtgtaaaagacagaggccaccttgaccatgagccatgaacttttggagttaggaacacagtagagaaaaaggatagtcccatggaaaatggtaatggcggtcaggtgggaggcacacgtggagaacgctttcttgcgccccccagtggaaggcatcttcatgacagtgataaaaatgaaagcataggaagtgagaatgatcaccaggctgcttatttcattgaatgttgcagaaactaaaatgaccttctggctcatgtaggggtcagagcaggacacagcaacaatggcagcgtgctcacagacaaagttattaatgaagttagtcctacaaaaagataaagtcaacagaaaatatgtgtatgttaaggaacaaactaaactccaagagtatgatgcagccactaacaaggagcaaagcctctgggacattgcaactgtgtaaagcagagggttacacactgccacaaatctgtcataagccatcgctgccagcatgaatgtttctgtcaccacaaatatacaggcaaagaagaattgcatgatgcatcctgtgaaggagatgattctgtcttccacaaccaagttctccagcagttttggtgtaattgtggtggaataacagaaatcaacaaaggacaagtggctgaggaaaaagtacataggggtgtggagtttggggttgatcctgatgaccatgatcatgcccagattccccatcacagtgattgtgtagatggtcaggaagaccaggaacaggggtatctgaaggtctggaaattctgagaagcccaagaggatgaaggtgactccagcagtctgatttttttgaatcctgtgagaaaaaaataagaaagttgatccagagaagtagaagccaatatgtgcaataagaaacagaaaggaagaaatattgagagacttagtgggtctttattaagagtgttgctgaaaattctaggtttccactgtcaaattatttcaaaaggtagagtacttatataaaaattacaaggtgaataggattattttgtgaatggaataataaaaaacaaaattaagacaggaaaaacaaaacagggtataccttcctatatttcagataataagacagcaggcttcatgagaagagccactctaagtttgcatgaatctgagataagtgcaaatatttctgttggaggaaatatatacttttctacagtttcattcctgctgtacctctaaagctttgagacagttaacttacaactcttaacaaattgtaaaatgttaacattcctgtaaaatggtaaatttaacagtttattggtggttttatttttaacacctttctcattccttataatccaatactttcaacacattctggagctgtgttacactaatatgctaatctttct

SEQ ID NO: 60317 - DNA, 3308 bp, Homo sapiens
gcatactcaaactttctaaatccttttttgtgctccttaacatctttattaaactatacacatatgcacacacatacacacagctttaaaaatactcgactagagcatttaattatgactcattatctacagttaaaaattaaagtaaatcctctgttacttttgctgtattctgtaagtgttgagaattttgttgtatattcctaaacagtaagttgcatagacatgtaagttggtgtaaagcattaaggtaaaaagttattgaatttttatttggaaataaagataaaccttgaggggaaacaagtatcacttaacagcttggattggaccttcaacacatggttgacttcatattctgtgcttgtaagccttaatcatgactggcaagacacaaggagaaaatgtaagttcttatacttaatctcaaccagccatttggttaaggcaatcaaattatttcaattatttgaaaacttctctaaaaccaattagagccatgggttatctgttttctgcagtaaagttatctggcattatcaaggaagaatgtgtttaaagatgtaaatgtttcaatcaattttgaacccagtttttcatttctccctgtacccatcactcttgacttgtaatcttgcagttctacaagaaatagataactttctcaactcttgctttggggcttggacgtgattttctctgactcataaaatgttaacaggtgagacccaaacaggaacgttaagtatgcttttatttttggaatactctattgtggctctgctttcaacaaagactatcagccaaagagtccaaagaagatgacatacatacaggtctctagttccaaaggtagctgatctagttaccccattcttgacacccaaatggtcgaactgatatcaacagagctaccccagtcaagtcacttatttgaaaggattgcttactgttagatatcactgagtttatgaatatttcttttatcaatacataactaatgcttgaataatgtatgtgtattatctcaatatcattatcctggttgttatattgtactatcttagggggaaactggttaaaagataattggaattcctctatattatttcttacaaaggaaaatgaatagaaaattatctcaataaaatttttaataaataaataacatgcacaatcatattggcatcagtggcagaactagggtgatgggcatttatttgcaaaaatatttaccatcttcttattatcatgcataaagaaaaatataatttataataccaagtataacttaactttaccagattctggacttcgtaaggaagataattttcttatttatttttgtttgtctgtaaatcttctaatgccaaagttgcccatacagaattaattgtaattattttatagatagtgttttatactgaacagctcttatcatagtaattttatgttatcaggtaaacttcctcattataaactactattcttcagatcatctcaaaaatttttacattttgcaagatttaaattgaactgaaatttgacctggacaatcacaataaacgtatactaacacaaaaacttttgtattacaatattmtcgatcaaaaatttagtttaaatggtctgagattccatacttacagtatttataactttaaagttattttactaaacatcagtgtgaatagatattgtactgtcagttggagggttatcataatttcatgcaatgactagttattgaacaactgcagtgctgctctcaaggataaataattaatatttctagcattacattttatgacataataatttggtaatgactaacttcctgactgtctcttttacatctttgttcctgaggctatagatcaaggggttcagcatgggaatgaccactgtgtaaaagacagaggccaccttgaccatgagccatgaacttttggagttaggaacacagtagagaaaaaggatagtcccatggaaaatggtaatggcggtcaggtgggaggcacacgtggagaacgctttcttgcgccccccagtggaaggcatcttcatgacagtgataaaaatgaaagcataggaagtgagaatgatcaccaggctgcttatttcattgaatgttgcagaaactaaaatgaccttctggctcatgtaggggtcagagcaggacacagcaacaatggcagcgtgctcacagacaaagttattaatgaagttagtcctacaaaaagataaagtcaacagaaaatatgtgtatgttaaggaacaaactaaactccaagagtatgatgcagccactaacaaggagcaaagcctctgggacattgcaactgtgtaaagcagagggttacacactgccacaaatctgtcataagccatcgctgccagcatgaatgtttctgtcaccacaaatatacaggcaaagaagaattgcatgatgcatcctgtgaaggagatgattctgtcttccacaaccaagttctccagcagttttggtgtaattgtggtggaataacagaaatcaacaaaggacaagtggctgaggaaaaagtacataggggtgtggagtttggggttgatcctgatgaccatgatcatgcccagattccccatcacagtgattgtgtagatggtcaggaagaccaggaacaggggtatctgaaggtctggaaattctgagaagcccaagaggatgaaggtgactccagcagtctgatttttttgaatcctgtgagaaaaaaataagaaagttgatccagagaagtagaagccaatatgtgcaataagaaacagaaaggaagaaatattgagagacttagtgggtctttattaagagtgttgctgaaaattctaggtttccactgtcaaattatttcaaaaggtagagtacttatataaaaattacaaggtgaataggattattttgtgaatggaataataaaaaacaaaattaagacaggaaaaacaaaacagggtataccttcctatatttcagataataagacagcaggcttcatgagaagagccactctaagtttgcatgaatctgagataagtgcaaatatttctgttggaggaaatatatacttttctacagtttcattcctgctgtacctctaaagctttgagacagttaacttacaactcttaacaaattgtaaaatgttaacattcctgtaaaatggtaaatttaacagtttattggtggttttatttttaacacctttctcattccttataatccaatactttcaacacattctggagctgtgttacactaatatgctaatctttct

SEQ ID NO: 60318 - DNA, 3308 bp, Homo sapiens
gcatactcaaactttctaaatccttttttgtgctccttaacatctttattaaactatacacatatgcacacacatacacacagctttaaaaatactcgactagagcatttaattatgactcattatctacagttaaaaattaaagtaaatcctctgttacttttgctgtattctgtaagtgttgagaattttgttgtatattcctaaacagtaagttgcatagacatgtaagttggtgtaaagcattaaggtaaaaagttattgaatttttatttggaaataaagataaaccttgaggggaaacaagtatcacttaacagcttggattggaccttcaacacatggttgacttcatattctgtgcttgtaagccttaatcatgactggcaagacacaaggagaaaatgtaagttcttatacttaatctcaaccagccatttggttaaggcaatcaaattatttcaattatttgaaaacttctctaaaaccaattagagccatgggttatctgttttctgcagtaaagttatctggcattatcaaggaagaatgtgtttaaagatgtaaatgtttcaatcaattttgaacccagtttttcatttctccctgtacccatcactcttgacttgtaatcttgcagttctacaagaaatagataactttctcaactcttgctttggggcttggacgtgattttctctgactcataaaatgttaacaggtgagacccaaacaggaacgttaagtatgcttttatttttggaatactctattgtggctctgctttcaacaaagactatcagccaaagagtccaaagaagatgacatacatacaggtctctagttccaaaggtagctgatctagttaccccattcttgacacccaaatggtcgaactgatatcaacagagctaccccagtcaagtcacttatttgaaaggattgcttactgttagatatcactgagtttatgaatatttcttttatcaatacataactaatgcttgaataatgtatgtgtattatctcaatatcattatcctggttgttatattgtactatcttagggggaaactggttaaaagataattggaattcctctatattatttcttacaaaggaaaatgaatagaaaattatctcaataaaatttttaataaataaataacatgcacaatcatattggcatcagtggcagaactagggtgatgggcatttatttgcaaaaatatttaccatcttcttattatcatgcataaagaaaaatataatttataataccaagtataacttaactttaccagattctggacttcgtaaggaagataattttcttatttatttttgtttgtctgtaaatcttctaatgccaaagttgcccatacagaattaattgtaattattttatagatagtgttttatactgaacagctcttatcatagtaattttatgttatcaggtaaacttcctcattataaactactattcttcagatcatctcaaaaatttttacattttgcaagatttaaattgaactgaaatttgacctggacaatcacaataaacgtatactaacacaaaaacttttgtattacaatattctcgatcaaaaatttagtttaaatggtctgagattccatacttacagtatttataactttaaagttattttactaaacatcagtgtgaatagatattgtactgtcagttggagggttatcataatttcatgcaatgactagttattgaacaactgcagtgctgctctcaaggataaataattaatatttctagcattacattttatgacataataatttggtaatgactaacttcctgactgtctcttttacatctttgttcctgaggctatagatcaaggggttcagcatgggaatgaccactgtgtaaaagacagaggccaccttgaccatgagccatgaacttttggagttaggaacacagtagagaaaaaggatagtcccatggaaaatggtaatggcggtcaggtgggaggcacacgtggagaacgctttcttgcgccccccagtggaaggcatcttcatgacagtgataaaaatgaaagcataggaagtgagaatgatcaccaggctgcttatttcattgaatgttgcagaaactaaaatgaccttctggctcatgtaggggtcagagcaggacacagcaacaatggcagcgtgctcacagacaaagttattaatgaagttagtcctacaaaaagataaagtcaacagaaaatatgtgtatgttaaggaacaaactaaactccaagagtatgatgcagccactaacaaggagcaaagcctctgggacattgcaactgtgtaaagcagagggttacacactgccacaaatctgtcataagccatcgctgccagcatgaatgtttctgtcaccacaaatatacaggcaaagaagaattgcatgatgcatcctgtgaaggagatgattctgtcttccacaaccaagttctccagcagttttggtgtaattgtggtggaataacagaaatcaacaaaggacaagtggctgaggaaaaagtacataggggtgtggagtttggggttgatcctgatgaccatgatcatgcccagattccccatcacagtgattgtgtagatggtcaggaagaccaggaacaggggtatctgaaggtctggaaattctgagaagcccaagaggatgaaggtgactccagcagtctgatttttttgaatcctgtgagaaaaaaataagaaagttgatccagagaagtagaagccaatatgtgcaataagaaacagaaaggaagaaatattgagagacttagtgggtctttattaagagtgttgctgaaaattytaggtttccactgtcaaattatttcaaaaggtagagtacttatataaaaattacaaggtgaataggattattttgtgaatggaataataaaaaacaaaattaagacaggaaaaacaaaacagggtataccttcctatatttcagataataagacagcaggcttcatgagaagagccactctaagtttgcatgaatctgagataagtgcaaatatttctgttggaggaaatatatacttttctacagtttcattcctgctgtacctctaaagctttgagacagttaacttacaactcttaacaaattgtaaaatgttaacattcctgtaaaatggtaaatttaacagtttattggtggttttatttttaacacctttctcattccttataatccaatactttcaacacattctggagctgtgttacactaatatgctaatctttct

SEQ ID NO: 60319 - DNA, 670 bp, Homo sapiens
gttttgccatgttggccaggctgatcttgaactcctgatctcaggtgatcacccgccttggcctcccaaagtgctggcattacaggcctgagccacagcactgggccacgaatagcctctttttgacaaaggctctctggatgtacaagtgtgggattgcccatggatgcatggaatcgggtgttctgggtgagtagctctgggatatacataaaaatttgttctgaagtattctaaagttattattaaaaatcctggttttgatttttttgtcatttgcttctcccttttaaaaacaaaatcaacaattgagtttaaaaggctaaaatttgattagatataaatgaaacatctttgcctgaatgatgtccctgtagcattctaatactaagattgggttagatttcaacgagatgaagcttttaagtatagaaacctatgaagaaaatttacaagctgaaagtaagacttcatatatctgattaattcatctcacaaaaaaactgatattaatagtaacataatgcaggtaagagcctcccagctgaaaaggaaaaagacttggattctcattcacagtgtggcaatgggagaactttagtttccttatctgtaacatgaagttgaattggatrctttctgagatcccttatggtcttaagtggtttct

SEQ ID NO: 60320 - DNA, 1086 bp, Homo sapiens
ctagtatgcagctacaaaaaggaacaatatcatgtcctttgcagcaacatggatgcggctggaggccatgttcccaagtgaattaatgcagaaacagaaaaccaaatactatatgttttcacttataagtgggggataaacaatgggtactcatagacataaagatgggaacaatagacactggggactactaaagggggaaggagggagatgggctagggttgaaagactacctattggatactatgctcactacctgggtgatgggatcattcatatctcaaacctcagcatcatgccatatagcaggtaacaaacctgcacatatacccccctgaatctaaaacaaaagctgaaattatattaaaaaatgtattgctcttaagtctgagaactggttacatggttctgtgttttattataagacacagaactttatttttttaattacacaggtaaaacatgtccaaatatatgtggaaaacatgtatttaaacatacccaaatatggaaaatacggaaaatatttgggtatatatccatatatacttaaagtattcacgtgtgtgtgtgtttatgtatatacatatattttaaaattagaaccattaaacctgaaaacatgttgtcataaagctttccttctaacaacagagatagctctgtctctctttctctctcaagtagcttcttctttctataaaagatacttcccttctcatcacaggtgtattagcgttcaaagggcaactgtccaagcccttggcaactgtccaaatgtgtgtgtgtgtgtrtatatatatatatatatatatatatatatatatatatatatttcagttaatattacattatggacaactttgggcattactaaaattttccaagaaccataattttaatgacattaaagtatttcagcttctgcatgtaccctaatttatctggccactttatattgttgagcatttaagtagctttggtttttcactactgtcaataataaagtgtctatttttgaaagccaaaaaacctcctacaaagataacttatattttaatgaatattcttcaattctttgttcta

SEQ ID NO: 60321 - DNA, 1086 bp, Homo sapiens
ctagtatgcagctacaaaaaggaacaatatcatgtcctttgcagcaacatggatgcggctggaggccatgttcccaagtgaattaatgcagaaacagaaaaccaaatactatatgttttcacttataagtgggggataaacaatgggtactcatagacataaagatgggaacaatagacactggggactactaaagggggaaggagggagatgggctagggttgaaagactacctattggatactatgctcactacctgggtgatgggatcattcatatctcaaacctcagcatcatgccatatagcaggtaacaaacctgcacatatacccccctgaatctaaaacaaaagctgaaattatattaaaaaatgtattgctcttaagtctgagaactggttacatggttctgtgttttattataagacacagaactttatttttttaattacacaggtaaaacatgtccaaatatatgtggaaaacatgtatttaaacatacccaaatatggaaaatacggaaaatatttgggtatatatccatatatacttaaagtattcacgtgtgtgtgtgtttatgtatatacatatattttaaaattagaaccattaaacctgaaaacatgttgtcataaagctttccttctaacaacagagatagctctgtctctctttctctctcaagtagcttcttctttctataaaagatacttcccttctcatcacaggtgtattagcgttcaaagggcaactgtccaagcccttggcaactgtccaaatgtgtgtgtgtgtgtatrtatatatatatatatatatatatatatatatatatatatttcagttaatattacattatggacaactttgggcattactaaaattttccaagaaccataattttaatgacattaaagtatttcagcttctgcatgtaccctaatttatctggccactttatattgttgagcatttaagtagctttggtttttcactactgtcaataataaagtgtctatttttgaaagccaaaaaacctcctacaaagataacttatattttaatgaatattcttcaattctttgttcta

SEQ ID NO: 60322 - DNA, 1086 bp, Homo sapiens
ctagtatgcagctacaaaaaggaacaatatcatgtcctttgcagcaacatggatgcggctggaggccatgttcccaagtgaattaatgcagaaacagaaaaccaaatactatatgttttcacttataagtgggggataaacaatgggtactcatagacataaagatgggaacaatagacactggggactactaaagggggaaggagggagatgggctagggttgaaagactacctattggatactatgctcactacctgggtgatgggatcattcatatctcaaacctcagcatcatgccatatagcaggtaacaaacctgcacatatacccccctgaatctaaaacaaaagctgaaattatattaaaaaatgtattgctcttaagtctgagaactggttacatggttctgtgttttattataagacacagaactttatttttttaattacacaggtaaaacatgtccaaatatatgtggaaaacatgtatttaaacatacccaaatatggaaaatacggaaaatatttgggtatatatccatatatacttaaagtattcacgtgtgtgtgtgtttatgtatatacatatattttaaaattagaaccattaaacctgaaaacatgttgtcataaagctttccttctaacaacagagatagctctgtctctctttctctctcaagtagcttcttctttctataaaagatacttcccttctcatcacaggtgtattagcgttcaaagggcaactgtccaagcccttggcaactgtccaaatgtgtgtgtgtgtgtatatrtatatatatatatatatatatatatatatatatatatttcagttaatattacattatggacaactttgggcattactaaaattttccaagaaccataattttaatgacattaaagtatttcagcttctgcatgtaccctaatttatctggccactttatattgttgagcatttaagtagctttggtttttcactactgtcaataataaagtgtctatttttgaaagccaaaaaacctcctacaaagataacttatattttaatgaatattcttcaattctttgttcta

SEQ ID NO: 60323 - DNA, 1086 bp, Homo sapiens
ctagtatgcagctacaaaaaggaacaatatcatgtcctttgcagcaacatggatgcggctggaggccatgttcccaagtgaattaatgcagaaacagaaaaccaaatactatatgttttcacttataagtgggggataaacaatgggtactcatagacataaagatgggaacaatagacactggggactactaaagggggaaggagggagatgggctagggttgaaagactacctattggatactatgctcactacctgggtgatgggatcattcatatctcaaacctcagcatcatgccatatagcaggtaacaaacctgcacatatacccccctgaatctaaaacaaaagctgaaattatattaaaaaatgtattgctcttaagtctgagaactggttacatggttctgtgttttattataagacacagaactttatttttttaattacacaggtaaaacatgtccaaatatatgtggaaaacatgtatttaaacatacccaaatatggaaaatacggaaaatatttgggtatatatccatatatacttaaagtattcacgtgtgtgtgtgtttatgtatatacatatattttaaaattagaaccattaaacctgaaaacatgttgtcataaagctttccttctaacaacagagatagctctgtctctctttctctctcaagtagcttcttctttctataaaagatacttcccttctcatcacaggtgtattagcgttcaaagggcaactgtccaagcccttggcaactgtccaaatgtgtgtgtgtgtgtatatatrtatatatatatatatatatatatatatatatatatttcagttaatattacattatggacaactttgggcattactaaaattttccaagaaccataattttaatgacattaaagtatttcagcttctgcatgtaccctaatttatctggccactttatattgttgagcatttaagtagctttggtttttcactactgtcaataataaagtgtctatttttgaaagccaaaaaacctcctacaaagataacttatattttaatgaatattcttcaattctttgttcta

SEQ ID NO: 60324 - DNA, 1086 bp, Homo sapiens
ctagtatgcagctacaaaaaggaacaatatcatgtcctttgcagcaacatggatgcggctggaggccatgttcccaagtgaattaatgcagaaacagaaaaccaaatactatatgttttcacttataagtgggggataaacaatgggtactcatagacataaagatgggaacaatagacactggggactactaaagggggaaggagggagatgggctagggttgaaagactacctattggatactatgctcactacctgggtgatgggatcattcatatctcaaacctcagcatcatgccatatagcaggtaacaaacctgcacatatacccccctgaatctaaaacaaaagctgaaattatattaaaaaatgtattgctcttaagtctgagaactggttacatggttctgtgttttattataagacacagaactttatttttttaattacacaggtaaaacatgtccaaatatatgtggaaaacatgtatttaaacatacccaaatatggaaaatacggaaaatatttgggtatatatccatatatacttaaagtattcacgtgtgtgtgtgtttatgtatatacatatattttaaaattagaaccattaaacctgaaaacatgttgtcataaagctttccttctaacaacagagatagctctgtctctctttctctctcaagtagcttcttctttctataaaagatacttcccttctcatcacaggtgtattagcgttcaaagggcaactgtccaagcccttggcaactgtccaaatgtgtgtgtgtgtgtatatatatrtatatatatatatatatatatatatatatatatttcagttaatattacattatggacaactttgggcattactaaaattttccaagaaccataattttaatgacattaaagtatttcagcttctgcatgtaccctaatttatctggccactttatattgttgagcatttaagtagctttggtttttcactactgtcaataataaagtgtctatttttgaaagccaaaaaacctcctacaaagataacttatattttaatgaatattcttcaattctttgttcta

SEQ ID NO: 60325 - DNA, 1086 bp, Homo sapiens
ctagtatgcagctacaaaaaggaacaatatcatgtcctttgcagcaacatggatgcggctggaggccatgttcccaagtgaattaatgcagaaacagaaaaccaaatactatatgttttcacttataagtgggggataaacaatgggtactcatagacataaagatgggaacaatagacactggggactactaaagggggaaggagggagatgggctagggttgaaagactacctattggatactatgctcactacctgggtgatgggatcattcatatctcaaacctcagcatcatgccatatagcaggtaacaaacctgcacatatacccccctgaatctaaaacaaaagctgaaattatattaaaaaatgtattgctcttaagtctgagaactggttacatggttctgtgttttattataagacacagaactttatttttttaattacacaggtaaaacatgtccaaatatatgtggaaaacatgtatttaaacatacccaaatatggaaaatacggaaaatatttgggtatatatccatatatacttaaagtattcacgtgtgtgtgtgtttatgtatatacatatattttaaaattagaaccattaaacctgaaaacatgttgtcataaagctttccttctaacaacagagatagctctgtctctctttctctctcaagtagcttcttctttctataaaagatacttcccttctcatcacaggtgtattagcgttcaaagggcaactgtccaagcccttggcaactgtccaaatgtgtgtgtgtgtgtatatatatatrtatatatatatatatatatatatatatatatttcagttaatattacattatggacaactttgggcattactaaaattttccaagaaccataattttaatgacattaaagtatttcagcttctgcatgtaccctaatttatctggccactttatattgttgagcatttaagtagctttggtttttcactactgtcaataataaagtgtctatttttgaaagccaaaaaacctcctacaaagataacttatattttaatgaatattcttcaattctttgttcta

SEQ ID NO: 60326 - DNA, 617 bp, Homo sapiens
tgagtctcttcagctcctgtttttacgcagttgctgtacaaaaggggaacgaaagtaggggcatgtttttatttaaagctggttagatactttttcagagaagtcatgtgacaggttttctgatttttgtattatgtgaaacaacaatttttgtgtttcttgcaggagataatcttggccaacagtacaatagcccacaagaagttattggyaaacgaggttccgatatcatcattgtaggtcgtggcataatctcagcagctgatcgtctggaagcagcagagatgtacagaaaagctgcttgggaagcgtatttgagtagacttggtgtttgagtgcttcagatacatttttcagatacaatgtgaagacattgaagatatgtggtcctcctgaaagtcactggctggaaataatccaattattcctgcttggattcttccacagggcctgtgtaagaatgggttctggagttctcatggtctttaggaaatattgagtaatttgtaatcaccgcattgatactataataagttcattcttaagcttgctttttttgagactggtgtttgttagacagccacagtcctgtctgggttagggtcttccacatttga

SEQ ID NO: 60327 - DNA, 933 bp, Homo sapiens
tgcatgagggagctctatagaggataaacatacttctgaatcagcaacgagttcttgggtcccagtgaaaagaaacatgtttaaccaggaataataaaaaaaatgtggcttggcatgrtgcatcattatattactcctatgaaaccatatagatgtcatagagtaatcagtggagcctacactagaatataaatttcacacaaaaaagcgatttttgtcctttattcactgaggtatcccaagtgcataggagaatatttaacatttaataaatattcattaaatatttgttgaaagaatgaggagagaaaggagatagaatataatgtttattaatatagttatgagcacttcacaatgtgccatcttcgtgaatcccaacacaatccttatggaagaaccatgaaattaccttttaacaaaaaagataattgaggctcaaaatgatgagtttaattacccaagggctcacaactggcagccagcacatatggcaatgaagttatattcaataggctgcggaataatacaccagcaaccgtatcagctactcataaaatgtgcctagaaagggtaacagttggatattatgtgtgcataggagcctcctccatggacagcccataattgtaggatcaagagagattaattactgtcgatgggaaaccacagatttaatcacctgccaagattcacttctagaaggggtcaccagtaaaatatgtcattcaggttacctgttgacaggtacaatgtttaaagaaaactttacatggctgtgttagggaaagcattattacttgatggtcactgtattcattttctatcggtactataacaaattactcacaaatatagtggcttaaagaacacaaatttattatcttagagttctgtaggccagaagctcaatgtgggtctcaccagtttaaa

SEQ ID NO: 60328 - DNA, 1301 bp, Homo sapiens
ttaatacctacaatattccaggcacatttaaaacattgttaatgctaaaaataataaaaagaaaaattattattcccattttaaagaggagaaaattgaggctcagtgataaatttatgcaaatttacaaggatgattctgaacttttctaactataaattatacttttttttggttaaaacatcttttgtagcatatagaataattctgggggtggagaaaagtgacaacctaatgggcttttctcatatctagagcttgtaaagtttgttagtaattgtgtaataagtcctttttctgagctaaatccttgaatcccattttctaatagaaagtctcatttgtgaagaaagattgccagatgtcttgatttgggtctctgggaaggatctctcttgactatagagctgtacgtttcggtacagtaatttttatatttcaaagtccttaatgatatgtagccttctgctagtaactgaagtggcggtctgtcaccctgctgcttctgctcactgtctgcctgacaactaggatagaaaagagctatctgctctgccacttctgctcccaggagtccacaactatgctacctaatctgaatgccatgcttcagtaacttcttaagagggttcttctgcccactcagcttatgttccctaaataaatggcagctgcttgggaggccagctatcatcagttctctatgcagggccctctcggtggacttactctgcagcatatatggattcgggaatgatagatgcctaccttactgatgcttatgccatcacacagttcaaagatgagtcactgacaccacttgtggargtattgacaaaaccatcacattagcctgcctgagtttttcacaccacagaagatacctttatagaatcagtatagtgagtatttgaggagtaatgtgcacaattaattttgtgacagcgaaggaaatcacaagttcagaagaactttgcttcaatattaattttaaaattcattgtcattattaatttcagtggctttccaaacatatattcataaaagcatttccatcattctagttagaaattactttgggattcagagatctttattccattagcttagattttgtgatcattagtggcaaaagtgaactaaacagatgtactaatcctaatgctatatttccttttcaatttctggttcagtggaggtttctggcagctgtttttatggacaagactaaaattctccagagacatgctatttatatttagtataatgtatacacgtttagataccctatgaataagtat

SEQ ID NO: 60329 - DNA, 601 bp, Homo sapiens
ccagctaattttgtatttatagtagaagacagggtttctccatgttggtcaggctggtctcaaactcctgccttcaggtgatccgcccacttcggcctcccaaagtgctgggattacaggcatgagccacctcgcccagcccctatatcagttttttaaatgaccaatcccccagtggttccctttattttttaattggcatataatatgagttacatcattttaattaaraatacaattaaatttctgtttttttgtttggacaaacattttgtttaatatcaactgttgggaaagattttaactcatatccttttcagaaacagtcataaatattaatatgtagatcttatgtttctttaagcttattttaggaatttgatagagccattattgaatgttccagttatgttacacatcctttgctgttctttgttaaagcaacaaatgattctttattatttattgacaaacccttgaacttttaaaagtcttgaactatgtcttgaggtctttgagatttaaatttttttaatattgcagcatttttatttcacccaattcaactttcaaagctagcaagatcttgaaaatctcaaaa

SEQ ID NO: 60330 - DNA, 726 bp, Homo sapiens
agcatgctgtatttcccttctcacattgctggtagaatgttttaaatcatactttctagcatctaccagatggtaaagtctgtagcrtcaatggtttaccatcatttgcacttaaccaagtgcttgaaatattttatggactcaataaatatgtgttaaataaagaatgaggaatgaatcttaacaatgtattttcaataaattattcatctattttgctcaaatagctatcttgctttataatattgaaattaagctgaatactaataattagttttctatattaattaatcaccttttaaaacgagacaatagcagaatttcaaatatcaaaggcatggttggctgatagaagaaaaaaacagtttgaatttggttaattaagataatgttgaaattttataataaactattctcatttaatgaaataaacatatgaaaacactctctgtgcctggtagcatgtttggcactacaatgtttacagacattaattttgtaactgttttgctccacatcacctactcagtctattccggatacattaggctgttttctggcccttatcttaccaaggcatactcccttcctagagttttgtgctagctgttctctctagctctttcctctgcatggaaggctaattctttcacttcattcatgtatttactctaataccatctctctgaggcctaccttaaccaacctacttaaaatcgtaaggtg

SEQ ID NO: 60331 - DNA, 726 bp, Homo sapiens
agcatgctgtatttcccttctcacattgctggtagaatgttttaaatcatactttctagcatctaccagatggtaaagtctgtagcatcaatggtttaccatcatttgcacttaaccaagtgcttgaaatattttatggactcaataaatatgtgttaaataaagaatgaggaatgaatcttaacaatgtattttcaataaattattcatctattttgctcaaatagctatcttgctttataatattgaaattaagctgaatactaataattagttttctatattaattaatcaccttttaaaacgagacaatagcagaatttcaaatatcaaaggcatggttggctgatagaagaaaaaaayagtttgaatttggttaattaagataatgttgaaattttataataaactattctcatttaatgaaataaacatatgaaaacactctctgtgcctggtagcatgtttggcactacaatgtttacagacattaattttgtaactgttttgctccacatcacctactcagtctattccggatacattaggctgttttctggcccttatcttaccaaggcatactcccttcctagagttttgtgctagctgttctctctagctctttcctctgcatggaaggctaattctttcacttcattcatgtatttactctaataccatctctctgaggcctaccttaaccaacctacttaaaatcgtaaggtg

SEQ ID NO: 60332 - DNA, 1097 bp, Homo sapiens
tttcaaaaatatgtatctgacacaagcttcacagctcacatgttaaagtctttgataaatagtttaggatactactcagactttccagcaggagcaaatggactgtgttcttggastcttcaaccatccactgtgtacttgaaccaattcatttgtatacccagttattttattaatttagacttgaaactttagttacttagttgttcaaacttaaagggctgcaataattattttctgatcaaaatgagctattatccacaaatataattaagaattgatattttaaattatctcttatacagtctggtgtgtgtttacgtataacagctaagttgacagttttaatagaactgagaagttcaaaatacagattattcaactaatttttttctttccctgaatgaacttgtctctgaatgaagctgactgattaaaccagtgttttcatgtaattattttcaagttctatatttattttatacacacacattatatatatacacacacacatatacatatatatatatagagagagagagagaaaggatttgattcaagaacacacatcattttcacctcctcagaagtgaaatcctcaagtatttttaggattttaataagtaaggaaagcaataactagatatggatccatgcagtggtttcatgtgtaattccattcataccgaatgccaaacagaatctgggaggctgctgatactacatcaacatctgtgaactgatccacatactcatggaaaagaatggacagcaatattcttcagattatcttttctatctgtctagtcaattttctctgctgtgtctggctgtgctgctactaatttactcttatattgtttaaatgatatacattctagtactcaagagaggctcagcaaccacattttgtgggtttccattccacaccatatttcagctgttatatatttcttaaagaaaaaacgatctttatgtccaactaaaagcttctctttcagaaacaggagatgttaactcaatttacaatgattaggtcccttaaactgtgtttctattttttttcctgttgagtacatttaaagtctctagtttag

SEQ ID NO: 60333 - DNA, 1129 bp, Homo sapiens
agagcctgggacaagggccaagccgtgtgactccaaatctcatgcccagtattgaaagggaaaagaaatgagcttaagaatcagaaaaatctctgattcctaagacagaagcttttttagctaaggtagaaaaaaattatttaaaacttagccctcagagatttcacctgtgatatagggatagtaataacgtaaccccaaagagtttttggtgagaaacaaattggataaggtataaaacygtgattttagaccataaagagtcataaaattttgatcattacttctacgtctttttgatcttctgagaaaacatgtttcggttgctatatcatgtttctaactacaggatatacaacgaaagttttaaacacaatctacttccatttttgtttcccgctataagtttttcctccaaactgcaaaattacatgagctataactttactcaagacaaagttatgatgacccatatttctgtatagggaaaagggataatgctaagtggcatttttctagaaaagaatcaagtgattttcatttaacaaaagcatttatttaagatgagatgatgtgtatcttatgctttcagtttataggggtgactttcacaagtaaattatcattctacatttattttatacaaataatttttttttttttaaacagggtctcactctgtcacccaggctagaatgcagtggcatgatcatggctccctgcagcctcgacctctcaggctcaggtaatccttctacctcagcctttggagtagctgggaccacaaattagccagcatgcctggctaactgttatttttttgtagagacagggtctcgccatattacccaggctggcctcaaactcctggcctcaagcaatctacccacctcagcctcccaaagtgttgggattacaggtgtgagccaccacgcacagcctgacatttttaatgtaacatttattgcatcctaagtggcctttatatagaaacctcataaactatatatgctttctttaacactattataaatagctctgaaattacaaaaagctatcaaaacaatttttaaatacctgtatttctactgatcagcaatagctgcctttagcattttggtttttgtct

SEQ ID NO: 60334 - DNA, 1129 bp, Homo sapiens
agagcctgggacaagggccaagccgtgtgactccaaatctcatgcccagtattgaaagggaaaagaaatgagcttaagaatcagaaaaatctctgattcctaagacagaagcttttttagctaaggtagaaaaaaattatttaaaacttagccctcagagatttcacctgtgatatagggatagtaataacgtaaccccaaagagtttttggtgagaaacaaattggataaggtataaaaccgtgattttagaccataaagagtcataaaattttgatcattacttctaygtctttttgatcttctgagaaaacatgtttcggttgctatatcatgtttctaactacaggatatacaacgaaagttttaaacacaatctacttccatttttgtttcccgctataagtttttcctccaaactgcaaaattacatgagctataactttactcaagacaaagttatgatgacccatatttctgtatagggaaaagggataatgctaagtggcatttttctagaaaagaatcaagtgattttcatttaacaaaagcatttatttaagatgagatgatgtgtatcttatgctttcagtttataggggtgactttcacaagtaaattatcattctacatttattttatacaaataatttttttttttttaaacagggtctcactctgtcacccaggctagaatgcagtggcatgatcatggctccctgcagcctcgacctctcaggctcaggtaatccttctacctcagcctttggagtagctgggaccacaaattagccagcatgcctggctaactgttatttttttgtagagacagggtctcgccatattacccaggctggcctcaaactcctggcctcaagcaatctacccacctcagcctcccaaagtgttgggattacaggtgtgagccaccacgcacagcctgacatttttaatgtaacatttattgcatcctaagtggcctttatatagaaacctcataaactatatatgctttctttaacactattataaatagctctgaaattacaaaaagctatcaaaacaatttttaaatacctgtatttctactgatcagcaatagctgcctttagcattttggtttttgtct

SEQ ID NO: 60335 - DNA, 705 bp, Homo sapiens
ccaggatggaaagatgaaagaactgagaaatgggtcaaaaataaaatgtcagcaaccattcttgaaatgaaaaaaggatgactgtggaaggggaagaaaggagttcagggagcatgaaggaggggtaaaggagtgataaaaggaaaatacatgtaagcaaaaatgagaaggtaaaaagtgaattattaaggaaagaagatgatacatacaaggacagattaatgaatgaaaaaaatcatataccttctaagcctgcaaatatgaattttgctaaccttggatgccataaataggaattccaacaacctcaacagtccaaattggcgatttcacttagtcatttttttctacagtaycaaaatagcaatttattcggacctaatagaagatcttgctgatgtagtagttgagcttggtaggtggtattcttctggtaagacatgaagattatcctagatgagtagtaaagcatcttctagaaatgtccagaccagagagagaccttagaaacaaagggagtcactatcactctccattgttttggccttgaattcaacttctctatcaccaaaaatgattggactcgaggccctatttcagggactgagtttagtcagaatgttttctcaattagcaaaaaatgcagtgtctgacagctagtcccttgcagactacacacctcaacagcgtgatttaaaggcaaaa

SEQ ID NO: 60336 - DNA, 744 bp, Homo sapiens
gaatagatttcagttaagactagattttatagctgcctactagatatgtacatagacgtcccacaagaaattagaacttacgtgttccaaaacaaagttatcatctgtcctccacacaacctatccaacctccttgctcagttgcttttgtaagcacttgcattagttagaacattagtttcagctcctttaacaaagactccaaaataattgtgacttaaacaagataagttctaattgttatctcacataaaagcataagcctaggcaatgcagggctgatacagtggctccacgtaaggagacgctacttgacctccttacatcttgttgttctcccattttcaacatatggcgtcctttccacggtctaatataagtgctccaatttctgccattatgtccgcattctaactagcaggaaaagggaaaaggggaagtgaagggcatacctcttctttagcagagcagggcacagaaggcaaacattttactctcacatctcactggctagaacttggccacatagccataccgagctacagggtaagtttcaaactgccctctttgtctgggcagctttgtggcctgctaaaattcggggattttattacaaagaggagtgggatgatatatagtgtggaatarccactggttcttttcagatgcagttccttaaatgctttcgctctccttcctctacttcacggctgctactgccttgttaatgtatatttattcttt

SEQ ID NO: 60337 - DNA, 744 bp, Homo sapiens
gaatagatttcagttaagactagattttatagctgcctactagatatgtacatagacgtcccacaagaaattagaacttacgtgttccaaaacaaagttatcatctgtcctccacacaacctatccaacctccttgctcagttgcttttgtaagcacttgcattagttagaacattagtttcagctcctttaacaaagactccaaaataattgtgacttaaacaagataagttctaattgttatctcacataaaagcataagcctaggcaatgcagggctgatacagtggctccacgtaaggagacgctacttgacctccttacatcttgttgttctcccattttcaacatatggcgtcctttccacggtctaatataagtgctccaatttctgccattatgtccgcattctaactagcaggaaaagggaaaaggggaagtgaagggcatacctcttctttagcagagcagggcacagaaggcaaacattttactctcacatctcactggctagaacttggccacatagccataccgagctacagggtaagtttcaaactgccctctttgtctgggcagctttgtggcctgctaaaattcggggattttattacaaagaggagtgggatgatatatagtgtggaatagccactggttcttttcakatgcagttccttaaatgctttcgctctccttcctctacttcacggctgctactgccttgttaatgtatatttattcttt

SEQ ID NO: 60338 - DNA, 621 bp, Homo sapiens
accgtcgctcatctcgtaaaagcctggacggagcagacaaggcaggtcagtgacccccatccagaaragcccagggccccctctcctcctgagcttgtcacggcacaggtgggcccaggggaacccctgagctgaggctaccggaggctgtgtgccatcgtccacacggccggcctgggagagagtggctcaggtgagaatgttcaggattcttcccaggagctgccagtgggttggtcagagcccactccacctgcactctgcagccctggccctccctcttcctggcaagtggtgcctttagtcctgggtggtcgatgcctgcctaagaggtggcctcttcctctggatttcagcccttttaggacaggcctctggcccctgtctctctctttcttccctggtgcctgccaagttgaggagaccagtctggggaggtgcttcagccacaggcctcctgagtgcaataacgtcacttagaccacaatgtgatttttgcaaattaaaaaaataagagcgaggtagccaattaatatatatgccctgagaaaggcttcagtgttgcctcctaactttcagatcagcctgacgaagcggccatctccctgcacggacactagg

SEQ ID NO: 60339 - DNA, 576 bp, Homo sapiens
actcaggggcctcccaacaacctccaaagtttgcacagtgacagaatctgaagccataatatttttttttagacggagtctcgctctgtcctccaggctggagtgcagtggcgcgagttcagctcactgcaagctccacctcccgggttcaagccattctcttgcctcagcctcccgagtagctggtacaggtgcctgccaccatgcccagctaagtttttgtatttttagtagagacggggtttcaccatgttagccacgatggtctcgatctcctgacctcgtgatccgcccgcctcagcctcccaaagtgctcggattacaggcatgagccaccgcgcccggcctctgaagccataatattatctgtgaatgtgaacatggcaaaaaccaatcctgaatttaatcaaaatgttatgcttccagaaccacccagcttcacgtaaacatactggctccttaccctgcacayttttacacaggtaaaccactatccaagtgaatagcaccacccgccaagcctgagcagcacacacaggcgggctctcccacaccagctatgcaaagaggaagcct

SEQ ID NO: 60340 - DNA, 852 bp, Homo sapiens
ggagttaggcacaggaacaagaatcaaacgggcagtgaaatgacccatcagagttgacagcttttagcttcagattcaatagtttacatgtgaaatttatagaaaccacaaaatcaacatgaaaagattcttttgcatggccatcagaagatgaatccatatcatggtatttaagtagagtttgagattagttgtgactcgtaaagactctctgggagtcctgtgggcaggtctcttgacctgaacatacatgtgatacgtaagatacaattttactaatgataaactattggaatttcttcaggggcatctcataaaagcaatgccattttccctattctgctaaattatgttatagaatctagcctgtgctcaggactaaggggttggtggaaggtgggttcccaccaccctctgagatcatggggccagtatctggaccaaggctagagaacaatgaatgtgaatagcccccatgtggactgtgtgcacatcacacccctgagagcatctgagtaacagaartatagtgatccttccccccagagccacttaatatttaagttttagaaatttctcctgaataatatctagtcataagagggaaagaaacaggtctcattgctaagccatgtgtggtttaataaaaccactaatttgaccagcagtcaagcaactggatataccctgcttcagagccaagccctgtgtctgacatacagtaagtgttcaaaaaataattattaaatggaggaatgaatggtttggtggcaccgatctagatattttgatgaatgtatcacataatctttctctgctgaagagatcttcaaaccaggaagtttgggaatt

SEQ ID NO: 60341 - DNA, 651 bp, Homo sapiens
ctctgaaattgatccagtacaatggaaaaactactggtctagaaggaaaaagaaaaataacatttatggacaactaggcactttacatatattaatttatttaatttctacactctgaattagatactattatctctattttacagatgaagagatgcgggcttgcaaargtcaaataacttgctgaaggtgccccagctcgtgagaggccaggtttgaatctagatgaaccagaccctaaaactctctctctgcctcttattccatgctgttcccccagtcagaagacccgggtaccctcccaggtctgtcactttctcttctctctgaggcagtttcttcattgattaaaaaagcagaaaaaaagatgtgggttatgcgtggggatgtggatacaaatcttttttcatcacagattggtttgaggctgagataaggccattatgcctacagaagagcactttgaaaaccatgaagagatatccaagaatgaagattagcaaaggctagaccttagagataccgtgtgaagatacagacatactccagctgcagttcctccccggtctgtacacctggcccattgcctctgcgttgatgtcagctgtaagcatgcacagttcagctgttggttcccattccatggatcca

SEQ ID NO: 60342 - DNA, 623 bp, Homo sapiens
  misc_feature (1)...(623): n = A,T,C or G
attactccaggctctgcacaaaaccacaacagcagacaggaggcttcgaacacatgcacattaagctaactccagaatgagacactaagaagcagctgcaactgcattttcctctgaccaccccctttagaaaatgatatgctttacatccacacagaaatatagcagctgattctaatcaaaagatgcctaagccactaacagtttcaggtgtgtttattacccctsgaggggaataatagaggactcggcagcactgggcaaagctggaaatgtaatcttctggaaaaatgtcatgttcaagataaagtcacacttcataagacaactaatagctttagattcacatatttaaagagaatgtggtaattgtatgataaaatattagcaaacctcaaaaaatagagataaaaatgctaagcatgttaagagaatagaagattatggcaccagcagattggattttgatttgctttttagtcacccaaaagttatcacccttggatgtgttttaaattcatcaacgttcaaatcatgcagtnaagtcgagttgagcagtgagagtacatacctgtggccgtgctcagcaggatagctgtgcacctcaggaagtactgtcatct

SEQ ID NO: 60343 - DNA, 2032 bp, Homo sapiens
gggatatttggtgatgtctgcagacatatttggttgttacatctgggagtgagaggcatactattggcctctagtgggcagaggtcacggatgctgctaaatacctcacagtgcataggctacccccattccccacaaacaaagaatcagctggcccaaaatgtcaatagttctgggttgttaactctgctaagggctgagagtaacgcaccctgtgagaactgctggccagaacaaatcctacgtgaagttaactccataagtcactgtgagtaactcacatgagtccatgtgagttaactccatggcgtcctggagatgtggtgctctccccaaggctgtgaaatttccccatagaccctgcctgtggattgcatcctgcagacttccagggaggaagcatgtgcaccacgagagagccaccagacccacaccaggcaagatcaacaatccagagatgttcccatgtcttctaggaaaggacacaacccagagggcagagctgcattcgtaactggttgttatcagccagctgaggccctggcagccttgaagtagccaagcatataatgatgtggatgtgaaagcccatactgaaggccctgaaggtccagaaccatggggttctcacctcccaaagcccttcctagtcatcaggagagaccctgtttgcaaaatatttactcaaggcttaattactaataaatccctgtgtggagccattccatggagagactgcaccacagtgtggtctggtaatcaatgccgcatgcatgcactcatcagaggggacatatgggtrgagagagcaggcccagggaccacaggaatctctctccttccttctgggctcctctctaatgagggccctgttggcatgctaatcagtatgggatccctggaacttagggagagcactgccctgttgagttcctgctcctgtctacccagacatgctcaaccttgtagatttcctgcagcctgaaacatcagccctgcttccagccagttgatgtcctgagccttgttttgaagaaggctgaggattacccctgaactggcctcgacccacacaggcccaccatcctgtggcagtcagtgggaatgggctccctaggtacattgttctatttaactctcatcacaagtagggggtatggttttatctttattattctgttgatagaaaatacaacactgaggttacttgactcttcccaaatcatatagctagaaaacaggagaacgggtctactcaccaatgaaattaaacactttgttttttggcacacatgagccatgtactgcaaatggattccaatagggaggagaggacagatttaaaaagcaaataattatcacaccatacacaggggctcatgactgggctctgctccattcttaaacccagtgttcttctgtaccccctatactgaaccatccttcattggtaatccaggtgggagatagtagtgacttagaccagggtgtacatggtgcagagtcatcagattcttgtaagaaacaatcaattcttatattattaaagttactccagataaggacaataggagaaaagaaatgtatagtcttattttatgtattaatgtagaaacaaaatcctacacaaaatattagcaaactaaaaccaacagtgcattaaaaatatacaaggaaccccttgtagataaataagaaaaacagcaacctcaatagaaaaatagtcaaaggatgtggacatataatttatgaaagaggaaatcaaaagcatctgaggaaatgctcaaaattattactaatcaaagaaaggcaaatacaaaataaggataatgccaaatattggtggatacttagggaggggaagccttgggcactgctcccaggagagcagacgtacatgggcattctgtagagtacagctggttcacttaattgagttcaattaagtagatacacactgcatgactcagcaattctatcccttgctatgcagtccaaagaaatccttacacagctccccaagggacatgca

SEQ ID NO: 60344 - DNA, 2032 bp, Homo sapiens
gggatatttggtgatgtctgcagacatatttggttgttacatctgggagtgagaggcatactattggcctctagtgggcagaggtcacggatgctgctaaatacctcacagtgcataggctacccccattccccacaaacaaagaatcagctggcccaaaatgtcaatagttctgggttgttaactctgctaagggctgagagtaacgcaccctgtgagaactgctggccagaacaaatcctacgtgaagttaactccataagtcactgtgagtaactcacatgagtccatgtgagttaactccatggcgtcctggagatgtggtgctctccccaaggctgtgaaatttccccatagaccctgcctgtggattgcatcctgcagacttccagggaggaagcatgtgcaccacgagagagccaccagacccacaccaggcaagatcaacaatccagagatgttcccatgtcttctaggaaaggacacaacccagagggcagagctgcattcgtaactggttgttatcagccagctgaggccctggcagccttgaagtagccaagcatataatgatgtggatgtgaaagcccatactgaaggccctgaaggtccagaaccatggggttctcacctcccaaagcccttcctagtcatcaggagagaccctgtttgcaaaatatttactcaaggcttaattactaataaatccctgtgtggagccattccatggagagactgcaccacagtgtggtctggtaatcaatgccgcatgcatgcactcatcagaggggacatatgggtagagagagcaggcccagggaccacaggaatctctctccttccttctgggctcctctctaatgagggccctgttggcatgctaatcagtatgggatccctggaacttagggagagcactgccctgttgagttcctgctcctgtctacccagacatgctcaaccttgtagatttcctgcagcctgaaacatcagccctgcttccagccagttgatgtcctgagccttgttttgaagaaggctgaggattacccctgaactggcctcgacccacacaggcccaccatcctgtggcagtcagtgggaatgggctccctaggtacattgttctatttaactctcatcacaagtagggggtatggttttatctttattattctgttgatagaaaatacaacactgaggttacttgactcttcccaaatcatatagctagaaaacaggagaacgggtctactcaccaatgaaattaaacactttgttttttggcacacatgagccatgtactgsaaatggattccaatagggaggagaggacagatttaaaaagcaaataattatcacaccatacacaggggctcatgactgggctctgctccattcttaaacccagtgttcttctgtaccccctatactgaaccatccttcattggtaatccaggtgggagatagtagtgacttagaccagggtgtacatggtgcagagtcatcagattcttgtaagaaacaatcaattcttatattattaaagttactccagataaggacaataggagaaaagaaatgtatagtcttattttatgtattaatgtagaaacaaaatcctacacaaaatattagcaaactaaaaccaacagtgcattaaaaatatacaaggaaccccttgtagataaataagaaaaacagcaacctcaatagaaaaatagtcaaaggatgtggacatataatttatgaaagaggaaatcaaaagcatctgaggaaatgctcaaaattattactaatcaaagaaaggcaaatacaaaataaggataatgccaaatattggtggatacttagggaggggaagccttgggcactgctcccaggagagcagacgtacatgggcattctgtagagtacagctggttcacttaattgagttcaattaagtagatacacactgcatgactcagcaattctatcccttgctatgcagtccaaagaaatccttacacagctccccaagggacatgca

SEQ ID NO: 60345 - DNA, 2032 bp, Homo sapiens
gggatatttggtgatgtctgcagacatatttggttgttacatctgggagtgagaggcatactattggcctctagtgggcagaggtcacggatgctgctaaatacctcacagtgcataggctacccccattccccacaaacaaagaatcagctggcccaaaatgtcaatagttctgggttgttaactctgctaagggctgagagtaacgcaccctgtgagaactgctggccagaacaaatcctacgtgaagttaactccataagtcactgtgagtaactcacatgagtccatgtgagttaactccatggcgtcctggagatgtggtgctctccccaaggctgtgaaatttccccatagaccctgcctgtggattgcatcctgcagacttccagggaggaagcatgtgcaccacgagagagccaccagacccacaccaggcaagatcaacaatccagagatgttcccatgtcttctaggaaaggacacaacccagagggcagagctgcattcgtaactggttgttatcagccagctgaggccctggcagccttgaagtagccaagcatataatgatgtggatgtgaaagcccatactgaaggccctgaaggtccagaaccatggggttctcacctcccaaagcccttcctagtcatcaggagagaccctgtttgcaaaatatttactcaaggcttaattactaataaatccctgtgtggagccattccatggagagactgcaccacagtgtggtctggtaatcaatgccgcatgcatgcactcatcagaggggacatatgggtagagagagcaggcccagggaccacaggaatctctctccttccttctgggctcctctctaatgagggccctgttggcatgctaatcagtatgggatccctggaacttagggagagcactgccctgttgagttcctgctcctgtctacccagacatgctcaaccttgtagatttcctgcagcctgaaacatcagccctgcttccagccagttgatgtcctgagccttgttttgaagaaggctgaggattacccctgaactggcctcgacccacacaggcccaccatcctgtggcagtcagtgggaatgggctccctaggtacattgttctatttaactctcatcacaagtagggggtatggttttatctttattattctgttgatagaaaatacaacactgaggttacttgactcttcccaaatcatatagctagaaaacaggagaacgggtctactcaccaatgaaattaaacactttgttttttggcacacatgagccatgtactgcaaatggattccaatagggaggagaggacagatttaaaaagcaaataattatcacaccatacacaggggctcatgactgggctctgctccattcttaaacccagtgttcttctgtaccccctatacygaaccatccttcattggtaatccaggtgggagatagtagtgacttagaccagggtgtacatggtgcagagtcatcagattcttgtaagaaacaatcaattcttatattattaaagttactccagataaggacaataggagaaaagaaatgtatagtcttattttatgtattaatgtagaaacaaaatcctacacaaaatattagcaaactaaaaccaacagtgcattaaaaatatacaaggaaccccttgtagataaataagaaaaacagcaacctcaatagaaaaatagtcaaaggatgtggacatataatttatgaaagaggaaatcaaaagcatctgaggaaatgctcaaaattattactaatcaaagaaaggcaaatacaaaataaggataatgccaaatattggtggatacttagggaggggaagccttgggcactgctcccaggagagcagacgtacatgggcattctgtagagtacagctggttcacttaattgagttcaattaagtagatacacactgcatgactcagcaattctatcccttgctatgcagtccaaagaaatccttacacagctccccaagggacatgca

SEQ ID NO: 60346 - DNA, 977 bp, Homo sapiens
tgcatacaaaacaacactattttgcaagaatacgtacaaacagaagcacagaatgacatagggatggttttcatcattagaagggaaccaggagtggggtgtatcwgtgaaagttccagcaggaaacaggtggcacccctaaatgaagataactcaagataagtgtatgtacaaaggtgtgggagggtgtaaggaaactcccagaggtagtatagaaacctggagttaccggaagtagagctgttacttcaacgcagcctgaagggagggaggagggaacagttactacaggaattcaaagggaagagagagttcttgctccaggagagtggtagtggccttcatggttgagggacctagctagggaccttgacctcatctcctctcttccttgtccagctagagctccccatgggccaatccaacagaaagccaaagggcaaggaaagccattgatatagccactcaagcctgcctcttggacagaaagaagtgtgaagaagtgtattgggggattgggtctggagggacaaatggcagctgtgtgactaatgggctatgaggaaaaagggtgctagttaataaaacaatcaaataaatataaacatagagggagggcaaataaagacaattttctacctaagaggaatccaggatcagtggtaaaaaaaaaaaaatgaattttttagaccacatattgatatcctacactgtgtgtttgacacaagtaaatttgttttctatgttcatatttatcatatttaccataaagtttgtcagttaacatgtaaatgaaaacaccagtgatctcaaataatagtaaacttttggaaatgtaaccttcgagtatgcacgtttttattagacttttcagaaatagttacataaatggaatttctgagccaagcttttatataatccttgcagacctgcagcatcccctgggaccctagaggtttagggccacagtttaaaaa

SEQ ID NO: 60347 - DNA, 977 bp, Homo sapiens
tgcatacaaaacaacactattttgcaagaatacgtacaaacagaagcacagaatgacatagggatggttttcatcattagaagggaaccaggagtggggtgtatcagtgaaagttccagcaggaarcaggtggcacccctaaatgaagataactcaagataagtgtatgtacaaaggtgtgggagggtgtaaggaaactcccagaggtagtatagaaacctggagttaccggaagtagagctgttacttcaacgcagcctgaagggagggaggagggaacagttactacaggaattcaaagggaagagagagttcttgctccaggagagtggtagtggccttcatggttgagggacctagctagggaccttgacctcatctcctctcttccttgtccagctagagctccccatgggccaatccaacagaaagccaaagggcaaggaaagccattgatatagccactcaagcctgcctcttggacagaaagaagtgtgaagaagtgtattgggggattgggtctggagggacaaatggcagctgtgtgactaatgggctatgaggaaaaagggtgctagttaataaaacaatcaaataaatataaacatagagggagggcaaataaagacaattttctacctaagaggaatccaggatcagtggtaaaaaaaaaaaaatgaattttttagaccacatattgatatcctacactgtgtgtttgacacaagtaaatttgttttctatgttcatatttatcatatttaccataaagtttgtcagttaacatgtaaatgaaaacaccagtgatctcaaataatagtaaacttttggaaatgtaaccttcgagtatgcacgtttttattagacttttcagaaatagttacataaatggaatttctgagccaagcttttatataatccttgcagacctgcagcatcccctgggaccctagaggtttagggccacagtttaaaaa

SEQ ID NO: 60348 - DNA, 977 bp, Homo sapiens
tgcatacaaaacaacactattttgcaagaatacgtacaaacagaagcacagaatgacatagggatggttttcatcattagaagggaaccaggagtggggtgtatcagtgaaagttccagcaggaaacaggtggcacccctaaatgaagataactcaagataagtgtatgtacaaaggtgtgggagggtgtaaggaaactcccagaggtagtatagaaacctggagttacyggaagtagagctgttacttcaacgcagcctgaagggagggaggagggaacagttactacaggaattcaaagggaagagagagttcttgctccaggagagtggtagtggccttcatggttgagggacctagctagggaccttgacctcatctcctctcttccttgtccagctagagctccccatgggccaatccaacagaaagccaaagggcaaggaaagccattgatatagccactcaagcctgcctcttggacagaaagaagtgtgaagaagtgtattgggggattgggtctggagggacaaatggcagctgtgtgactaatgggctatgaggaaaaagggtgctagttaataaaacaatcaaataaatataaacatagagggagggcaaataaagacaattttctacctaagaggaatccaggatcagtggtaaaaaaaaaaaaatgaattttttagaccacatattgatatcctacactgtgtgtttgacacaagtaaatttgttttctatgttcatatttatcatatttaccataaagtttgtcagttaacatgtaaatgaaaacaccagtgatctcaaataatagtaaacttttggaaatgtaaccttcgagtatgcacgtttttattagacttttcagaaatagttacataaatggaatttctgagccaagcttttatataatccttgcagacctgcagcatcccctgggaccctagaggtttagggccacagtttaaaaa

SEQ ID NO: 60349 - DNA, 1624 bp, Homo sapiens
aaataaccaaaatcagagcaaaattgaaggaggtggagacatgaaaaaccctccaaaaaaatcaatccaggagctagttttttgaaaataataacaaaatagacagacagctagctagactaatagagaaaagaaaggagaatcaaatagacacaataaaaaattataagggggatatcaccactgaccccacagaaatgcaaactacaatcagagaatactataaacacctctatgccaataaactagaaaatctagaagaaatagttaaattcctggacacgtacgccctctcaaaactaaaccaggaagaagttgaatccctgaatagaccaataacaagtcctgaaattgaggtagtaattaatagtctaccaaccaaaaaaagcccagaaccagatggattcacagccaatttctaccagaactacatagaggagctggtaccattccttctgaaatatccaactttttattatgaaaatgtttaaaatactgataagggaacacaaagaaaaatagtacaagtagatttttaaaaattaattttgtttactgaaacatctgaaagtaagctgcaaatgttacgacatttcattcttaaatattttggcatgcatctcttaaaaatgagattcttctataaaaccacaataccactatcacactgaagaaaaattaatgattccatgatatcatctcatcagaatttttcagttgcttccaacataatagcttgtttttttttctaattttgttgccttataatcaggttcacatatttggttattaaatctcttttaacttaaaactgtccttttacttttaaaaaataagttgacatttttgaatgtagttttcttaaacatattctagatttgtcacattctgggtttgtctgactttctcatgacattagagatgctaagtataaacacttgattagggctcagcctaattcctgaaagatactggctcacagtggctgggcatggtggctcacgcctgtaatcccagcaytttgggaggccaaggcaggctcatcacgaggtcaggagatcgagaccattctggctaacaaggtgaaaccccatctctgctaaaaatacaaaaaattagccgggcctggtggcgggtgcctgtagtcccagctacttgggaggctgaagcaagagaatggcgcgaacccgggaggcagagcttgcagtgagccgagatcatgccactgcactccagcccaggtgacagagcgagactctatctcaaaaaaaaaaaaaaaaaaaaaaaaaaagatactggctcacagttacaaatttctaggtaggtatcatttcccccagtactttgaaaacattatttcaacactttcttgatgatttcaagatatttttcttcggtgttctataacttaactatgttgtatctagttgtggggttctttattttcttttctatccattgggtttcttgaatcttaaaatttatcttttcaccactatggaaaattgaaaccattatcttttcaaatattgcctctcctccacctctgacatctagttggatggttttcagacattatggctcagtctttcatgcctgtaatctcacatcttccaactcttaa

SEQ ID NO: 60350 - DNA, 693 bp, Homo sapiens
tacatgtatgtatatataaatctcaaactattaagtctttttgatctttagtttcctgcccaaacctgcaaacacttgtgctcacttgtttcttgagtttttagttaagaattggaaatttagtaaatttaccttgactctattctgaccgtaaaagaagcaattaggctactcttcttcttaggyattctctctctaaattagctcagtggtcacttatgctctagggccattttttttttttttaggaataaactatgtcattaagatggaaaagacttccccagaagcaagctatgttttcagtctctggatcctgaatactcaagcaagtagttaccaaatgctttcaagtccaaaagaggaatggggttgaagggcgtggaaggggaaaaaataatcacatgaatcaaacttagccttatcctctttttttgggttttattttctcattttgactccctcatcccaacatgaaacgttcagaagaaaatatcatttgtattaacacctattgacaggcacaataaaaatttctactttcatcttctacaaaactacaggctgggtgtggtggctcatgcctgtaatcccagcactttgaaaggctgaggtgggaggattgcttgagaccaggagttcaagaccatggcaagaccttatctctactaaaaataagaaaaattagtaagg

SEQ ID NO: 60351 - DNA, 689 bp, Homo sapiens
aagaaaattttttagaactagagaaaatattttccttttgtagttactctgaaaraaaaaatcacaaatgtcttatttacatttataggaggataagttggctaactggatgtgttgacagagcaaaactgcccagatttaaagttttagatcatgcaattaaagtaattttcagacattaaaaatgacagcaagtccttccatttatgacaccacatagtggcaaagttggacaaattattccctatctacatagctcattgttgtacagtaataatgatgaaagctttatgaataagaaatgtttatttcatcacttataatggttacatttttcactagttaactcatttgtaactaatatttattgagcatgtaatgtatgtccaatcctatgctaagtactggagtcaagatagggaagaaaatgaggaaaaaaaaaaaaaaaacccgcagcaagtcaaaaagataaggagtgttgcttcacagagatgaacgtctacaaaaggaagctagcatgaatccaatcatattagttactatacagtaatgtgtgataagcaccatatactagaagtgacttgtttgaaatgtttggcaaatcctgaggggatcagtttatggagaaagaactgttttcgctgagaagtaaaaggcaagtagtagtgagctgggtaaaggtagcaggt

SEQ ID NO: 60352 - DNA, 741 bp, Homo sapiens
ttgtaaattagaaattgctgtcccatcaaataatgggaaatgtctaaattagctttttacaaaattcaaggtggtrattattattctgcttgggcaatgcactggggcttcagaaaaaaacccaccattgggtgcatccaaaccggaggaagctcttccaaagctgattctagcatgaatttttgagtataactcaaagaatatctttaggaatattttcagctgcaaattaaaaagtaataaaaaaatcacaattcacagtaactaaaagaaacagtaatttattttatctcttagcaagaggggcattggctgccgggcatggcacctcaacttgacaaaatcctttacaccttcccttcagcatcaaagcctcatggttacaagatggctgctctagttatagaaatcaagtctatgctcaaggcagaagaagagcgaggttacagaaataatcacatttatctcttttattagaaaagcagaatttcccttagcttccatagtaaactttttatgtcattaagtagagttctgtcacatgaccatccagacatcaagaggaggtagaaaaataagtccctatagtgaaaagtgctgagattaaagcaatttgagaatgatattttgggaagtccaaccagtggtgtctgccacaataaatgacgcgttgatagttttcaacccaagggtttcttagtggtaggaagaacagaggagataaaagagaggaaggatcaa

SEQ ID NO: 60353 - DNA, 722 bp, Homo sapiens
ttctgtttaagagactgcaataaatgaaggagaggaatgaagcaaataaacttggattagctgtctttgttgatatcgtttaggaagaaccgcatgccagtaccctaattaacaaatacatggtgtgatagtttatagttcaaacagtattgtctaaagtcgttttaatctatcaggtttttataggaagataccacaaagacttgatggtacagttacacagatttaattctatgaacataaaaaaattgattttcctgggggcattaagaactgtttttattgattgaatattttacttgcataaatggtagttcttaaaaacagctgcacattttactgttagtatctgaaagttcttaaattgtaggcrtaaatgtttcattttaattgtgcatttccatccttcaacccaagtaacaagaagataatatagagagtgtgtcatactttttctgggtacaaagatgataaagttgctgtccatactctcaaaataacttctttcttattccttttgtttctacctgctctaagataattgactcaatgggactaccctaatactcttgcagaatctaaactagattatactggacattggaagagtttacgtatcagaaaatgccattcctccggacataaggtagtgagataatattttagcttcttcaggaaaactttcctgaaacctcaaagctgaaggatgtcttggaagcatt

SEQ ID NO: 60354 - DNA, 962 bp, Homo sapiens
ctctatgctgaagattatcaacattacgactcaggagccttatgtcaagacacaatactttcgcatttttattaactttgcttaaggctccttcattgaggcataaggtgctccctgccaaaggcccttgaaagctcctaatacttcataaaaattgttaatgctgaacctagaggacaaactacaaatggtagtagaagaggcattaccccttcctttgcaacccaatgttgtagtccttattaaatttctaacgaagtactggcctcaatgtgattttcataacaatctctgaaatcttggctatggaactgctaaggaagaggtgtggtgggtagtagtagctgcaaaagaatgcaggtgccttggaaatgctatggaaaggacagtggctgctaagagtagctgctgcagcatttgcaaactaagtttgggtgacctggtcttacaaccccttcccactacaaagcttatggtatttcattcagwgaaatctccaaataacgggtttctgagtttatatgggctatgtgcagaagccagagaaactcaaatttaaaaaaaaaatgaccagggatgtttttacttaatatctaactgtgtcctggacacagtaccgaaaaagatgtggttgacaataagataagtagccagtttactgcagattcaaattttaatctttaaaaaacactcagcacatagcatttattgtattaaaattacatggatagaatggccttataatttacatctgcagtattgaatagtgataaagagcatggacctttagagtcaaatcgcctagattcaaatcctgcttccactagtagagtgaacaggggcaaatgattgcacttccctaattctccatttatctgagaagcattcataaaaataagttactcctaagggatggtgtgcagattaaatgaaaaaaaatacaaaatgtgcataaatatata

SEQ ID NO: 60355 - DNA, 552 bp, Homo sapiens
tacctgcaaggagctcaccactttgccagttggttgatgatttcatttgtgtcttaggccatttgggctgctgtaacaaagtaccatcgatcggtggcttataaagaacaaatttatttctcacggttcaaaaagttgggggtctgagatcggggtgtcacaatagctgatttctggtgagggccctcttccaggctatagacagatgacttctcagtgtgtcctcacatggaggaaggaaaaagcaagctctctggcctttttttttctttttataagggtactaatctcattaatgagatctccatttccatgacataattagcttccaaaagtctgcttccaaataccatcacgctggcaattagatttcacataggagttttctgaggggagcaggatcattccagtccataactgttagcaaaccatggaggctgcctctggtgggaggagaagattgcaaactttacacagggccagacacacccagtggccacccsctggctccagcaggttggtgtcatgtggaatgcagatagatggttgcca

SEQ ID NO: 60356 - DNA, 673 bp, Homo sapiens
  misc_feature (1)...(673): n = A,T,C or G
caggagtggactctggctgggctgactccaaaacctgtgcttctgagccttgcgccttactgctttgtttaagcactttgtgcaaagaaaatcacctcagtttctagaaaagacaatttaggggcagagagggactcatccccatgtatgagcaatgttcaacactatctactttgattttatttaatagcactttaatcaaggaaacccaaacttattatcacctgcaggtagacaagtagtacattttatagactttctttactgctttttatttgtttttggtttttttttggatttctttttgcttgaagatggataatttcaaactccctggatnaattttccctctgtatatttataattcatgtccacagaatgacattccagtcaacaacaaaccacatacatgaggatgagctcataagattataacacgatatttttactataccttttctatgtttggatatgtttaaatacacaaatgcttatcactgggttgcaattgcttacagtattcagtatagtcacctgctgtacaggtttgtagcccaggagtgatacaytgttccctgtagcctaggtgtgtagtgggctgtaccatcaaggtttgtgtaagtccactgtatgatgttcacacaacaatgaaatcaccaaatgacccatgtct

SEQ ID NO: 60357 - DNA, 811 bp, Homo sapiens
actaacacaaacatgaagacctaaaaaagtaatcatgggccaggmgcggtggctcacgcctgtaatcccagcactttgggaggccaaggcgggcggaccacgaggtcaggagatcgagaccatcctggctaacacagtgaaaccccgtcgctactaaaaatacaaaaaattagccaggcgtggtggcgggtgcctgtagtcccagctactcgggaggctgaggcaggagaatggcgtgaacctgggaggcggagcctgcagtgagccgagatcgcgccactgcactccagcctgggtgacagagcgagactccgtctcaaaaaaaaaaaaaaaaaaaaaaaaaaatggggtggcatcaaaaagataaggtgaggctgggcccggtggttcacatctgtaatcccagcactttgggaggacgaggagggaggatcacttgagcccaggaatttgagaccaacttgggcaacacagcaaaaccccatctctacaaaaaatacaaaaagtagccaggtatagtggcgcacgcctgtagtcccggctacttggaaggctgaggtgggaggatcacctgagcccagcaagtttgaggctgcagtgagcagagatcacaccactggactccacccctgggtgacagagcataccttgtctcaaaaaaaaaaaaccaaagctgaggaaaaaaaaaaaaaaaaccaaagctgagaatatggaaaggtggagagaactgctgaccacaagggctggaagaggtcaaggccttttgagttttctgatttggagcatcaaggcgtaatgaaacttaatattt

SEQ ID NO: 60358 - DNA, 811 bp, Homo sapiens
actaacacaaacatgaagacctaaaaaagtaatcatgggccaggcgcggtggctcacgcctgtaatcccagcactttgggaggccaaggcgggcggaccacgaggtcaggagatcgagaccatcctggctaacacagtgaaaccccgtcgctactaaaaatacaaaaaattagccaggcgtggtggcgggtgcctgtagtcccagctactcgggaggctgaggcaggagaatggcgtgaacctgggaggcggagcctgcagtgagccgagatcgcgccactgcactccagcctgggtgacagagcgagactccgtctcaaaaaaaaaaaaaaaaaaaaaaaaaaatggggtggcatcaaaaagataaggtgaggctgggcccggtggttcacatctgtaatcccagcactttgggaggacgasgagggaggatcacttgagcccaggaatttgagaccaacttgggcaacacagcaaaaccccatctctacaaaaaatacaaaaagtagccaggtatagtggcgcacgcctgtagtcccggctacttggaaggctgaggtgggaggatcacctgagcccagcaagtttgaggctgcagtgagcagagatcacaccactggactccacccctgggtgacagagcataccttgtctcaaaaaaaaaaaaccaaagctgaggaaaaaaaaaaaaaaaaccaaagctgagaatatggaaaggtggagagaactgctgaccacaagggctggaagaggtcaaggccttttgagttttctgatttggagcatcaaggcgtaatgaaacttaatattt

SEQ ID NO: 60359 - DNA, 1307 bp, Homo sapiens
cctgcctttacaggttatatttcttttaacactttaaactgtcaaataaaattcctcttggacaagctcttttcaaaagacttgcttttgctgttcctgcttcttctgtaagagtaacagcatttccccttactcacctgcctctggtgctggctgcacagagtggacacagacagtggcaaaggtttgatggagaagctcagcacgagaaggtctggctaaattgcttcctcactgatctttccagttggcctttgcagcatctttatcctttggtttgtgaggctgagcaatgcttttgtgctgctgtaaagcctgcttttgtgacatgcaaaaaccacacagccgagatatccttgggaaattctsagaaaggaagagggatatgaggttctttgtcagatattacaccagacccaaggagatttctgttattggaaattacaattagatttcttccccttcacaatggaaaagatactgtcgtagctctcatatagtctagtactgattataaagacacttctttccagatcagcctgaactaactgtagaccatgaaaaatcttcattacgatgtatatttattgatatttcagatgctgacatttaaaactatttattttaaataattttaaaatgacaaatttatgaacactcacatgttctaggaaaaccattcaaatgggataactttgtattttgctgaagaatgtcatgttttgttcctggtggcatgatgtgtgccccctgaggtctgcattgccatgtcaaggtttgtctcatttgctgggaaaccacaggaatggatgatctgggttgatctcacaccctagtttctaaatacattgcagtgtgaaaaattcagagaacagtccacatcattaattttctcattgttcattgacttttataattaccttcaaatatagcttaatgaataaaaaaattatattaagcaataatgtagcatttttatgtagttcctatgtgtgtatgtgtgacatccatctgatgataaatgtaaaaattgaaggtctttctaaaatatcaatgtatttattgctttatttattatagaattacagtttatgaaacaaatgtaaccactgctttcaaatccagaataacacatatgtctccaaagagactattgtcactttttgggaaatttaaaggtttgtttttctttttgtttgtaccaccaaacttagccttttggtagtctacttctaggaaggtgttattgcggcaatgaggagcaatccacttctcagtggtaggagtatatttttcttctgacgtgt

SEQ ID NO: 60360 - DNA, 1307 bp, Homo sapiens
cctgcctttacaggttatatttcttttaacactttaaactgtcaaataaaattcctcttggacaagctcttttcaaaagacttgcttttgctgttcctgcttcttctgtaagagtaacagcatttccccttactcacctgcctctggtgctggctgcacagagtggacacagacagtggcaaaggtttgatggagaagctcagcacgagaaggtctggctaaattgcttcctcactgatctttccagttggcctttgcagcatctttatcctttggtttgtgaggctgagcaatgcttttgtgctgctgtaaagcctgcttttgtgacatgcaaaaaccacacagccgagatatccttgggaaattctcagaaaggaagagggatatgaggttctttgtcagatattacaccagacccaaggagatttctgttattggaaattacaattagatttcttccccttcacaatggaaaagatactgtcgtagctctcatatagtctagtactgattataaagacacttctttccagatcagcctgaactaactgtagaccatgaaaaatcttcattacgatgtatatttattgatatttcagatgctgacatttaaaactatttattttaaataattttaaaatgacaaatttatgaacactcacatgttctaggaaaaccattcaaatgggataactttgtattttgctgaagaatgtcatgttttgttcctggtggcatgatgtgtgccccctgaggtctgcattgccatgtcaaggtttgtctcatttgctgggaaaccacaggaatggatgatctgggttgatctcacaccctagtttctaaatacattgcagtgtgaaaaattcagagaacagtccacatcattaattttctcattgttmattgacttttataattaccttcaaatatagcttaatgaataaaaaaattatattaagcaataatgtagcatttttatgtagttcctatgtgtgtatgtgtgacatccatctgatgataaatgtaaaaattgaaggtctttctaaaatatcaatgtatttattgctttatttattatagaattacagtttatgaaacaaatgtaaccactgctttcaaatccagaataacacatatgtctccaaagagactattgtcactttttgggaaatttaaaggtttgtttttctttttgtttgtaccaccaaacttagccttttggtagtctacttctaggaaggtgttattgcggcaatgaggagcaatccacttctcagtggtaggagtatatttttcttctgacgtgt

SEQ ID NO: 60361 - DNA, 1307 bp, Homo sapiens
cctgcctttacaggttatatttcttttaacactttaaactgtcaaataaaattcctcttggacaagctcttttcaaaagacttgcttttgctgttcctgcttcttctgtaagagtaacagcatttccccttactcacctgcctctggtgctggctgcacagagtggacacagacagtggcaaaggtttgatggagaagctcagcacgagaaggtctggctaaattgcttcctcactgatctttccagttggcctttgcagcatctttatcctttggtttgtgaggctgagcaatgcttttgtgctgctgtaaagcctgcttttgtgacatgcaaaaaccacacagccgagatatccttgggaaattctcagaaaggaagagggatatgaggttctttgtcagatattacaccagacccaaggagatttctgttattggaaattacaattagatttcttccccttcacaatggaaaagatactgtcgtagctctcatatagtctagtactgattataaagacacttctttccagatcagcctgaactaactgtagaccatgaaaaatcttcattacgatgtatatttattgatatttcagatgctgacatttaaaactatttattttaaataattttaaaatgacaaatttatgaacactcacatgttctaggaaaaccattcaaatgggataactttgtattttgctgaagaatgtcatgttttgttcctggtggcatgatgtgtgccccctgaggtctgcattgccatgtcaaggtttgtctcatttgctgggaaaccacaggaatggatgatctgggttgatctcacaccctagtttctaaatacattgcagtgtgaaaaattcagagaacagtccacatcattaattttctcattgttcattgacttttataattaccttcaaatatagcttaatgaataaaaaaattatattaagcaataatgtagcatttktatgtagttcctatgtgtgtatgtgtgacatccatctgatgataaatgtaaaaattgaaggtctttctaaaatatcaatgtatttattgctttatttattatagaattacagtttatgaaacaaatgtaaccactgctttcaaatccagaataacacatatgtctccaaagagactattgtcactttttgggaaatttaaaggtttgtttttctttttgtttgtaccaccaaacttagccttttggtagtctacttctaggaaggtgttattgcggcaatgaggagcaatccacttctcagtggtaggagtatatttttcttctgacgtgt

SEQ ID NO: 60362 - DNA, 1307 bp, Homo sapiens
cctgcctttacaggttatatttcttttaacactttaaactgtcaaataaaattcctcttggacaagctcttttcaaaagacttgcttttgctgttcctgcttcttctgtaagagtaacagcatttccccttactcacctgcctctggtgctggctgcacagagtggacacagacagtggcaaaggtttgatggagaagctcagcacgagaaggtctggctaaattgcttcctcactgatctttccagttggcctttgcagcatctttatcctttggtttgtgaggctgagcaatgcttttgtgctgctgtaaagcctgcttttgtgacatgcaaaaaccacacagccgagatatccttgggaaattctcagaaaggaagagggatatgaggttctttgtcagatattacaccagacccaaggagatttctgttattggaaattacaattagatttcttccccttcacaatggaaaagatactgtcgtagctctcatatagtctagtactgattataaagacacttctttccagatcagcctgaactaactgtagaccatgaaaaatcttcattacgatgtatatttattgatatttcagatgctgacatttaaaactatttattttaaataattttaaaatgacaaatttatgaacactcacatgttctaggaaaaccattcaaatgggataactttgtattttgctgaagaatgtcatgttttgttcctggtggcatgatgtgtgccccctgaggtctgcattgccatgtcaaggtttgtctcatttgctgggaaaccacaggaatggatgatctgggttgatctcacaccctagtttctaaatacattgcagtgtgaaaaattcagagaacagtccacatcattaattttctcattgttcattgacttttataattaccttcaaatatagcttaatgaataaaaaaattatattaagcaataatgtagcatttttatgtagttcctatgtgtgtatgtgtgacatmcatctgatgataaatgtaaaaattgaaggtctttctaaaatatcaatgtatttattgctttatttattatagaattacagtttatgaaacaaatgtaaccactgctttcaaatccagaataacacatatgtctccaaagagactattgtcactttttgggaaatttaaaggtttgtttttctttttgtttgtaccaccaaacttagccttttggtagtctacttctaggaaggtgttattgcggcaatgaggagcaatccacttctcagtggtaggagtatatttttcttctgacgtgt

SEQ ID NO: 60363 - DNA, 1307 bp, Homo sapiens
cctgcctttacaggttatatttcttttaacactttaaactgtcaaataaaattcctcttggacaagctcttttcaaaagacttgcttttgctgttcctgcttcttctgtaagagtaacagcatttccccttactcacctgcctctggtgctggctgcacagagtggacacagacagtggcaaaggtttgatggagaagctcagcacgagaaggtctggctaaattgcttcctcactgatctttccagttggcctttgcagcatctttatcctttggtttgtgaggctgagcaatgcttttgtgctgctgtaaagcctgcttttgtgacatgcaaaaaccacacagccgagatatccttgggaaattctcagaaaggaagagggatatgaggttctttgtcagatattacaccagacccaaggagatttctgttattggaaattacaattagatttcttccccttcacaatggaaaagatactgtcgtagctctcatatagtctagtactgattataaagacacttctttccagatcagcctgaactaactgtagaccatgaaaaatcttcattacgatgtatatttattgatatttcagatgctgacatttaaaactatttattttaaataattttaaaatgacaaatttatgaacactcacatgttctaggaaaaccattcaaatgggataactttgtattttgctgaagaatgtcatgttttgttcctggtggcatgatgtgtgccccctgaggtctgcattgccatgtcaaggtttgtctcatttgctgggaaaccacaggaatggatgatctgggttgatctcacaccctagtttctaaatacattgcagtgtgaaaaattcagagaacagtccacatcattaattttctcattgttcattgacttttataattaccttcaaatatagcttaatgaataaaaaaattatattaagcaataatgtagcatttttatgtagttcctatgtgtgtatgtgtgacatccatctgatgataaatgtaaaaattgaaggtctttctaaaatatcaatgtatttattgctttatttattatagaattacagtttatgmaacaaatgtaaccactgctttcaaatccagaataacacatatgtctccaaagagactattgtcactttttgggaaatttaaaggtttgtttttctttttgtttgtaccaccaaacttagccttttggtagtctacttctaggaaggtgttattgcggcaatgaggagcaatccacttctcagtggtaggagtatatttttcttctgacgtgt

SEQ ID NO: 60364 - DNA, 2271 bp, Homo sapiens
tttccagttatttatctaattgatggtcctgattagaaatatatcaataaatcaaatatttattcaatttgacaaaaagtgctttagaattgaacagcaacaccttggtgtatagaaattcatttaaaactagtatttttacacaatgttttgcctcttctgatattaaattcttttgaggcacaaaaagaagccataccgagcggttggtgcagacaggcgtgaatgcattggtcccacaggtgaataaccggtcgccacccaccagaagcacccggatgtagttctgacattcctcctgagggaaaataaataaattaattaaaaatatatatatatatgtataatgataaacatgctaacaaagtctgagcacaagaagaatggtgagaaggaatacattttatctaataaatatgtaagccattaataaaatgtaaaccattaaaacaacaaataaacctttcagatattgaccaaaaaataacaacagagctattaaacaatttgatttttatcaaataaatttaattgctgtatctgcaccttgtttgataaaaaatatgaagataaatacatgttcaattaaattctcaaagcatgcatctaattttgacagaaatgatttcattttgaattgtatctgatagtagcacaaatgctaaatggccttggacgggtattaggaaaataaataaaaggaacctattagatgtcgctcgggaagcagtgccttggaaaacttcctcagactttgagaaaatgctgcaagcgctttttgatcagaaggtcacatgagaaactctgtacacaaactggagcaaattttactttatgggatccaactgcatattttaaatacaaagcaagtatctatatgaatttttttttttttttttgagacggagtctcgctctgtcgcccaggctggagtgccgtggtgcaaattcggctcactgcaagctctgcctcccaggttcatgccattctcctgcctcagcctcccgagtagctgggaytacaggtgcccgccaccacgcccggccaattttttgtatttttagtagagacagggtttcaccatgttagtcaggatggtcttgatctcttgacctcgtgatctacctgcctcggcctcccaaagtgctgggattacaggcgtgagccgccacgcccggcctgtataggcatttttaattcattgattgaaaagtgaaaatatgcttaatgaggacaagatgttcgaaacatttgggacaaaaccctaggctgagggatactccaagaatggagtactttttgtggttgcaaagtgttcttagaaaaccctgggtatggtcatagcagtgatggacatgtgagctggagagctcctcacttattcagcaagcattcactgagtagctcctctttggtagccactgggttagaagtctcaatccaggctcctggcagaaaaatacaggatcatgacaattaccacagagctgtccatgcactgtaatgaggacacacagaggaatagcatattacgtagctccaaaggaacagggaagggaagaggtgtagagaggcttcctgaaggagctgacaactaagtgttaaataaagtgtaaggtttagtgaggcttcctggagggggtgcttgtaggacacctgttggactttactgagcaaaggagggaaaagacactccactcaagaggagcagactgtgtcaaagtgtcgtggctagagaaagcatggcgctctcattgtgtacagaggagctcacatagaagccgaggagcctgaaacaggccaagtgtgcccaggtagtgagttcacatgttactctgaatgtgaaaggagccattacatgttttgactgcgtgaagtattgatgagctctcatgttttatcactgaagaagcactcagaaaccaatgtgcaggataagctgaagagagaagcctggagtcaggaagccaaggaggaagtcacttccataactcaggctcttgtcatttcatgcctagaccaaggtagtaggtgtgaaaggacaaagccagaatagtgagtcaattgcacgccatggcgaatgaatgacgcacgaggcatgaaagatgctgcatgataacatgatgatttgaatcacatcatgctggaaatcaggggaatctggatgtaatggtatagctcatcttctcttcaaccaaatggacccccactctagatgaaagtgttaatttcccataacccagtctactgcatagcatcgagacagcggaa

SEQ ID NO: 60365 - DNA, 2271 bp, Homo sapiens
tttccagttatttatctaattgatggtcctgattagaaatatatcaataaatcaaatatttattcaatttgacaaaaagtgctttagaattgaacagcaacaccttggtgtatagaaattcatttaaaactagtatttttacacaatgttttgcctcttctgatattaaattcttttgaggcacaaaaagaagccataccgagcggttggtgcagacaggcgtgaatgcattggtcccacaggtgaataaccggtcgccacccaccagaagcacccggatgtagttctgacattcctcctgagggaaaataaataaattaattaaaaatatatatatatatgtataatgataaacatgctaacaaagtctgagcacaagaagaatggtgagaaggaatacattttatctaataaatatgtaagccattaataaaatgtaaaccattaaaacaacaaataaacctttcagatattgaccaaaaaataacaacagagctattaaacaatttgatttttatcaaataaatttaattgctgtatctgcaccttgtttgataaaaaatatgaagataaatacatgttcaattaaattctcaaagcatgcatctaattttgacagaaatgatttcattttgaattgtatctgatagtagcacaaatgctaaatggccttggacgggtattaggaaaataaataaaaggaacctattagatgtcgctcgggaagcagtgccttggaaaacttcctcagactttgagaaaatgctgcaagcgctttttgatcagaaggtcacatgagaaactctgtacacaaactggagcaaattttactttatgggatccaactgcatattttaaatacaaagcaagtatctatatgaatttttttttttttttttgagacggagtctcgctctgtcgcccaggctggagtgccgtggtgcaaattcggctcactgcaagctctgcctcccaggttcatgccattctcctgcctcagcctcccgagtagctgggactacaggtgcccgccaccacgcccggccaattttttgtatttttagtagagacagggtttcaccatgttagtcaggatggtcttgatctcttgacctcgtgwtctacctgcctcggcctcccaaagtgctgggattacaggcgtgagccgccacgcccggcctgtataggcatttttaattcattgattgaaaagtgaaaatatgcttaatgaggacaagatgttcgaaacatttgggacaaaaccctaggctgagggatactccaagaatggagtactttttgtggttgcaaagtgttcttagaaaaccctgggtatggtcatagcagtgatggacatgtgagctggagagctcctcacttattcagcaagcattcactgagtagctcctctttggtagccactgggttagaagtctcaatccaggctcctggcagaaaaatacaggatcatgacaattaccacagagctgtccatgcactgtaatgaggacacacagaggaatagcatattacgtagctccaaaggaacagggaagggaagaggtgtagagaggcttcctgaaggagctgacaactaagtgttaaataaagtgtaaggtttagtgaggcttcctggagggggtgcttgtaggacacctgttggactttactgagcaaaggagggaaaagacactccactcaagaggagcagactgtgtcaaagtgtcgtggctagagaaagcatggcgctctcattgtgtacagaggagctcacatagaagccgaggagcctgaaacaggccaagtgtgcccaggtagtgagttcacatgttactctgaatgtgaaaggagccattacatgttttgactgcgtgaagtattgatgagctctcatgttttatcactgaagaagcactcagaaaccaatgtgcaggataagctgaagagagaagcctggagtcaggaagccaaggaggaagtcacttccataactcaggctcttgtcatttcatgcctagaccaaggtagtaggtgtgaaaggacaaagccagaatagtgagtcaattgcacgccatggcgaatgaatgacgcacgaggcatgaaagatgctgcatgataacatgatgatttgaatcacatcatgctggaaatcaggggaatctggatgtaatggtatagctcatcttctcttcaaccaaatggacccccactctagatgaaagtgttaatttcccataacccagtctactgcatagcatcgagacagcggaa

SEQ ID NO: 60366 - DNA, 2271 bp, Homo sapiens
tttccagttatttatctaattgatggtcctgattagaaatatatcaataaatcaaatatttattcaatttgacaaaaagtgctttagaattgaacagcaacaccttggtgtatagaaattcatttaaaactagtatttttacacaatgttttgcctcttctgatattaaattcttttgaggcacaaaaagaagccataccgagcggttggtgcagacaggcgtgaatgcattggtcccacaggtgaataaccggtcgccacccaccagaagcacccggatgtagttctgacattcctcctgagggaaaataaataaattaattaaaaatatatatatatatgtataatgataaacatgctaacaaagtctgagcacaagaagaatggtgagaaggaatacattttatctaataaatatgtaagccattaataaaatgtaaaccattaaaacaacaaataaacctttcagatattgaccaaaaaataacaacagagctattaaacaatttgatttttatcaaataaatttaattgctgtatctgcaccttgtttgataaaaaatatgaagataaatacatgttcaattaaattctcaaagcatgcatctaattttgacagaaatgatttcattttgaattgtatctgatagtagcacaaatgctaaatggccttggacgggtattaggaaaataaataaaaggaacctattagatgtcgctcgggaagcagtgccttggaaaacttcctcagactttgagaaaatgctgcaagcgctttttgatcagaaggtcacatgagaaactctgtacacaaactggagcaaattttactttatgggatccaactgcatattttaaatacaaagcaagtatctatatgaatttttttttttttttttgagacggagtctcgctctgtcgcccaggctggagtgccgtggtgcaaattcggctcactgcaagctctgcctcccaggttcatgccattctcctgcctcagcctcccgagtagctgggactacaggtgcccgccaccacgcccggccaattttttgtatttttagtagagacagggtttcaccatgttagtcaggatggtcttgatctcttgacctcgtgatctacctgcctcggcctcccaaagtgctgggattacaggcgtgagccgccacgcccggcctgtataggcatttttaattcattgattgaaaagtgaaaatatgcttaatgaggacaagatgttcgaaacatttgggacaaaaccctaggctgagggatactccaagaatggagtactttttgtggttgcaaagtgttcttagaaaaccctgggtatggtcatagcagtgatggacatgtgagctggagagctcctcacttattcagcaakcattcactgagtagctcctctttggtagccactgggttagaagtctcaatccaggctcctggcagaaaaatacaggatcatgacaattaccacagagctgtccatgcactgtaatgaggacacacagaggaatagcatattacgtagctccaaaggaacagggaagggaagaggtgtagagaggcttcctgaaggagctgacaactaagtgttaaataaagtgtaaggtttagtgaggcttcctggagggggtgcttgtaggacacctgttggactttactgagcaaaggagggaaaagacactccactcaagaggagcagactgtgtcaaagtgtcgtggctagagaaagcatggcgctctcattgtgtacagaggagctcacatagaagccgaggagcctgaaacaggccaagtgtgcccaggtagtgagttcacatgttactctgaatgtgaaaggagccattacatgttttgactgcgtgaagtattgatgagctctcatgttttatcactgaagaagcactcagaaaccaatgtgcaggataagctgaagagagaagcctggagtcaggaagccaaggaggaagtcacttccataactcaggctcttgtcatttcatgcctagaccaaggtagtaggtgtgaaaggacaaagccagaatagtgagtcaattgcacgccatggcgaatgaatgacgcacgaggcatgaaagatgctgcatgataacatgatgatttgaatcacatcatgctggaaatcaggggaatctggatgtaatggtatagctcatcttctcttcaaccaaatggacccccactctagatgaaagtgttaatttcccataacccagtctactgcatagcatcgagacagcggaa

SEQ ID NO: 60367 - DNA, 665 bp, Homo sapiens
atataatcttttttgacatgtattctccaatattagctcgatttgaattctgaaaaaaaaaagaagaaagatttttccccttcatggttgaacaggaaagaatctcactgtaaaaacactgtattctctttctccttttttgcatgcataattattgagtccaaggatatagtcaaattatttcagaaggttttagtgaacaactgaatagcttaatcatgctaaaaagaattttccctctgctaggataagaagctctgtgtggccaggtgcagtggctgacgcctgtaatcctagcactttgggaagctgaggcgggcggatcttgaggtcaggagattgagaccatcctggctaacatggtgaaaccccgcctctactaaaaatacaaaaaaaaattagccgggcgtggtggtgggcacctgtaatcccagctactcaggaggctgaggcaggagaatggcatgaaccygggaggcggagcttgcagtgagccgagatcgcgccattgcactccagcctgggcgacagagggagactccgtctcaaaaaaaataaataaataaataaataaaataaaaaataaacaccaagtgtccctgagatacccactgccttctctcttgtgtctcagtgccttctttttaatgtttagtttttaagca

SEQ ID NO: 60368 - DNA, 664 bp, Homo sapiens
gtctctactaaaaatataaaaattagccaggcatggtggcgcgcgcctatagtcccagctactcaggaggctgaggcaggagaaccgcttgaacccggraggcggaggttgcagtaagccgagatcacaccactgcactccagcctgggcgacagagtgagactccgtctcaaaaaaaaaaaaaaaaaaaaaaaaaaattaagtctcagggcaaatcggaaaaaatcttgagcctcaaagtagagaaaaagaaatgatattcttagtgtctcaagattaagtcccaggccaactagagaaatagtacattgggaatctgagtgagtatatttctttccctctgttaataatctgagtgagtatatttcttccctgtgttaacaatctgtgtcctgggtttatgagcaggaaaatgaatatccaatagacactcaataaatgtctgttgaacaagtcaagcacttaaagcatttcaggcactgttcccagttatccttatttttcagatgaggaaacagaggcttggaaaggctaagtgacttgactgaggttgcatatctattaagagttggagcaagaatttgaatccagatctctctgtctactaagcccctattcccaaccacgattccatacagaatctctgagaagcaggaactgcctg

SEQ ID NO: 60369 - DNA, 664 bp, Homo sapiens
gtctctactaaaaatataaaaattagccaggcatggtggcgcgcgcctatagtcccagctactcaggaggctgaggcaggagaaccgcttgaacccgggaggcggaggttgcagtaagccgagatcacaccactgcactccagcytgggcgacagagtgagactccgtctcaaaaaaaaaaaaaaaaaaaaaaaaaaattaagtctcagggcaaatcggaaaaaatcttgagcctcaaagtagagaaaaagaaatgatattcttagtgtctcaagattaagtcccaggccaactagagaaatagtacattgggaatctgagtgagtatatttctttccctctgttaataatctgagtgagtatatttcttccctgtgttaacaatctgtgtcctgggtttatgagcaggaaaatgaatatccaatagacactcaataaatgtctgttgaacaagtcaagcacttaaagcatttcaggcactgttcccagttatccttatttttcagatgaggaaacagaggcttggaaaggctaagtgacttgactgaggttgcatatctattaagagttggagcaagaatttgaatccagatctctctgtctactaagcccctattcccaaccacgattccatacagaatctctgagaagcaggaactgcctg

SEQ ID NO: 60370 - DNA, 749 bp, Homo sapiens
tttgggactattttatgattaaaataagagagttagcatagtgagggggcaagacagtgaacatgtacttttttctttactaagtgaaagaaaactacttttgatattctctactgatggcaattcataacacatttgctggataattaggggaaactaagcattagaagctatgttattctgctacaggcagctcctatatctggcagagcagctgtaattgtggttaccacctgaaaagttatcccactatcatctgtcacaatttatacaaagtttgcaagggccaccaytatctcaacatccaccacaatttgttagtataactaatctctatagactttcctagaaaggacaattctttttatttaatgtcattctactttgtggtctttattcttcatcagataaaaaatatgtaatgtttctgccatttgctagttatctgcattctattgtataatttgagacaaggaaaaccacaaaatgccttcacaaaaacattaactccactgtgagatgtggactaataccctgtcacgtggtattttcaagccccctctgtaactggaatgctataatgggatgtttttttctagtcctctagcttcggtatcagttcatatatcatatttaagtatcctgtcagtattcagaaattaccttctcttaggtgcaacagtcactaatgattagccataatttctctggggaatagatcagggactaaataacgtaatgatgtttct

SEQ ID NO: 60371 - DNA, 749 bp, Homo sapiens
tttgggactattttatgattaaaataagagagttagcatagtgagggggcaagacagtgaacatgtacttttttctttactaagtgaaagaaaactacttttgatattctctactgatggcaattcataacacatttgctggataattaggggaaactaagcattagaagctatgttattctgctacaggcagctcctatatctggcagagcagctgtaattgtggttaccacctgaaaagttatcccactatcatctgtcacaatttatacaaagtttgcaagggccaccattatctcaacatccaccacaatttgttagtataactaatctctatagactttcctagaaaggacaattctttttatttaatgtcattctactttgtggtctttattcttcatmagataaaaaatatgtaatgtttctgccatttgctagttatctgcattctattgtataatttgagacaaggaaaaccacaaaatgccttcacaaaaacattaactccactgtgagatgtggactaataccctgtcacgtggtattttcaagccccctctgtaactggaatgctataatgggatgtttttttctagtcctctagcttcggtatcagttcatatatcatatttaagtatcctgtcagtattcagaaattaccttctcttaggtgcaacagtcactaatgattagccataatttctctggggaatagatcagggactaaataacgtaatgatgtttct

SEQ ID NO: 60372 - DNA, 749 bp, Homo sapiens
tttgggactattttatgattaaaataagagagttagcatagtgagggggcaagacagtgaacatgtacttttttctttactaagtgaaagaaaactacttttgatattctctactgatggcaattcataacacatttgctggataattaggggaaactaagcattagaagctatgttattctgctacaggcagctcctatatctggcagagcagctgtaattgtggttaccacctgaaaagttatcccactatcatctgtcacaatttatacaaagtttgcaagggccaccattatctcaacatccaccacaatttgttagtataactaatctctatagactttcctagaaaggacaattctttttatttaatgtcattctactttgtggtctttattcttcatcagataaaaaatatgtaatgtttctgccatttgctagttatctgcattctattgtataatttgagacaaggaaaaccacaaaatgccttcacaaaaacattaactccactgtgagaygtggactaataccctgtcacgtggtattttcaagccccctctgtaactggaatgctataatgggatgtttttttctagtcctctagcttcggtatcagttcatatatcatatttaagtatcctgtcagtattcagaaattaccttctcttaggtgcaacagtcactaatgattagccataatttctctggggaatagatcagggactaaataacgtaatgatgtttct

SEQ ID NO: 60373 - DNA, 502 bp, Homo sapiens
  misc_feature (1)...(502): n = A,T,C or G
aannnnnnnnnnnnnnnnnnnnnnnnnnnnnnnnnnnnnnnnnnnnnnnnnnnnnnnnnnnnnnnnnnnnnnnnnnnnnnnnnnnnnnnnnnnnnnnnnnnntattgtagagagactctagaaactgaggtgcttaaaagatatttttttcttctctttggttgtattaggtaaggtagtctggacagctgtaatagaccaaaaagtgtaattgttaaacaaaataaataatcatttttctgtcccatagcaaatccaagtcagtaagtccacagaagctgtaccctctgcagtcattcaaatatccaatattctggattctcagccagtttcatcacaacactttccaggtaactggttgttgatttcctagtcyacagcctagaacaggcatacattatgctccacacatcctactggggtaaatttattcacatggccacatccaactagctgtgcaatgttgtgtattatacaaagagaaccagaaagggtattattt

SEQ ID NO: 60374 - DNA, 1068 bp, Homo sapiens
tggtgtgcagcagccattaacttgtcatttacattaggtatatctcctaatgctatcccttcccccaccccgcccctctacaggccctgatgtgtgatgttcccctttctgtgtgcaagtgttctcattgttcaattcccacctatgagtgagaacatgcagtgtttggttttttggaacaggcttttttaaaaatcaaactttaataaagtctaatttacctaaaattttggtccacaactttctttgtaggacttgttgtgtgtcagggtcattgtcaattaagaaaagtytatgctatggaaaaacacattctgaaattctggaattgttttatgtataaaatgttaaaacctgacaaacagttcaggatttattgcttcctaagtttttggattcacgagcgggtgagtgtcttttcttgtctctttcctttcctttgttgtcccccttttttttgcaacatacttagccttctgagccccgggaattatggaatgcccatgttcctttatatttccataggactgggggtttggagccccatgcagaggtggataaagtgtttgaggctcagaggaatattttccagcacctactgcttcttgatcccccagtcccctttgtcagctgtatagttgctgtctgtgcctcatcagtgatgcacatcaccctacacttgcatgccctgaagtttacacctatcattttccttctaatcttgattagaaggaattttacttcttcattttgtttaattcagcatctctctgggaggcattggaagccagaagcctccctggagtcagtcttattgaaaacaagaataattttgtctaattcagaagttctctaaaggtcacttcaaattatggacttgccaaaaaataacatgatgatgaagtcatagagaaaaaggaatatttgcacactgctggtaggactgtaaattatttcaacccttatggaaagcagtttggtgatttctcaaagaactcaaaacagaatttccattcaaacctgcaatcgctttattgggtatatacctgaatgaatataaatcactct

SEQ ID NO: 60375 - DNA, 540 bp, Homo sapiens
agattttatacagggctgacttcaaaacctgtagtatttatcctaagctgtggttcagctgacccataattctttctcctttcttttattttgccctgttgaacattcactgagggatcacttcttctgagacctcagttttttcatctgtatattcaacgagttggaatagatgytctttgagatactctcaagtttggtgtttctaaaatttactaaaaagacaaccccatacaagcaagggcacagagcaagggctttggtccacagagtaggggagggtagaggtgaaatgaaaaggagaaaaagcttcagagacaaaggtgcagagcaaaaacgaagggggtgcctatgctgagatggacacttgctctattcctctagtgacttaaaatgttgaaaattggtatacataaaaatgtgttaatatggtattttctgacgacggaagagagatgagatggtgagagccaggtgtggaaagtggagatgtgcccatagtggatatcttgcacatcacaattttgctcccaattagca

SEQ ID NO: 60376 - DNA, 540 bp, Homo sapiens
agattttatacagggctgacttcaaaacctgtagtatttatcctaagctgtggttcagctgacccataattctttctcctttcttttattttgccctgttgaacattcactgagggatcacttcttctgagacctcagttttttcatctgtatattcaacgagttggaatagatgctctttgagatactctcaagttyggtgtttctaaaatttactaaaaagacaaccccatacaagcaagggcacagagcaagggctttggtccacagagtaggggagggtagaggtgaaatgaaaaggagaaaaagcttcagagacaaaggtgcagagcaaaaacgaagggggtgcctatgctgagatggacacttgctctattcctctagtgacttaaaatgttgaaaattggtatacataaaaatgtgttaatatggtattttctgacgacggaagagagatgagatggtgagagccaggtgtggaaagtggagatgtgcccatagtggatatcttgcacatcacaattttgctcccaattagca

SEQ ID NO: 60377 - DNA, 680 bp, Homo sapiens
aatctccccccatgtgaagctcatgtgctttggaaaaagcagcaaagcaggtcaagcttatactgatgaacatgagctcatttgccaaacatgacccaatttaggccaatgagatttaagacattttctaggggtttccagaaaaaggtttcctaactttcttatttttcctttctcatttttcccagaaagcttctagaagcaattcccccaacgctttcattctccaaccctccctttccccaaccctccccagcctcctctcccttctctttgttggcagccattttatgactatgaaggagagccagccttaggggggaaaaaaaawgcctttccctggaaacccctagaagctgacatacgggaacgcacagtcgatcgagagggactggatctctattgacaccaatgagccactaaatcaaaccctaacttttgatgttggcaaattcagtacaaataacttcttatttttcaaccaatttaagttgtcaatgtgatgctccatcactccttaatactttagaatttatgtcctacaaacaaggatattctcctgaataaccaaaatagaactatcaaaattagcatattaacattaattcattactttcacctgattctcaaatcacattcgagttttgtcagttgttccaattatgacttttataactaaa

SEQ ID NO: 60378 - DNA, 680 bp, Homo sapiens
aatctccccccatgtgaagctcatgtgctttggaaaaagcagcaaagcaggtcaagcttatactgatgaacatgagctcatttgccaaacatgacccaatttaggccaatgagatttaagacattttctaggggtttccagaaaaaggtttcctaactttcttatttttcctttctcatttttcccagaaagcttctagaagcaattcccccaacgctttcattctccaaccctccctttccccaaccctccccagcctcctctcccttctctttgttggcagccattttatgactatgaaggagagccagccttaggggggaaaaaaaatgcctttccctggaaacccctagaagctgacatacgggaacgcacagtcgatcgagagggactggatctctattgacaccaatgagccactaaatcaaaccctaacttttgatkttggcaaattcagtacaaataacttcttatttttcaaccaatttaagttgtcaatgtgatgctccatcactccttaatactttagaatttatgtcctacaaacaaggatattctcctgaataaccaaaatagaactatcaaaattagcatattaacattaattcattactttcacctgattctcaaatcacattcgagttttgtcagttgttccaattatgacttttataactaaa

SEQ ID NO: 60379 - DNA, 512 bp, Homo sapiens
atatgagatgcaatatataaatttgtcattcaagtttcactatattttacttactatatttttatctttaatatgaaaataaaatatttattttaaataactaaagaacaaataaaaattatacatattttggaaaatttagtgggatgtaaatatccatgtgtattctcttttattttgtctctataaagaaacatttataaaattagtataaaatggctgggcacggtggctcacgcctgtaatcccaacactttgggaggccaaggcgggcgatcatgaggtcaggagatcgagaccatcctggctaacatgggaaaccccgtctctactaaaaatacaaaaaagattagccaggcttggtggcgggcacctgtaktcccagctactcgggaggctgaggcaggagaatggcgtgaacccgggaggcggaggttgtagtgagccgagattgcgccactgcactccagcctgggctacagagtgagactgcatctcaaaaaaaacaaaaa

SEQ ID NO: 60380 - DNA, 1055 bp, Homo sapiens
ggctttaaatgcaccagctctgtaacttcattttatttaaattcagcatctctctcactagtgtgttaggtccgggagagtagaaatcaaatcctacttgttcatttatctttaggtcatagcacatgcctatgctccagagtcagttaatatcatatatatacgtcatatatatgatatagatccatatatatgacgtcatatattatatatatcatatatatacacctatatatatgcacatacataaactgagatatatatgtaaactgagatatatatataactgagatatatatatatattatctgaataatagatatttagggtgaataacccttgttttaagagtggaggatattagaaatatcttaccaaataaaagttagagattgttccaagtgatgctgaagagagaaaattaaatgagggatagcagtctttccaaaggagttgtctccactacaaagaatcatgaataataatgataaagtcaaagctcaccttcttgtcctttatcagtgagacaattaacaaaagggcaataaatgggaaaaaaaatctgtgaagatctctcttagcaactgtgcttataggatcagtgaaccaatgcctggagaaggtttgctattctgggacacaatggcaaaaatatttcatttaaatgaagaagatattgggagaagatcatgtctctgagaggctcctgaatggcaaccctgttaaataatatctctttttaggaaaaaagacatgagtaattgaycatggagaaaatggttttcttgattttatatctaaagaacactgtttctctaaatcactagaatgaatcaccagttggcattcattgcagtcatataccagtgagagcagatggaatataaaatggtatgaaacatatctactgagaaaacaagcattttaaaagttaatgaaagacaaaacaacaagggcataaagtaggcctagtgaatgttaatgtaatgacagcagagagtacccatacacttttaatgagtatttaagtgctaaataacaataatatactaata

SEQ ID NO: 60381 - DNA, 731 bp, Homo sapiens
ggatcctaaacagtataaacaaaatgactcaggatgccacccggggtgtttagaactttaaacagcatatcatgaatcagttgcttgcttatcttatcctgtcttggccaaaagtcagtaccaaacttccgtgcatcctgrgaataagcacagaattatcacagtccagtttaaggcaactgttgtaagcaagtactatagtttaaatgtcctcttcagaactgatgttgaagcttagcctcactgtggcattactgaaatgtggggccgttaagaggggattaaatcatgagggctgtgacctcataaatggattaacccatttatggattaagaggttgatatagtttggctgtgtccccacccaaatctcatcttgaattgtagttcccacaatccccatgtgttgtgggagggacccagtgggaagtaattgaattgtgggggtggttactgccatgctgctgttcttgtgatactgagtgagttctcaggagatctgatggttttataagagcctttttcccttttgctcaacacttctttctgccaccatgtgaataaggatgtgtttgcttccccttccaccatgattgtgtttcctgaggcctccctagccttgctgaactgtgagtcaattaaacctctttccttaataaattgcccaatcctgagtatgtctttataagcaacatgaagaggttatcacaggaggggaactggtggcttta

SEQ ID NO: 60382 - DNA, 731 bp, Homo sapiens
ggatcctaaacagtataaacaaaatgactcaggatgccacccggggtgtttagaactttaaacagcatatcatgaatcagttgcttgcttatcttatcctgtcttggccaaaagtcagtaccaaacttccgtgcatcctgagaataagcacagaattatcacagtccagtttaaggcaactgttgtaagcaagtactatagtttaaatgtcctcttcagaactgatgttgaagcttagcctcactgtggcattactgaaatgtggggccgttaagaggggattaaatcatgagggctgtgacctcataaatggattaacccatttatggattaagaggttgatatagtttggctgtgtccccacccaaatctcatcttgaattgtagttcccacaatccccatgtgttgtgggagggacccagtgggaagtaattgaattgtgggggtggttactgccatgctgctgttcttgtgatactgagtgagttctcaggagatctgatggttttataagagsctttttcccttttgctcaacacttctttctgccaccatgtgaataaggatgtgtttgcttccccttccaccatgattgtgtttcctgaggcctccctagccttgctgaactgtgagtcaattaaacctctttccttaataaattgcccaatcctgagtatgtctttataagcaacatgaagaggttatcacaggaggggaactggtggcttta

SEQ ID NO: 60383 - DNA, 731 bp, Homo sapiens
ggatcctaaacagtataaacaaaatgactcaggatgccacccggggtgtttagaactttaaacagcatatcatgaatcagttgcttgcttatcttatcctgtcttggccaaaagtcagtaccaaacttccgtgcatcctgagaataagcacagaattatcacagtccagtttaaggcaactgttgtaagcaagtactatagtttaaatgtcctcttcagaactgatgttgaagcttagcctcactgtggcattactgaaatgtggggccgttaagaggggattaaatcatgagggctgtgacctcataaatggattaacccatttatggattaagaggttgatatagtttggctgtgtccccacccaaatctcatcttgaattgtagttcccacaatccccatgtgttgtgggagggacccagtgggaagtaattgaattgtgggggtggttactgccatgctgctgttcttgtgatactgagtgagttctcaggagatctgatggttttataagagcctttttcccttttgctcaacacttctttctgccaccatgtgaataaggatgtgtttgcttccccttccaccatgattgwgtttcctgaggcctccctagccttgctgaactgtgagtcaattaaacctctttccttaataaattgcccaatcctgagtatgtctttataagcaacatgaagaggttatcacaggaggggaactggtggcttta

SEQ ID NO: 60384 - DNA, 732 bp, Homo sapiens
tagtataagatggtatgtttatgtgagttggtggaagacattcattcattttctcattcagtgattatttattaaacccctactctgtgctaagcacaatttatgttctatgaaaaccctatctattacatcggcttcagcctggataagtttattttcagtaacacgctatgggaggtagaaaatactgcctctctcaaatgtttctgaattagttttactaaacaagcaaggtgcccttggttttttaaatacaaattagtttcctacagtaatattttcaggttaattgttcttaccagtttaatagtacctcgtttttcaaaatcaattccactgttctatgttgtttgtcttatttcagatctctcatgatttaacagatatgtagacaatggttctgctccctgttagtgtctgaaaagaagaaatgttttcgtcactgaaaaaaagcaataattcctggatatctactagggtgttattggatatttccttagtaaaagaggcatttgggcttgggccaggtcctgaaaaccacatatcaaatgtcatcactttttataaccttttataaccttttggtaggatattctaatagcagctttaacaattgtgaatctcctggccctgcatattcttcaaatatctagtttttaataatgtgtaccattaatcaattttgcattattttaaatagatagctcctttttaactrctactataggatcc

SEQ ID NO: 60385 - DNA, 702 bp, Homo sapiens
ctgtggcctgtggacctgcagcatcactgtcctccgagggcttgtgagagacacagcgtctggagcctcagctgaggcctggggtgtcagaatctgcccctggaccagatcccccgaggatgtgtatgtgcagagagtgtgggaaggctgctccacgcctcctaggagaccacaggtctctctcaccaccgtgacaagcttcagcaatgtgtcccggggaaatgcgagctacctgcaagtaaattattattaatagttacagtaccaacatttgcaaataatgccatttttgaaaaaggaaattagagctgactcaaagttattcctatcaagacatcactcttatatgtgcattccaacatgctttcttgaaggggaattactrtcatgatgcacacgcacaggggaccctgtcagcaggtctccactaaggagggaggacctaacccacccttcctcctgaacagcagtcctacctgctatgttcccaagaggcggtcagtccgatgctgtaggaggcagaatggcccaaggcagccacatcgatgctgggcaggcctcgttcttggaaattcttccttacattggtctgcaagatgcccccctggaactctcacccttccttgctaagtctctggctgcagatggaactagcccacctcctctttcataggacacagctgttcattcccgttgctgcca

SEQ ID NO: 60386 - DNA, 702 bp, Homo sapiens
ctgtggcctgtggacctgcagcatcactgtcctccgagggcttgtgagagacacagcgtctggagcctcagctgaggcctggggtgtcagaatctgcccctggaccagatcccccgaggatgtgtatgtgcagagagtgtgggaaggctgctccacgcctcctaggagaccacaggtctctctcaccaccgtgacaagcttcagcaatgtgtcccggggaaatgcgagctacctgcaagtaaattattattaatagttacagtaccaacatttgcaaataatgccatttttgaaaaaggaaattagagctgactcaaagttattcctatcaagacatcactcttatatgtgcattccaacatgctttcttgaaggggaattactatcatgatgcacacgcacaggggaccctgtcagcaggtctccactaaggagggaggacctaacccacccttcctcctgaacagcagtcctacctgctatgttcccaagaggyggtcagtccgatgctgtaggaggcagaatggcccaaggcagccacatcgatgctgggcaggcctcgttcttggaaattcttccttacattggtctgcaagatgcccccctggaactctcacccttccttgctaagtctctggctgcagatggaactagcccacctcctctttcataggacacagctgttcattcccgttgctgcca

SEQ ID NO: 60387 - DNA, 655 bp, Homo sapiens
ccattgtaccaagatgaacctgaggtgaaggcaacaaatccgctgccccgggctccacagctcagaatctggggtcaggactggtctccgggtccgtccctcccagtgatctgcccttcctttgccaagcatctttgactagatgtgcagcaggagtgcccagtgagtccaggggaggcacaaggcctgcgggcacaggcctggtcacctagagagttgcatcttctgaccaagaggaagaattcatgaagagccagcctccgggcrtggcaggcaagggttttacctggtcatcaaactttttcaagaggcaccaaggaagcaaatagcaggtggccaggccaggatggacatggtcaaagtgagtcagctggtttcctggagctgctaacccagtcgccaccctctcctgccttccaagtagcaaattctctggtcccgctcgcagtcagcctggacctgggttgctcattcttgaagaatgctcactgctgggcctgcctctgtttctgagatgagtccaggaaagctggggtggtctcggtctgtgtccctgttccgccacacccgacccctgggacagctcagaaatctgcaacctttcacagctggttggctttcagcacaaatgggcaggtgcctagagcagccagca

SEQ ID NO: 60388 - DNA, 655 bp, Homo sapiens
ccattgtaccaagatgaacctgaggtgaaggcaacaaatccgctgccccgggctccacagctcagaatctggggtcaggactggtctccgggtccgtccctcccagtgatctgcccttcctttgccaagcatctttgactagatgtgcagcaggagtgcccagtgagtccaggggaggcacaaggcctgcgggcacaggcctggtcacctagagagttgcatcttctgaccaagaggaagaattcatgaagagccagcctccgggcatggcaggcaagggttttacctggtcatcaaactttttcaagaggcaccaaggaagcaaatagcaggtggccaggccaggatggacatggtcaaagtgagtcagctggtttcctggagctgctaacccagtcgccaccctctcctgccttccaagtagcaaattctctggtcccgctcgcagtcagcctggacctgggttgctcattcttgaagaatgctcactgctgggcctgcctctgtttctgagatgagtccaggaaagctggggtggtctcggtctgtgtcccygttccgccacacccgacccctgggacagctcagaaatctgcaacctttcacagctggttggctttcagcacaaatgggcaggtgcctagagcagccagca

SEQ ID NO: 60389 - DNA, 764 bp, Homo sapiens
cagacacctggactccttgatggaggcaggtctagctccccttcgcagcttctgagcatgccccctggcctcctctttggactcctgcatcaagagggcagatgggaaaccaccaggctttgggtcagaagacccagatttaaatttcagccacccrctatgtgaccctgagccagtttcataacctttctgagcctgttttctcacccacaaaataaaactaaccatacctacctcgggagtcacgagatgaaagaaaaagtgtgtcaagcccctggcaggtgctcagtatcagcagctattaagcttttttctaaccaactctgagcaaatccctgaccccctggagccctcatttatcctcacctgggccacagaaaaaatagctgactggcgtctttcccccagccaaggagacagagacagcctgaagataagactgaagtgaagagccaggcgcagtggctcacacctgtaatcccagcactttgggaggctgaggcaggcagatcacctgagatcgggagttcgagacaagcctggctaagatagtgaaaccccgtctccatcaaaaatacaaaattagcagcgcgtggtggcgcgtgcctataatcccagctacttgggaggctgaggcaggagaatcacttgaacctgggaggcggaggttgcagtgagccgggatggcgcgactgcactccagcctggacgacagagtgactccgtctcaaagaaagaaaaaaaaaggattgaagtgaagagcg

SEQ ID NO: 60390 - DNA, 1173 bp, Homo sapiens
aacaagggcagggcggggaaggtaagaggcagaggtttgggaggctgaggtgggaggatcacttgaggtcaggagttcgagaccagcctgtccaacatggtgaaaacctgtctctactaaaaatgcaacaacaacaacaaaaaaaattagccaggcagggtggcgggcacctataatccctgttacttcttctaaaaagaaaaaagaaaaaaaaaaagaaagaaaagaagagaaaaagaaaaaggaggcaggggacaactgcacaaacagaccccctttttaagcccccaagtgatggtgctaatggtcaccagggcagaaagtgggcagcccctcatccaggcagacctcaatttacaactcatgtggcttctgtttctccttctcctcctgcttgggcaaggcctgctgtgttctgccaccctaagtctcaggcagcaagtgggacagaggtctgagaaggaggggacccggctgttgtggtcaacaacccccttccaccttctcccgtcctcagggctcagtggggagcagggagagggcaagaccttcatcagcttaagtgacaatgattgtcggggagacttgaggccaagccgctgaaggtgaagggaagaggaagggagaaaaggccagggatacttggtaacgctcagaagaagggaaaccgagtccatctctgccacatcccggctgtggagtgctacacatgccttctggtgtttcaaaccctcatcgccgccatgaatgaggacggcatcatcagtggctccattttcagaagagcaaacagaggcccagaagggtctggtgactttctaacaccatgaccggcaggtggaggacgtggagtttgaacctaggtttgtccgactggccagctccctttctgctgcgtttcctgccctgcactgccaggctgtgcctgtgtgttaggtccccaagcgggagggtgagcccccgaggttaccagatgtcaatatcaggcagatcggcagtccaggacctcagggaaggtttagaggacggcacaaaccacaagtcagaagtgagcccaaagtcaggaaaccygggatgactgaatgctgggaagaacaggtggtctcccaaatctaagaggaaaggctaatttggtcaaagccccaaacatgggagccctgaggtgtgctctcg

SEQ ID NO: 60391 - DNA, 665 bp, Homo sapiens
gctcgttcaccactgcggggtggaggctcgttcaccactgcggggtggaggaggtttccatctctggaacagagatgtgtaattgtgaggcgcgtgcaggcccagcctcggtgagtctctgcagcctagcaacttgcagcggcagcagcagcctgtggtttcataaacagaggtgctctggtgtttagggagcaggtcattagccaggcctagcaaagaggcaaagctttaaggagaaagctccaaccacagaatgaaatatactccattcctctgacacaggaacagaaaggcgatgaagcaaagcacgacamagaccatcaaggccacctccctccttttacagaaaagaaagctacaattcaatagctgcccagccacttagcagagttgtggccagaactcagctctcccgattggggaaccggggcttccggactccacacatgtcataatgctgatagtttgaaatcagctctaatgggaatatttacactatggaaattggcaagtgctatacgtcaggcccctcccctcttccccacccagagctggttgataagcattcagcaacacgcagctggtggaactcagtgaggtcccaaattattagcattttctaaatgcagaaagtctggatgacccagtggcttggaataaagttg

SEQ ID NO: 60392 - DNA, 1069 bp, Homo sapiens
aaaccaaaccaaaaaaccctccagtggtttctggtcacaaaagaacaaaatccagattcctgaataatagctcacaagaggaactggctcttgcttacctgtctgacctaggtcatcgctcaaaaacagcctcccatccactctagcctattctttctgttcctcagacgctcagggcatgctcctacctcggcccttgctgatccctctgccaggaatgcctttcttcccgctgttcacatggccagctcccgctcatgatctagacttcactcagatgtcacctcctcagagaggccctccctgaccagtctctgtaaagcagccccaggctgcctgtttgaacttcctgcactgactatctctgaccgtgcttttattgtttatttgtttgtcatctgtctcctcctcccacatagaccctagaataaatgtcctttgccagcagggacttggtctgggctcccctccgggctgagacaatatttctgaaaagatgcaatgcagagctcrtactccccccacaaggctgcggatcctgcctgggcctcacctccagggcatcaatgttctccttcaccttgatcttggccgtcttcagcttctcccgcagttgtttgtagtacgtggagggaacagataagaactccaggcctctctctctcaagtggcgaatctgtttcagagcaaagctgaggtcagccttcggcctccaagttcaactcccctagccaggtggaggtgctgggtcatcaggatacagggtccctatcctagctcccctcaactgccaggatgctgtgtggcctcttcccctttcttctctgtcatgggccccgttagaacaacaactgctagatttatagaacactcaccatgtgcctgccttgagcactttctttttttctttttttttgagatggagtctctgttgcccaggctggagtgcagtggcacgatcttagctcactgcaacctctgcctcccggttcaagcgattctcctgcttcagcctcctgagtagctgggattacaggtgactaccatcacactcagctatgtattttta

SEQ ID NO: 60393 - DNA, 1658 bp, Homo sapiens
  misc_feature (1)...(1658): n = A,T,C or G
cgtaactggaagagccataactgaatctgatagagaggatagttcatcttctgggtaactggtcatctgaactttgagttagatactgtgactggaaacactttgtattgcttgggagtcattaagggctttaagtggctgtgaatgagtaaaatgagttaagtgaatctttaawgaagagtaaaatggactgtagtgaaggcacctgtaagtgtcacacaatctttatcttcttccttcagcccacatannnnnnnnnnnnnnnnnnnnnnnnnnnnnnnnnnnnnnnnnnnnnnnnnnnnnnnnnnnnnnnnnnnnnnnnnnnnnnnnnnnnnnnnnnnnnnnnnnnncataggattgaagctgattctttcccctccttgattagaaaataaagagaatagacatgcttgtaattggagaaatgtaatctcatagggaagagacagggcataattgatagagaaaaattgttgagaaaggggttggcaatgcatcttgcatatggttgaaaggattagacttgtatgaggaaagaaatgcctctgtacttgaatccacagagggactcaaatcaggatgaattagtttaactctgaattgaatttaaatgtttactgaattgaacgaggttttcagtttttagatgaagattgttttgtgaatttgaaaaatgtttatggatttataaacctattttcttacatgagtcatttactgctactaaaataggctatagataagagtagttatgcttgaacttagctaatttgagctataattctaaactttacactgtggaattataggtaattctgtacctacgtgaggaactaaagtgatagaccaaacagaagtttattttgagataatctgaagattcacatgagtggtaactcattttatgggaataagctaaacaaaatgaatttgacctaatgtaaaagtctagagtattttatcttaatagaagatgacgacttttatttgtcatctatagtcttctatacccatacctgcatcttaggaataaaaaggactagagataccatttcaatagtctctgtgatgttttgatccccaagcagcacagtaatgtgttgctgtaatatcatgtactagtaatcagagtatcctcttatttcattctgatttcctgcaagtcagtgcaaaatgtcaaagcttagaggtatcaggaaaaaagttctgaatatttcaagtcattgagagagaatgtctgaattagagttggcatgaggttgagagactataagagaggtagagtcttctggaatgactattgtatctgcattttctggggtaccagttgtcctggcagagcagaaggatgccttcagagatttcaaatgctctacaatctaaaatcaaatggagaatgtacggcagcacagagtaataatagtacttgtcagagcagtacaaatattgagcttactgagcccatatatgatatcccctcagaattatcagaaataatcacaggggactttgtagggagctgaggatcaaaagggacaattaatgaaccagaaaacaacaacaaaatatgagatattctagtaatggtcctttcaggtccccagcatatcatttagtcataataaagtacttcatgttcagaacgtggtaacgtattt

SEQ ID NO: 60394 - DNA, 699 bp, Homo sapiens
atatcacatgatgaggggaaggcaggagagagagaagagagagaagtgccgtgctcttttcaacaaccagttcccatgagagttggatgagaactcactcactcttgcaagagagaatgacaccaggctatttgtgagggttcttctcccataacccaaacacctcctactaagccccactccaacattcgtaatcaattttaacatgagatttggaagcatcaaatgtccaaacaacagaaaggatcatcaaattctaaggcatgcaaagataattgccccacaggaactctagacctcaatatgttcaaacattatgatccatcctcacctacgtgtttgaaactgatggacgaattacaccaaggataacttagaattacaatggccagtatctgaaactttccaaatgaacaagactagtctaagaagtacacttgaatcccaagcttcatgtattaaggagagaaaatgagattcttattttaattggcactcagaaggctcagagaaaacaaggttctaatataaatatttgaaagatttattgtgaaaagcaaatgactctttcgtttggagtatacattcactagtaatttttttttctttcatgggtagcagttgcttttctgtttgtttcattttytatttgttgtactgagaacttgatttaaatttttgcttgtcaggagcatgcaa

SEQ ID NO: 60395 - DNA, 914 bp, Homo sapiens
catttacaggtgggtgacctgaataagcccttctctcttgctgactggctctgtgactttggcttaattcctcctcctcctctctgtttctttatcaatttgcaaaatatgattggattargtaggcttcaagagcccttcctggtctgtgctcagtaattctgttcattggcgcaaatgtagaaactatttagttacatattctaagttccctgacagttgttttaatagcagaaaagatcaatgctgtggttgttttttatgaagatgtgcgtaaaaacagaatgtttaaaaaagttgtaatgatatacatctgtttgactcattggtgttaggttacccatgggagcatttaaattgtgtaaaactttatgttccaagtttaagaaagacagtgatgttttgaaatttagctaaatagactgaaataaccagcataaagaggagatgatctcatgataaaaatttagaactgaatagcattaggggaaattcctaatgtagatgatgggttgatgggtgcagcaaaccactatggcacgtatgtacctatgtaacaaacctgcacattctgcacatgtattccagccttaaagtataataaaaaaaaattaggactggaagggggcctaatggtcatggtatatgtttagcccttatattttattcttgaggacacaggctcccagaacaagagaggttcaagttcatagttgatctgggctgagctgggtggctgtactcccctactctaccctttcctcactttaagacagattccagcagcgctgtcagttcctcaaagcatcctttctggattcaatttgaagcatgtggctctcttgctgactaatggcccatggtggtttttggaaaaatattgcttactctcttagttcctctcacctcacagt

SEQ ID NO: 60396 - DNA, 236 bp, Homo sapiens
agctcaatcaactcttccctgctgaattttcaatcttccccctcccctacaggctcatgaccccataggctcacttaagcaagactcgttcacattaaaaaatatatatgagtaaatccttccttgactccactayactaccagtatcactctttgatcttctgttcccaaattgcatgcattcctggcttgccgtctccatgtcttcactgcctcccacctcacagtccactcac

SEQ ID NO: 60397 - DNA, 1064 bp, Homo sapiens
tggttacttcctcagctcctagacatccagcaatgtgcttccagtacctttctgctaagatcctgtctacatcccagcacactccttagacaggacctgcgaaaagcaaacagaaacccttgtcagctcactgtagcctgccgtccacatgtagcacatgggaaacactcaggtattgttttgccctgaggaactctagacctctgggccagtcccagccctgtagctctgtctcacttctccatcacagcagctaggcagcctcagtcactcagccttcatggtttccagatgtcactaggtaccagatgcctgtatccccaagctgtagggggcattctataggtggtccactaaagtcccttcctcttggctggaagtcaaggacaggcatctctctgacctccttctagggagggggaggtgagagaaacaacccgcagcaccctgatccccacsatttttccctgcctctccagtcttctttttcagactagcagcgggtaatctgttaacagtagcaaaactggttttcagaacctccctttcaagtcctgcatgatggtctggaacctcactttggaatgtggtatctgctgagttggctcttcagcctaaacaggatgaaactagttccattatttttaacctcctcttcccttagtgtcaaagtgtggtggtttattttattatggtgttaattctgaagctctgtgttattcttcccatggtgactctcttaagaacaggactttctttaagttcacgaatattctcataacctgtcatgtgctacataatctcaaattggtcctcttgaagacaagaacagagacagttgcattacactgtatgtgaggattaggttccaaagtaagcccataggtgaaatcaggtatattccatttacctttgaaaagtccataggaagtctaatttgctttttcttaatctatcaagcccagctgggttttctgcttatgttagaagatatagctttttctttaattaagcaccagatgaagtagcaggcttgtatttagggtccacattgcattgcataa

SEQ ID NO: 60398 - DNA, 948 bp, Homo sapiens
aacttaatataatatgtaaatcattacttatccattcattaaacacttacaaaggacctactgtgtgccaacaactgcaccaggaaatgggtattcattcagtgatacaaagctgaccatactagatatttrtatttataattcatgaaacaccttgtatcttctggaatacaagctaaatattgccgaatgagtgaaaaatactattattgctactttagtacactcagtaggggtaatcctgagggtctcacctgtagattttggtacacaagcttcatggcagttctttggccttctcagagggtttttccaatttttggtcctaagctatttcctgcacagcagaggagaccagaaatctgagctctggagagaggcaatgttatcacatatgaccatgtgaatacatattaccattctaaactccacttttgtgtttcaggcttatggctggctacatgaggacacaggaccagaatctgacccagtagtcatcgtgagatttctaggaacgacagacatgagctctgaccttaggactctccttctaagtgtttgtgaacaattggcagttaactaccggtgtctggttcaaagctaccctaagaagatccatgacctctgtgacttatttataaatcttttgaatgagtcttcactgcagagacctctagtcataatattcgatgcactagagcagctctcagagaatgatgatgccaggaagctttggtggctcccagctcacctgccccgctttgtccggatagtcctttccacgctgcccaacaaacatgggatcttgcagaaactaaggtgccttatccatgaagaagacaactacatcgagctgattccccgagacaggaagatgtgcagccaggtcctcaaacaccagctgctgcgcgtcaaaaggaaggtcacatcaggccagcagatttatgt

SEQ ID NO: 60399 - DNA, 732 bp, Homo sapiens
ttttcaacaccccttacccccacttttatttggttagagttgatagattcaggacaaagacagaattaattggtgaagcaatatcccagaggatggaagataaaagttaagtccacatgaaaaagttggccttgaacaggaaaaggaacaccttatcctctgagaatgaagagaatgaggaaaggactgatgcagatgtagataaatttgtggacatgggtagggcaggaggctgaagtcgctcaagcctaactgcatgactgtcgcaagtcctagccaatgcctgccaggggcacacgcagtatgcagcttccccatttccaagaaccraaagaatgtggactaagatgatgacagctccaggaaccagcccagacggagccactggagagcttccccataaggtagccatacatattaatcacagatcaaataagagaagaaatcctagatccttctatccaactcagatttctcacttaaagaaaatgaggccagaggttaagacaggctcaagggcagttgctagcatctcttaagctagaaaccaggtttcttgcccccagaatgaagtctccctttattttttaaaattgtatatagccaattttctccaccttttcccctggccaacttttcttcattcttctacttttagcacttcactttctctgaaaagccttccttgccttctcccttccctcccctctcccatttaaatcatttaaacag

SEQ ID NO: 60400 - DNA, 1098 bp, Homo sapiens
gcatatgactgaaagaattttcttttttattgaatagtttaaacaattctgtcaatacctagggtgaaaaattaaccacatggggattttgcctgtctgttgaaatctatagtcacctctctcccatccaccttaccaaatgtggaaacacatttaaattggcctattcttaaacactgaagacacataatatcagctaggcagaaagcaacaatacaacactcaaatataatctggggagttaagtccaaaaggctgaaaaatctaagaaaaatttatcagacttttatgtagtttctgcatgtataattctagaataataaacacttcctaatggtttggaactggatagaggtggtgtttgtacaacactgtaaatgtagtaaatgtcactgaattgttcactttaaaatggttaattttatgttgtatgaatttcaccacaattaaaaaatactttctgaactattgagctctttagaactaggaacttaaatgtaaaaagactctctactttttaaaatctcattttccttctttatatgctgatatagctacatctaagccactgctttcaaaggcttagagataacattttccctcctctcaattgattttttttcttttccattgggcaaatattgatttctctccactctgctcttcatgtgcagttagctctgctgcaactgagaatctttggggtctgagtctgtggcatgcagtttgtattgtaccaaacagaacagaggaataagtattcttgaaggtgttgatgagctcagtgtgtctttgactttactctgtggtgggatgtcaggaaagacaggtgaggatagagtatttggggttatggatgccatgytttgttgggcgtgaggcagctgctccctggactgctgtttatgagccattgctcatgggagagctgtaaaggaaaagagatctccactcatcctcctccacaaactggtgctgtaacaagctgaagcatatactctttaaatgccctattctcccaacctaatcactgaagcaaggcaggtgggtctgtttttctctttctagaagcttctatttattaaaataaaattctat

SEQ ID NO: 60401 - DNA, 1101 bp, Homo sapiens
tatacgcagaggtcctggaagattgccggggcttaggggaagaaggaaatggggattgctgttcaatgggtataaagtttcaattatgcaagatgaataagttctagaaatctgctgtataatatgatgtctgtagttaacaatactgtattgtgcacttaaaatttaagaatgtagatctcctgttaagtgctcttactacaaggaaataaaagtcatgtataagaaattctataatttttcatacactaaattcttatgtatgctatggtctcattttgggggaaggagagaaagatttgctctatatcattgttatgtctctgtttttttgccctagcttttggggagattttagccatagatagcttaccaccctaaaatagcacattcctaggatgatagtcttcttaattaatttttcaatgtgcattacacatacaataatatacatcccacttcatatagtcatctaattataaaagttttagcataaacacaacaattagaaaaataaggttacatttttgggtgagagaattgtgggtgactctgaggtatggttctgcaacttatgtaaggagcacaccaatgtatttttctgtctttaatgcaaaaagtatttattgagcaccttctctgtgtgccagttgttgttgaagacctgggatgacaaataataaataagtttccctaaaccaaygattagactcctgacttgacactagcagggttttcccagcacagataaatctggcaagcaaaggaaagctttagtgtcagatccaaaatgttagtgcaaatgaatgtaacctgagattgtcctaaatgggattgctgtagccaacgcataatatgttctttgaccttctgagattgactgaaccaaatttgtcatgagaaattgtctcctcttagatctcctatcattcttaacactagattacataacttaaaaaaaaagaaaagaaagaggatagaaaaaaagagtgtcatgaatcaatctaagattcttgtgaatcaaattatattctttgtatctatttttagagaaggtaattgaaactcaattttcagcactgtatactcagttttcattgc

SEQ ID NO: 60402 - DNA, 803 bp, Homo sapiens
aaaaacctgagaggaagctatatatcctttacttcttcacccaaagctgaaatctgcttcctagttctatcctccaatgacccaaggaaaagaatctcttccgctacttgctcttcagatatttaacacaactttcaggccttcttttgcattcttttcaggccacaggacactgtttttcggtgttcgttcccccaacccccccaaaccacgtatttttctcatttggcttattgcagtagctctctaaaggtctgcctgctctgttccctattcttcacccagcagccaaggccatgcttaaaatacaagtcaaatcacttcattcctctgctcagaacacttctgcagtttttcctgtcactygaggtaaaaccttaagtcaacttgaagattacagaattgaattgtcttactgaaattacctttccaaaatcgatggttcccaattatgctgagccataacaatagtcttcttagtcttaaaaataaaaatattctcttaatcataaaagatgaaaaggccccatgatacgttccccatatccatgccctcctccctattcatacttgttctaggcacagaggcctgcttgctgtttcctgaacatgccaacccctcttcctggaatacctgacttggaatatccacacctggttctttcctgcccctctttccatctccccttcagagtcaccttatcagtgaggcctcctctgactgttttatcttaagtagcaaatctctcccctcgctggtattctctcttttctttcatttctctatttttctccatagcact

SEQ ID NO: 60403 - DNA, 803 bp, Homo sapiens
aaaaacctgagaggaagctatatatcctttacttcttcacccaaagctgaaatctgcttcctagttctatcctccaatgacccaaggaaaagaatctcttccgctacttgctcttcagatatttaacacaactttcaggccttcttttgcattcttttcaggccacaggacactgtttttcggtgttcgttcccccaacccccccaaaccacgtatttttctcatttggcttattgcagtagctctctaaaggtctgcctgctctgttccctattcttcacccagcagccaaggccatgcttaaaatacaagtcaaatcacttcattcctctgctcagaacacttctgcagtttttcctgtcactcgaggtaaaaccttaagtcaacttgaagattacagaattgaattgtcttactgaaattacctttccaaaatcgatggttcccaattatgctgagccataacaatagtcttcttastcttaaaaataaaaatattctcttaatcataaaagatgaaaaggccccatgatacgttccccatatccatgccctcctccctattcatacttgttctaggcacagaggcctgcttgctgtttcctgaacatgccaacccctcttcctggaatacctgacttggaatatccacacctggttctttcctgcccctctttccatctccccttcagagtcaccttatcagtgaggcctcctctgactgttttatcttaagtagcaaatctctcccctcgctggtattctctcttttctttcatttctctatttttctccatagcact

SEQ ID NO: 60404 - DNA, 537 bp, Homo sapiens
gttggtaagaatataaattagtagagccattataaactacattattgaggttcctcaaaaattataaatagaactatcatatgatccaacaattccactactgggtatctatccaaaataaatgaaatcagcatgttgaaaagatttctgcaatttaacatctactgcagcattcttcacagtagccaagatacagaatcaagctcagcgtctatcaacaaatgaatgcctaaagaaaatgtggtatatttacactatggaatactattcaggcataaaatgaaaacttacagagatggctctkatttgtgacataatgagtttaaataagattagaaagcatacactgctattcgatttctactattaatttgccatacagtcctggaaaattcaactaatctctatgagtcttagttttctgtcttataaatagctgcagcattacttttttgaacctaatggaataaatgcaataaataatgtaaaagtaccttttaaaacagcctattttctaattttaataacaataattgt

SEQ ID NO: 60405 - DNA, 1342 bp, Homo sapiens
agtgatatcatccgacataaatgtaattgttgcttatgttagggaatcaagaaatgaaacagatctactcgaagatataatccagagaacttctagggtataatttaaaaaaataatttgcagacataagaaccctctgagttccatagtgaatggagatatgtacacctatagtttttaatgactaaagactaatttctcaaatatatgtactaaaaacaagaaaaaatagaagatgtgtgcctaaggaggagggtatggtagaaatatttcagcttgacttaaaattacttaacaatattaaatgaaagaaaatcaaagaaggcttataaatttctgaagaaacgtatgacttcatattaatatatgtctcttccctgtgctggcttccctgggtggagtgtatgtcatccctcccttgcacaagagggcaagagatgtagtggcaaatctgaacatcaactatacaagggctggcattactactccttccctctttatttagctgaaatgcgggaaggttaccttgcttgagtgagagggcatgtagagtgtcattgaggcataagatacatgagcaaaaagccatctcagctgttccaaccttggcagttggaatcatttcagataaagctctggatattctagaaaagagatcaagtatcctaccagcctctttctgcatttctattccacaaaatggtgagaaaaaataaaaggtttgctattttaagccaagaagtcgtagggtttttaatgcagtcgtagatatttaagacaacgtatgtaatcaaaatatcattttaaaataagagcaacaaatagatatttgcaaatatatccttttaaatgaaggaatgaagtgctaattaataatccttggtaaaattactatccaatcaagattgaattaaagttttttaaaataaaaagagtgttaagagctagttatgagcatttaattcattcaaaaaataatgatgctactgaaaacttacttctggatataaaacagaattatatgaacttgggtaatgtgaaaataatcacataactaagcaaaattgagggcagagaaaattggagaactaggcaattgctaatatcatttcttagtaaagaggcaaaccacagagcttacaagagccatcttaatgcctttgaaaagttcttaaccttagtgaactctgtcagaaagtagtattatttatgtactacacacatttgtttcartatcaacaattctctcgttttcattttaacttcttatgtaaaaatttagcaaacataaattgagttattatattcaaaatatccatagcataattctatttttagaaat

SEQ ID NO: 60406 - DNA, 792 bp, Homo sapiens
aaaggaggatagataggaagagtttcagattgcaatacaattctaagaaagtttagacgaggctgacgataaatccttgaaataaagacacctattgaaatagtcatgcatcttaaagaaataatctttattattactgccatggtcagtaatcaggttggagcaggctgagggagcatttggtgcaaaagcagtgatggatcaaggcgggggccatgcttggggtcatcaaccaatgtcactccctataaaagattagaacaccacattttcatggcttccacatcaacaaaatgaatatttttagtatactttctcccagattaaggtaaacatatatctttaaagcaatagaattttgattcctacatatttaaacttaatgttataacaggcacttcaaatgtgactcaaattgttgtaaatgtttattaattattataatattttattattgttgtaatcacctcttattcccctcattgctaagggaagtattcttgcccctaagtttgtgaggatagtcaaacacacaattcctgacactgacagatgagatcaatggcaatgtactggtcaaataatacctacagcaagtggaaggaggaaggaggacacggcatcggctagcagggcagatgggggctgcacttgggacagagtaaacaaccagtggatgtctcaggaggaatctgtatttccaytggtgccttcagagaatgtaattaacatgtttgaatatttttttgagccagcaggaaatgtgaacctgctactactcaagaataagca

SEQ ID NO: 60407 - DNA, 678 bp, Homo sapiens
ttcgtgtgtatattttgtcacctctagaagtttgtatactggccttatttattatttaaagatcttctaaaatgatctgagcctaaaaatttaattttgaaatgtgttaaaattactttgtttgcttacggtatattctttgttgttttgcttatggtatattctttctcttacaatctttatgagttatttgcagtttatattttcaaaaartatttcaattgccttgcttaaaaattctagttttgagttgttcataacagatcgttatgatactttaaaactctctacccattgactatgtcacattttctttttgagtgttgttcatttttgttttctctcctgattgttctgtttgacagaaattggctcacttcattttcccttttcttaatcctcactattttgccttccttttctgtttcaatgtttgctttttcctttgtgcattcattccttctataatttttattttattctggtattcgttccatgtcttcctaaaatatatgattaactaatgaagtgtcacttttttcctctcatataagcatttaatatcatttatttaaagattacaatttcaactaagtgtgccatgcttttttaaagtagtttagctattagcctgcaattttgaacactgtctactttttttaaaattatactttaagt

SEQ ID NO: 60408 - DNA, 678 bp, Homo sapiens
ttcgtgtgtatattttgtcacctctagaagtttgtatactggccttatttattatttaaagatcttctaaaatgatctgagcctaaaaatttaattttgaaatgtgttaaaattactttgtttgcttacggtatattctttgttgttttgcttatggtatattctttctcttacaatctttatgagttatttgcagtttatattttcaaaaaatatttcaattgccttgcttaaaaattctagttttgagttgttcataacagatcgttatgatactttaaaactctctacccattgactatgtcacattttctttttgagtgttgttcatttttgttttctctcctgattgttctrtttgacagaaattggctcacttcattttcccttttcttaatcctcactattttgccttccttttctgtttcaatgtttgctttttcctttgtgcattcattccttctataatttttattttattctggtattcgttccatgtcttcctaaaatatatgattaactaatgaagtgtcacttttttcctctcatataagcatttaatatcatttatttaaagattacaatttcaactaagtgtgccatgcttttttaaagtagtttagctattagcctgcaattttgaacactgtctactttttttaaaattatactttaagt

SEQ ID NO: 60409 - DNA, 678 bp, Homo sapiens
ttcgtgtgtatattttgtcacctctagaagtttgtatactggccttatttattatttaaagatcttctaaaatgatctgagcctaaaaatttaattttgaaatgtgttaaaattactttgtttgcttacggtatattctttgttgttttgcttatggtatattctttctcttacaatctttatgagttatttgcagtttatattttcaaaaaatatttcaattgccttgcttaaaaattctagttttgagttgttcataacagatcgttatgatactttaaaactctctacccattgactatgtcacattttctttttgagtgttgttcatttttgttttctctcctgattgttctgtttgacagaaattggctcacttcattttcccttttcttaatcctcactattttgccttccttttctgtttcaatgtttgctttttcctttgtgcrttcattccttctataatttttattttattctggtattcgttccatgtcttcctaaaatatatgattaactaatgaagtgtcacttttttcctctcatataagcatttaatatcatttatttaaagattacaatttcaactaagtgtgccatgcttttttaaagtagtttagctattagcctgcaattttgaacactgtctactttttttaaaattatactttaagt

SEQ ID NO: 60410 - DNA, 678 bp, Homo sapiens
ttcgtgtgtatattttgtcacctctagaagtttgtatactggccttatttattatttaaagatcttctaaaatgatctgagcctaaaaatttaattttgaaatgtgttaaaattactttgtttgcttacggtatattctttgttgttttgcttatggtatattctttctcttacaatctttatgagttatttgcagtttatattttcaaaaaatatttcaattgccttgcttaaaaattctagttttgagttgttcataacagatcgttatgatactttaaaactctctacccattgactatgtcacattttctttttgagtgttgttcatttttgttttctctcctgattgttctgtttgacagaaattggctcacttcattttcccttttcttaatcctcactattttgccttccttttctgtttcaatgtttgctttttcctttgtgcattcattccttctataatttttattttattctggtattckttccatgtcttcctaaaatatatgattaactaatgaagtgtcacttttttcctctcatataagcatttaatatcatttatttaaagattacaatttcaactaagtgtgccatgcttttttaaagtagtttagctattagcctgcaattttgaacactgtctactttttttaaaattatactttaagt

SEQ ID NO: 60411 - DNA, 984 bp, Homo sapiens
tcatttaaaaaggagaagtctaggataaaacctttaatttttaatcaaaactttaaattccttaagaataggagttagatctgatttgtttttgttcctgtggtcatcttctccactcacacttctctgcctgcacagwgcttttcatggttttgaagaacttagcaccaatttctccctagtcttggaaaatgagaatagtttacttttacattcagtattggcctctttccctgtttacagagtcctgaagacaagtgaatgtgtatgctaggagacatttagtaacaggctatactgtggacgtaaatctggccaaatgaagtaaagttcatttcatagcagtaggagggaccataagaatttaagagtgcattttcttgtctacaggggtatcacacctaattgagaacttttgggtgagatttttcaactattattttgtataaacttgcagcattagaatttatagaaatttttaattttctttgtgtgtgtgtgttttttttttaaactccaggttacggaaaaatctaaaatccctaatcattgtacatccttcttggtttatcagaacacttctggctgttacaagaccatttattaggtaatttttgagagccattgactttaattttattttttttatttatttatttttagttaacacataataactatacatacttatgggatacagagctatattttgatatgtgtatacattgtataatgatcaaacctgggtgattagtacatccatcacctcagacatttatcatctttttgtgttttgaacattcaaaatgacatgatttttgtatcttgtaaacattgtatccattgtatttgtcagaaatatggaagtaattatttttattttcttccatagctcgaaattcagccaaaaaattagatacgtgtttaatttggcagaactagcagaacttgtccccatggaatacgttggcataccagaatgca

SEQ ID NO: 60412 - DNA, 832 bp, Homo sapiens
aaacacataggcacaaaactatttcagtatctttacaaagtattgcttactactggactgtttattgaaccagtaaaacagggaagaaaaaagaaaccaaaaatatagcatatcacactttattacagtaaaatactgaatgctaaacactactatgaaaacaaaatcattttcaagatggaaaaaaatatgtaaaaattataacaactatatataagatactgtagacaattttgtaattaaagaaagcatgcaaagtaaaacagcacaattcctttgaattacaagtaataaggaatactaggttcgggggctaaaagtatacattaatttaagttggtcatttcacaaagtagagcaatgtcaggcaaacctacttaaaaagtcaccccaaatgcctcctttcagaactcccttcccacaaactgttaactatatgtctcttcaaaagtttcttacttgattgactraaaaagagcatgccataattatcaagaaatatttttgaaacagctatgaaaaaaacatgagagcagtgggcaaataagaggggaaaaaagccactggtgtactctatacacactttttaagtccttgagaatattcaagggttagcacaatttcctatcttagtaacaaatatatgaactttagaaagaatgatgtatttcaaacaaaatcccttagtacattaataaagatcagattaaaaacagtgaaacatttaccttcccactcaaactcattactattctctgacggtgtgtctaagccatctaagtcaatctccccactttcatccaaatcatctgacaatacagagccatcacta

SEQ ID NO: 60413 - DNA, 832 bp, Homo sapiens
aaacacataggcacaaaactatttcagtatctttacaaagtattgcttactactggactgtttattgaaccagtaaaacagggaagaaaaaagaaaccaaaaatatagcatatcacactttattacagtaaaatactgaatgctaaacactactatgaaaacaaaatcattttcaagatggaaaaaaatatgtaaaaattataacaactatatataagatactgtagacaattttgtaattaaagaaagcatgcaaagtaaaacagcacaattcctttgaattacaagtaataaggaatactaggttcgggggctaaaagtatacattaatttaagttggtcatttcacaaagtagagcaatgtcaggcaaacctacttaaaaagtcaccccaaatgcctcctttcagaactcccttcccacaaactgttaactatatgtctcttcaaaagtttcttacttgattgactaaaaaagagcatgccataattatcaagaaatatttttgaaacagctatgaaaaaaacatgagagcagtgggcaaataagaggggaaaaaagccactggtgtacyctatacacactttttaagtccttgagaatattcaagggttagcacaatttcctatcttagtaacaaatatatgaactttagaaagaatgatgtatttcaaacaaaatcccttagtacattaataaagatcagattaaaaacagtgaaacatttaccttcccactcaaactcattactattctctgacggtgtgtctaagccatctaagtcaatctccccactttcatccaaatcatctgacaatacagagccatcacta

SEQ ID NO: 60414 - DNA, 1142 bp, Homo sapiens
agtacctgtttaccccttgtcatcatctggtatcatctggtacttttgtctttccacaatcaataaattaaataatgacatcttactgtagttttaatctgtttctttgattagtagtaagcttgagcattttttcatagtttgggggaccatttgcatttcttatttttttcttttttagagacagggtctcaccttgccactcaggctggagtgcaatggcaagatcacggctcactgcagccttgccctcctgggctcaagccatccttcctcctcagcctcctgagtacctgggactacaggtggatgccaccccacccagctaattaaaaaaaaaaaaaaaaaaaaaaaaacgtgtaaaggtgaggtcttgctatgttaccaggatggtctagaactcttgggtttcaagcaatcctcccaccttggcctcttaaatttctttactattaacttttttctscatattttcctattggagtgttagctgatttttattaatctgtgagagttctttcagcttaatgtctattccctctttgttctggttttgtagacattgtatcctagtgtactgttcaactttgactacgttttatggggttctttcctaggggcaacagttaatatacagaagattgcattgattttgtgtagccaaatttatccacactttccttttggcttctgagcttcaatataatgcttagaaaacccatttccattccagagtcatatacatattcactcacattttcttttaacaatttttatgattttttaatacttaaattctggatccacccagaatatattttgatgtatgaaatgaagtaggaaaggcaatgatcatgctagaactaaacagctgtgctttgaaataaagctttgtggtagggcgcagtagctcatgctagtaatctcagcactttgggaggctgaggtgggtggatcccttgaggccagaagtttgagaccagcctgggcaacacggtaaaacctgtctctacaaaaaaaaaaaaaaaaaaaaaaaaaaaactaaaaaattagccaggtggggtgcatatgcctattgtcctgactatttgggaggctgagataggaggatcgcttgagcctgagaggtcaaggctgcagtg

SEQ ID NO: 60415 - DNA, 1142 bp, Homo sapiens
agtacctgtttaccccttgtcatcatctggtatcatctggtacttttgtctttccacaatcaataaattaaataatgacatcttactgtagttttaatctgtttctttgattagtagtaagcttgagcattttttcatagtttgggggaccatttgcatttcttatttttttcttttttagagacagggtctcaccttgccactcaggctggagtgcaatggcaagatcacggctcactgcagccttgccctcctgggctcaagccatccttcctcctcagcctcctgagtacctgggactacaggtggatgccaccccacccagctaattaaaaaaaaaaaaaaaaaaaaaaaaacgtgtaaaggtgaggtcttgctatgttaccaggatggtctagaactcttgggtttcaagcaatcctcccaccttggcctcttaaatttctttactattaacttttttctccatattttcctattggagtgttagctgwtttttattaatctgtgagagttctttcagcttaatgtctattccctctttgttctggttttgtagacattgtatcctagtgtactgttcaactttgactacgttttatggggttctttcctaggggcaacagttaatatacagaagattgcattgattttgtgtagccaaatttatccacactttccttttggcttctgagcttcaatataatgcttagaaaacccatttccattccagagtcatatacatattcactcacattttcttttaacaatttttatgattttttaatacttaaattctggatccacccagaatatattttgatgtatgaaatgaagtaggaaaggcaatgatcatgctagaactaaacagctgtgctttgaaataaagctttgtggtagggcgcagtagctcatgctagtaatctcagcactttgggaggctgaggtgggtggatcccttgaggccagaagtttgagaccagcctgggcaacacggtaaaacctgtctctacaaaaaaaaaaaaaaaaaaaaaaaaaaaactaaaaaattagccaggtggggtgcatatgcctattgtcctgactatttgggaggctgagataggaggatcgcttgagcctgagaggtcaaggctgcagtg

SEQ ID NO: 60416 - DNA, 572 bp, Homo sapiens
caaaataaattacaaagaagtaatttaaaaacccaaaggctcatatcatatgttgatctgaaaaggactctagtaaatctattttccaatttcttagatcgtattgcatatctaatgaatgtaggcttcaacagctggttcacacctctgttactcaggttctatgatgataaactgtgaataacagtgctagtaaaatttcagccaagattatatgataaaggtgtctctgaaagatcttataactatcaaaccccccatgaatatgcagtgaccaagcacctgtatttctctttctccctgtggatgaaatagaaatatagaccttcatggtagcgtatatcataagactataatccccatgccaactgaagtcacrtttattttgatcaatactatattcctatcacctattacaattatcttagcctagatttccccaaaagtggagtggaagacaaagcctgtatttgaatagttatttgagactgtgacaccagtgggcaagagcaaaggagggagaagcagtacaaggtcacattatcaagtcaactgctgcagcagtaacaggt

SEQ ID NO: 60417 - DNA, 2454 bp, Homo sapiens
tgcataaaagcctttgtttcaggtagacctagtcttaaaggtcagaaaaaagacatattccagtgatattgttccagcttcagagcagcactctggcaatgactattatgttaatggtgaaatatattcaataaaacattgatttttgctattcaatggcactttgccacaagggtgatcatagagccagtagatcacaaaaaatttactataattttagggacatttttattccaacattttatgaaaggtgaaccactctattacctaattcagtggcatatataaaaattattaaaacccatctagattattactttattgatatttctcacctgcacattctataatatacaatgtttatcttggaatgacaataccttgctgcacaaaaagaaaattgaaaacgagatcttctctaagagaaaagcaagatcattatgtaaacagcagccgggtctcattcagaatatgtcacataaataccacaccatcaaacaagaaatgtaaattattatacatatgctgtaattgaaaattgtattatacattagtgaagtcacccatttatctaatcacaatcagttcccataaaatctcattttgaaaagttgagtgcaattcaggggaggtggctatgagaatttcaatcatggaaatctaagtttggattgagatctcagcaaggtctgcaagtcagttttcattgctcctcagacatgcctttcaaatctttgaacttatctgtatgtgaactgatcagcccagcctctcatctggggagaggagatgagatcagccagcattcgtggccctggttcaaaaacaatgtgcaacacatggtgccatctgaatgttttytgggctttctcacccctttctgactagaacatagtcacttacgttcattcatttgttcacatttttttaattcagcaagtatttacttagcaccttatatgtctaggctttgtgctatgaactgacgacacaaagggagccaaaacacagtttctgccttcaaggtgttgccagtctagtggggataatagaagaacaattgcactattttatatgcaattctaaactgtgatagatgcaaaaaagaaagacagagggtgctatgagagcaaagaacacatctggtgctatgatttaaacgtctcccacagtttacgtgttggcaacttaatccctaatgcatcagtgttgagaggtgagaactttaagaactgcttaggtctcatgacttttaagagggttagggcttgttattgtgagagtgggtttgttataaaaatgagtttgaccctgtcttgctcgcttgcactctcttgcctttctgccttccaccatggaatgatgcagcaggaaggccctcaccaaatgaaagcccctcaaccttggacttcccagcccctagaactgtaagaaataaatatcggttcttcattaattacccagtctcaggtattttgttatggctgcataaaataagttaagttatctagtttgtggggagcattactcaagagtgaatatgggtgggaaagagacaaataccaactaaaggtataaagacttagaggggagaagaagcttggagcatagcaaatgcttagacaaagttgatatggctggatccctgaacaagaggcactggacaaggctggaaagcagatgaggtggggtagttatagtctacaaaagccatataggccatgctaaagattttggattgtattgtaagtataatttttaggttgggggctagtggtagggagagtagagcaacgaaatacctagtctgagttgcactttaaagagatctctcaagctgcagatgaagaacagatggaattggggcaccattgtcataaggaggccagttgaaggctgctgcagtgcaggggaaatatgatggtagcttgcgtgaggattggcaatgaaggaaatcaagagaagtgagtggatttaagagatgtttaagagttaagaactagagatggattcggtgttgggggtggtagtgagggagagaaaaatatcagagatgcctcctgggcttgtggcttgaatatctggatctatggagttgcaaactcctaagacgggaaacatgaaggagggccagcagccttactatgtcaccccacatgttttctttgctgtatttactgccataaacaaatgataagttgtgggctgtactcttccctataatgatgacaaataaagggggcaaactacctccaacactctctgagatagcaccatgaattccctttctgaatttatcaatagaaaatgtgctaatggatattaatattcagtcatggcaaatatgaattcagttgtgtttgaatctctctccagctgccaggagagcttcactatcaacctcagacattcagtggataaaacataaagtgttttttaaaattgcccctatgc

SEQ ID NO: 60418 - DNA, 887 bp, Homo sapiens
tgcataatgtccagtgaatttattacagttccaaagtcggtcgcgcatggtggctcgcgcctgtaatctcaacacttcgggaggccgaggcgtgtggatcactaggtcaggagttggagactagcctgaccaacatggtgaaaccccgtctctactaaaaatacaaaaattagccaggcatggtggaacgcggctgtaattcccgctactcaggaggctgaggcaggagaattgcttgaacctgggaggcagaggttgcagtgagccgagatggcgccgctgcactccagcctgggcaaaagagtgagtgagactcctgcgcaaaaaaaaaaaaaaaaaaaaaaaaaaaaaagttgcaaagtcatactcacctttctgctcttgtcagacaattaaggggtctttgaatacttcagccctaataagttgcttcctaacatacatatttccgtgcytatctaattttaaatatctttttgtttcaacacctaattttttatttagatctatctgtatgtttacaatgtattttgctctgtgttcattctttgatttcagaacttcaacctttctgaagcatgttttcagagtttctctttagtttctttagtggaattctgctggtggcgttttgtttcttgtctctaaataagttatttagccataggttgatgaatatttttcttggttgagaatttcagaatggcattattattcttaacaaataatattgtttattttacctttcattctttcagatttcaatatgattaaaggtaatttgatttttctagtgctaattgaaatatttttcccttcctgattgtttactatttctctaggagatacgtaggtgtaggtttatctccattgtagcttgcttagca

SEQ ID NO: 60419 - DNA, 887 bp, Homo sapiens
tgcataatgtccagtgaatttattacagttccaaagtcggtcgcgcatggtggctcgcgcctgtaatctcaacacttcgggaggccgaggcgtgtggatcactaggtcaggagttggagactagcctgaccaacatggtgaaaccccgtctctactaaaaatacaaaaattagccaggcatggtggaacgcggctgtaattcccgctactcaggaggctgaggcaggagaattgcttgaacctgggaggcagaggttgcagtgagccgagatggcgccgctgcactccagcctgggcaaaagagtgagtgagactcctgcgcaaaaaaaaaaaaaaaaaaaaaaaaaaaaaagttgcaaagtcatactcacctttctgctcttgtcagacaattaaggggtctttgaatacttcagccctaataagttgcttcctaacatacatatttccgtgcttatctaattttaaatatctttttgtttcaacacctaattttttatttagatctatctgtatgtttacaatrtattttgctctgtgttcattctttgatttcagaacttcaacctttctgaagcatgttttcagagtttctctttagtttctttagtggaattctgctggtggcgttttgtttcttgtctctaaataagttatttagccataggttgatgaatatttttcttggttgagaatttcagaatggcattattattcttaacaaataatattgtttattttacctttcattctttcagatttcaatatgattaaaggtaatttgatttttctagtgctaattgaaatatttttcccttcctgattgtttactatttctctaggagatacgtaggtgtaggtttatctccattgtagcttgcttagca

SEQ ID NO: 60420 - DNA, 887 bp, Homo sapiens
tgcataatgtccagtgaatttattacagttccaaagtcggtcgcgcatggtggctcgcgcctgtaatctcaacacttcgggaggccgaggcgtgtggatcactaggtcaggagttggagactagcctgaccaacatggtgaaaccccgtctctactaaaaatacaaaaattagccaggcatggtggaacgcggctgtaattcccgctactcaggaggctgaggcaggagaattgcttgaacctgggaggcagaggttgcagtgagccgagatggcgccgctgcactccagcctgggcaaaagagtgagtgagactcctgcgcaaaaaaaaaaaaaaaaaaaaaaaaaaaaaagttgcaaagtcatactcacctttctgctcttgtcagacaattaaggggtctttgaatacttcagccctaataagttgcttcctaacatacatatttccgtgcttatctaattttaaatatctttttgtttcaacacctaattttttatttagatctatctgtatgtttacaatgtattttgctctgtgttcattctttgatttcagaacttcaacctttctgaagcatgttttcagagtttctctttagtttctttagtggaattctgctggtggcgttttgtttcttgtctctaaataagttatttagccataggttgatgaatatttttcttggttgagaatttcagaatggcattattattcttaacaaataatattgtttattttacctttcattctttcagatttcaatatgattaaaggtaatttgattwttctagtgctaattgaaatatttttcccttcctgattgtttactatttctctaggagatacgtaggtgtaggtttatctccattgtagcttgcttagca

SEQ ID NO: 60421 - DNA, 938 bp, Homo sapiens
cctcacagtgttcattctgattcaaaggagggacctcgtctgtacctaaggtattgtttcttttattcatgggtctaagtatgaagaacagtatgtatgcatgatgcatgtgtctatccgtctatacccacacatatgtatacacacacatatcagctaacatctaagacctgaataattacatataaatatttcagatttccagtttctcttggaaataaatcagaagatctggcaacatgaggttgagtttgattggcagctgtccctcaagtcgtggcaggtacacatggtcccaccacttcacttagtttgtgaacagcctgtcccctttggttatttgactgtgctattttctgtctgcatccgcctctataccacaggtcttaatggcaagaactcttcagaaaagcagaagcaaactccagtcaaatagattgggggtgggtaggctgggagttactttcaatgaggggcctcctttgtctttcaccgtgttgaagagttaaactcggaagagaggaattcagaaaggatgagtcaatttttttaattaagaatttttttttggcacagccctggtcaagaaggctctttgcctttctccacagttgcccggctgagcagacggttttgttggaagtgggaataaagctatgggtcccaaacatatttcagcaatgacagtgcttctccatgtgggcactatccatccctagggagtatattaacttgtcagagtttttttaggtggtcacagtgcttggaaggacaccacttgcatttggtgggtaggactaagatggtagagtccctgcaaaataaaggatttgctgcatgccccacaacttttggacatcctgccagatatttgtatgtttataattatcatattaataattatctgaaaaacrtacttataattatcttaactaaaa

SEQ ID NO: 60422 - DNA, 511 bp, Homo sapiens
actttatttgaaaaatttgcagtgcttctaagatgactagagacacctttgccttaatgtgttggagaatgatagaagaagtcaatgcctaacaacttctcacttaccacaatgacagcgcagctgatgagctaatgccatctcctctttaggcatagaggaatattgttcatgtgttgcccaagctaactatagcagactctctagaagtgagacccaggcatatgaatgttttcatacaagctcccaattctaatgtgacctcaggtttgagaaccactggggtagacaattataattctgcctaaattcacacaagggctatatgattatttttctagcagtagagttaactgcctgttaattttatatacatgaaggcacatggaggtaggatgccctgagccaacagaagctagaaactaagtcttctgcmtaggttagaagtccccattgtgtttttaaggccaactatgattcacttctcttaagcctgagattgcctgagagg

SEQ ID NO: 60423 - DNA, 500 bp, Homo sapiens
gtggcctcacggcctaacctggaccatcggacagcggagtgctaccaacctgtcattgatgtcattcattctttcgataaatatttatatgttggccaaatatgcgctagatgttgggaggaagtacaaatatgagaatacaatgtatattgggcctccactgcaacaagtgacaggaatagctactatttattgtgagactactttgtttcagtactttatttacattatttctaattttaaaaacagtgacaaaattaaacttttcaaagttgtttctgatggtaatcttcccgagtgttggtatttctctaagtcagagrgatggtaattcaacatcctgacgtttctgaagtatttcaactagcctaagatttctcaaaatctctaaactccttttctacccccaacattacatagggctaagatgtgtagagaggttcatcactaactacaaataactacacttttggaagtataagagttcttcgacatgccaa

SEQ ID NO: 60424 - DNA, 500 bp, Homo sapiens
gtggcctcacggcctaacctggaccatcggacagcggagtgctaccaacctgtcattgatgtcattcattctttcgataaatatttatatgttggccaaatatgcgctagatgttgggaggaagtacaaatatgagaatacaatgtatattgggcctccactgcaacaagtgacaggaatagctactatttattgtgagactactttgtttcagtactttatttacattatttctaattttaaaaacagtgacaaaattaaacttttcaaagttgtttctgatggtaatcttcccgagtgttggtatttctctaagtcagagggatggtaattcaacatcctgacgtttctgaagtatttcaactagcctaagatttctcaaaatctctaaactccttttctacccccaacattacatagggctaagatgtgtagagaggttcatcactaactacaaataactacacttttggaagtataaragttcttcgacatgccaa

SEQ ID NO: 60425 - DNA, 2014 bp, Homo sapiens
agggtcagtgtcttgtccaaggacacgtagctagaaagaaggaaaacaaatttgattctgatagacgttaaatctctttgcaatatttttcttagggcacagctcatagcctctgattataccagaagtttgttgcttctggaaacttttagtatgttgagacatttaaatgattgccatataacattggaacagaaaagaaaaaaattgatgactctccttccctttttcccagaaaaattctctctctctctctctctctctcacacacacacacacacacacacatattgcctctttccttcattctagcagaccagctttgtgatactggttaaccttcctagagcttcattttgttgcaccttcttcatttctaaaataagaatacacctacctcttttaagctctcagcagggatgctgtgatgattaatgaaaaagtcttcatgaatctcatttgattttgcagaagacagaagtttaataaagctgaagaatcattataatggtaattagtcatattttaggacagatgggcaagtgtctggcagtggtggcttagctggagctgttgccacaccaaagcaataaartaatgtcaatatgtcagccacatcaagtcagacgcaaagagggtgcaatagcagcctacttcacacactgctttgttcatcatctctgcttggcacagactgggacagagttacagcatttctaagacagacaggcaggcagttcgagaagagccacctcattattgtggcatataatctccaaagatagccaccactgatagcttccttccttgttgatatgcatgttactcctcacactaagagagtgaggagccccttgaatctggcctggccctgtgacttgtttagatcgagagaatactgtggctatgactctgctaattctaggtccagcctttagaaagactggcagcttctgcttcctctatcttggaagaatgatgcaggataagaagttcaaataccctgagcccatctcactatgagaaagcccaagctagccatgtggaaagagggacagaaacaggcctgaccagctctcggatattccagtcatcccaactgaggttctgaatgtgagtgaagaagcaatcttagacatttcagcttcagtagataccatgtggagcaaaagaactgttcagtccagattgtttttaagccattgtgtgctggcatgtttcttatatagcaatagatatttgagacacctatcaacatttaaaatagggtcatatatctcttgatattctctctttgctaaatgaagtagaggatttcttcagagaaatgaaataagggaaaaacagtaagagtttgatacaattgagaggatagttgccttttagaggatacaaattttagttttataaaagtctgattaagatagagcagttatcttttctttgttcactcaggcattcatgctcaaatatttgttgaataaatatattgcttactatacatcagacatatggattatacacacacagtctccaacttacgatggttggacttacatcataaccttcataaattggagagccatcatgtttttcactttcagtacagtattcaataaattgcatgagatatcaaacactttattataacataggctttgtgttagatgatttttcccagctgcaggctaatatcagtgtctgagcacatttaagataggctaggctaagttctgatgttctataggttaggtatattaagtacattttcaatttagattatattttctaacttatgatgggtttatcaggacacaaccccatcataagttaaggaacatctgtagggctaagtgagatggataatgtccctgatctcatagtgcttatatcctaattggggaagacgaataacaaccaaagcaaaaagataatttcagttggtgataatgcaattaatctggggaagggtaatgtgatagcattatcagagtctttctaagggttccccaca

SEQ ID NO: 60426 - DNA, 2762 bp, Homo sapiens
aaactgaaggcagatgacattatggtgaacatactggaaaggaattaaagcagcttgtgataagttgaaggcaaatttgaaggaagatcacttggtgacagtcctctagggattgtgcagtgacaccttatatttcatctccagctcagcccgaacacatggcacaaatgagaatcttctcatatgaggatttcatctgggtttataacctagtcagttctatttctttatttgcctccagaagggctagaagcaaaccccatctgcattcccaagggaggcaggataaggctcattaacaagatgtttgaaatggccctgcttgcagttttacaaagaaacgttatgaattagcagtgtaatatgttacacggtacaatctctcaccaccacagacccgggatttagtgctttatagtatagctatattttaaataagacataattagtatcagaactgtcagatttcagcatcttaaaattagatactaaaagtaaggttgataaaattattttgcatcaaatattaaaagatggtttcctgtaagaaatataaatatggcatatcttaattttcaaatttagcaaaactgaaaccaaatcttcccatagtaataaatctctctatatcatacaaaagctctctctagtctatcccggagattttaaataaagtgtaaaattaacacatttaatttctgtaaaatatttcatatttccttcttgatgtatggcactcctctagattttatgaatatattctggaatttactgttgctatttcaaatactttatcatattttgttatactgtatgatgcattagaaattgatgaagaaataagactacaatttgattaattataggccagaggttttaattatgcctttcagttaatcaaagtaatttcctctgttataacagaagtaatccttttacagactttttttttttttttttttttttgagatggagtctctcactctgttgcccaggctggagtgcaatggcacgatctcagctttacaaaaacaaaaaggctttataatcctaggcttacttttactcaccattgtttactaattgaagtttagaaatatttaatgcaagtagtggctatggtttattttattattattattatttttttgagacagggtctcactctgtcacccaggctggagtgcagtggtgcaaccttggcttactgcaacctytgcctcccatgttcaagtgattctcctgcctcagcctccctagtggctgcgactacaggtgcctgccatggtgcccagctaatttttgtattttttgtagagatggggtttcaccattttggccacgctggtcttgaactcctgacctcaggtgatccgcctgccttggcctcccaaagtgctggaattacaggtgtgagccaccgtgctcggtccttttacagacataatttttatgcacagtcaataatcctacattttatagagttatatctaattataaatagcagagcattacattgaactaaccccagtattctcataatgactaaaggtcagtaaccaagccaagcccaggaatgtggctgggctccaagaataatctagaatgatccaggttttgtccatgctccattctgcccttcaatttcattgttttctttctctgaggactagctttctctgctcccagtcaacatacaaaacatggagaacagtagctccctgattctatgtgttagaattcagtcattcaggaagaaactaaacgtactctttctgttccaattttaaaattcctaggcaaaaaaaatggctattttcatcagttgtccattcttcgatgagtcaactctggtcaaggagtgggtacacgttggagaatagggtttgacccaacctgtcaactggagacaggagccatggacatgtagggctcaatggctgccctggatctacggccattatgatgaggatgtgatgtgcacctatacaccaacacaccagagactgtcctaaagagtgataacttaattcagtcgctttaattttttaaaaaaatcaattttaaaaagtcaatttgcttagaagaaaactacaatcataactattacttgggtctgtttaaacaattttatttttaaaaactttgtgattttggtgatgcataaacacactgtggttatttttatttgcctattgggaattctgatgaaaaattaggtgagcaaagggacatattttttaaactataagacagctgttcttattcagtcactgagtgataaggagggaagtttaaggcttagaattcttggttgttgtagaagatacttgagttgctgactttaccctttcatgtttgctttcctgccctgcagaaacaagaaagtgaaatccttcttatatccctgaatccccagaagccctaggtagtcctgttacttggttctggtgaatgggatataagtgaaaaactattggtgcttccccttctgttcttcctgcctgaaatcctggagggatacctgaggtgcatcagccacccctaaggatagaaaaagaaggaaaagaagagaaagtgagaaagcatggactgcctctgcttggagtcctcttgtatgaggcagacaaattccttaatataagccactctgtggggtttttgtgaaactcatagccgagcacaatacactggatatagctatcccagcatcaggaaagtggcaagaattactgaaagttggtacttaaaggtagccaatt

SEQ ID NO: 60427 - DNA, 872 bp, Homo sapiens
gcattagccgcctgggaagcagatcttcctgcttcagctaagactggaacctcctgatcccaggcctccagtctttaagtctttcagctgagagtcgagagataacaggaagaaacaaaccatccctgctgtgtgctgtttgaatatttgacccacagaaaccatgaaataataattactgtttcaaatcactgamtgttggggtgatttgttattgtagcaatagataattaaaacagaggatctagaatggcagtagaggcattaggagagtttggtgagatgaatttataaaaaacctacttgttctattattaattaatgagggacatccagtgactccctgtatttctctttttattacacttttaaaaattgagatgtcattgtatacaataacatgcacagatcataagtgttgttcaatgacttttgacaactaagacccatatgatcaccaaagatacagaagacttacttccatcacccagaaagtcacctcttactcctttcgagacaattctctcatcccaactcctcaatcactttttaaattaccatagattcattttgccttctaaaacttttatacaaatggaattatgcagtatgtattattttgtgtctggtttctttcactcagcacactgttaatgagatttatccaagtcattgcctgcatcaatagttcaccccttttcttattagcaagtggtattccactgtatggatatgccacaatttgtttatccattcttctcctgtatttctcaattaaaataaatttagttatttctacagtatcatatgcagtggaaaaatcaaaattacatgtagaaaaatttggtattataaaaagcaccttaaaaata

SEQ ID NO: 60428 - DNA, 1620 bp, Homo sapiens
agcaaacaacccagagcacatcctcaagccagggcaaaccgtatcctgttcccccaaaaagacagcaggctaagtaaatatttccctatggccctgcaaaaaaaaaaaaaaaaaaaaaaaagcctagctaaataaaaagccaatcatttatcatttgagcgtttcaattaccaagtgatgtgcatcatcagagatactgcaacaccgtatacatatgtgagggttgtagagaaactactcagttgtgtctgttgcctcttcaagaggtagcctgaaactaagagaaacatgaaattgtgtttgcttcattttaatgactttcaggtagtccactggcatcattctgtagggcctattaggaggcacttggaactaaggtgggacagtaaaatagagatttctgaggctgtatggggtgcagttgtgaaaaactgaaaacacatccatgcagagctttggtttcctggtggtggtttaaggaatacaaggcccctaagcaaaattgtgaagttcaagaagttgctcttgatacagacccaccttgctcttgaattctcctctgccctgatggtaccgtgacccctactcccccttcagagtgcctggctcctgtccccagcaaaacaggagaggtcaaatccatcagtttgagtgagatccagtcatccagtctgcgggtgacaagctcagtctcattgcccaaagtataaaagcaccagcctctcagcatggccctgctggcccctccgccctcaccttctcctgtccagccacactaggatcctttcattcctcaagcactgctctccttcttgctgtcaggcctttgaacacacagttctctgtgcctgagatgctcttctcccctcttcccgtcccagtgttcctccactcaacctttgtaggttyctccaggaagcctaccttgattgacccatagcctaggtcagctctgctccttcagccctttcccagggctacaactttgcttctcctttgcaagtcttcccgtcattgtccatccttcatgggatattatgttccctcctacactgtaagctgtggggtgctgagctctgtttattgctgtaccccccagcatagactggcccatggtgagtgccaaatgactactctataagtgaatgatttaatgaattaatctagtctagatatctacagtaacatcatatctcaagagaatatatctttaaactcctcaggaagctttcaggtttttatcctagaccagctgctcttgctgggggaacagaccaggggccagagttgctgaagacccatttagaagatgctgtgaccacaagggcatatccaagcttcttgtgtctgtgctgctgaggcacgtgtctgcacctaagccagacccactctgttcctttttgctctcctatgtccctaacccctcccatatctctgccccccaaatttcaactgatgaattctgaattcattcttactgtgttcacatatttgcttttgttccccacccctctctactttagctgaatttcaccctctatccaggcagctattatacaaccagtcatctacaacccttcttaatttaccttattctgtgcttcagatttccatccctat

SEQ ID NO: 60429 - DNA, 1620 bp, Homo sapiens
agcaaacaacccagagcacatcctcaagccagggcaaaccgtatcctgttcccccaaaaagacagcaggctaagtaaatatttccctatggccctgcaaaaaaaaaaaaaaaaaaaaaaaagcctagctaaataaaaagccaatcatttatcatttgagcgtttcaattaccaagtgatgtgcatcatcagagatactgcaacaccgtatacatatgtgagggttgtagagaaactactcagttgtgtctgttgcctcttcaagaggtagcctgaaactaagagaaacatgaaattgtgtttgcttcattttaatgactttcaggtagtccactggcatcattctgtagggcctattaggaggcacttggaactaaggtgggacagtaaaatagagatttctgaggctgtatggggtgcagttgtgaaaaactgaaaacacatccatgcagagctttggtttcctggtggtggtttaaggaatacaaggcccctaagcaaaattgtgaagttcaagaagttgctcttgatacagacccaccttgctcttgaattctcctctgccctgatggtaccgtgacccctactcccccttcagagtgcctggctcctgtccccagcaaaacaggagaggtcaaatccatcagtttgagtgagatccagtcatccagtctgcgggtgacaagctcagtctcattgcccaaagtataaaagcaccagcctctcagcatggccctgctggcccctccgccctcaccttctcctgtccagccacactaggatcctttcattcctcaagcactgctctccttcttgctgtcaggcctttgaacacacagttctctgtgcctgagatgctcttctcccctcttcccgtcccagtgttcctccactcaacctttgtaggtttctccaggaagcctaccttgattgacccatagcctaggtcagctctgctccttcagccctttcccagggctacaactttgcttctcctttgcaagtcttcccgtcattgtccatccttcatgggatattatgttccctcctacactgtaagctgtggggtgctgagctctgtttattgctgtaccccccagcatagactggcccatggtgagtgccaaatgactactctataagtgaatgatttaatgaattaatctagtctagatatctayagtaacatcatatctcaagagaatatatctttaaactcctcaggaagctttcaggtttttatcctagaccagctgctcttgctgggggaacagaccaggggccagagttgctgaagacccatttagaagatgctgtgaccacaagggcatatccaagcttcttgtgtctgtgctgctgaggcacgtgtctgcacctaagccagacccactctgttcctttttgctctcctatgtccctaacccctcccatatctctgccccccaaatttcaactgatgaattctgaattcattcttactgtgttcacatatttgcttttgttccccacccctctctactttagctgaatttcaccctctatccaggcagctattatacaaccagtcatctacaacccttcttaatttaccttattctgtgcttcagatttccatccctat

SEQ ID NO: 60430 - DNA, 880 bp, Homo sapiens
atgggaagggaaagacttaattcaacgcaactattcccttgccctgacaaacctttccaggtggcccacactttgcttggagacactcacatatttacgaccccaaatctgacggggttggggacgacggaaaccttcctgtggaatttcctgcagctsgtgcctccccccaccttacccagtcccaggggggccatggaaccttctgctggatccaggagcaggggcttgggaacagttagattcctatcatgctgagcaggagggaatatttgtggctgggcaattcccagcaaactcaattcatttaatgaaagatagcacaggagagaaaggctggtggtgtcatttggccatggagtggcaggaacacagatggtgccggcgtttcagactcctggacaggccgactgccccggcatccccatccacagcagcttaggggatttgtattgagcggctttgcaattgcttttccttaattaaaaaaagcacctgtgtgcacccgtggaggggggacaggcagacacgctccacggagtgcactgccacggcctggagcacggcctgagcccccttgcccggctggggctggcacggctccagatgcatcccctgctccaggggctgccactgccaggacaaagctgctggtgccaggctgcccacggctggactggaaggaggtggcggctgggagcattcctgcaagtctccacgtggctctgcagggagctggggagccaggacacccaagaagcaaacagcaggaaggaggcaaggccggtgggtcacagggagggaagcacagccttcgaggacacagggtagtcgcttctgagtgctgggcagctcagcagggccacagtgtgggagagaa

SEQ ID NO: 60431 - DNA, 880 bp, Homo sapiens
atgggaagggaaagacttaattcaacgcaactattcccttgccctgacaaacctttccaggtggcccacactttgcttggagacactcacatatttacgaccccaaatctgacggggttggggacgacggaaaccttcctgtggaatttcctgcagctcgtgcctccccccaccttacccagtcccaggggggccatggaaccttctgctggatccaggagcaggggcttgggaacagttagattcctatcatgctgagcaggagggaatatttgtggctgggcaattcccagcaaactcaattcatttaatgaaagatagcacaggagagaaaggctggtggtgtcatttggccatggagtggcaggaacacagatggtgccggcgtttcagactcctggacaggccgactgccccggcatccccatccacagcagcttaggggatttgtattgagcggctttgcaattgcttttccttaattaaaaaaagcacctgtgtgcacccgtggaggggggacaggcagacacgctccacggagygcactgccacggcctggagcacggcctgagcccccttgcccggctggggctggcacggctccagatgcatcccctgctccaggggctgccactgccaggacaaagctgctggtgccaggctgcccacggctggactggaaggaggtggcggctgggagcattcctgcaagtctccacgtggctctgcagggagctggggagccaggacacccaagaagcaaacagcaggaaggaggcaaggccggtgggtcacagggagggaagcacagccttcgaggacacagggtagtcgcttctgagtgctgggcagctcagcagggccacagtgtgggagagaa

SEQ ID NO: 60432 - DNA, 763 bp, Homo sapiens
gtgctttttaataaacaatcacttagccttgggttatatactttcctgctttgtgtttccagtttgccagttctcttttgacagaaatgcctaagcatgtggcaggcagaggaatgaccccaaaggcatctgcatccttatccctggagcctgggaatctgtcccctcccgtggcagaaggaatattcaggtgggactcagtgaaggaccctgacatgggagagcatctgggagacctgggaacccagggtcctcaccgggtagaaggtaggagggtaagagtcagagagagaccggaagaggctgcactgtggctgtgaaggaggaggaaggggctctgagccaagagatgtgggcgcctctagacactgagacaggcaggaaacaggttctcccctggagccccccaggaggaagcagccctgcccacagcttgattttagcccagtgaggcctgtcagactggtggcctccagagctgtgagacaaggagcgtgtgttgttttacgccaccaaggtcrtggtccttcatttcagcggccccagggcactcacagaggccgcagcgtggacagggggagggaggggactgaggtctcacaccaagtccactgctccgggattcctattcctagaccttttgccatctttgcttgggtcctgcaagctctgtggcaagccctgccttctggaagggtggccccagcctcttgacaggccttgggctttcatccgcctgcatttaaatcagcaaaccctgctg

SEQ ID NO: 60433 - DNA, 993 bp, Homo sapiens
caaacctctcatttcctggatcagggggactgaagatcagagaggtcacaratatttaaatttggaaatagtgagttaggcatcaaatgaaattctttcaatttttaatgttccttctgaagtgggatgaagaccctggagtcagttttcataggagactggagagtgacttccaatggggtggactctgggctggtcagccttccttccgtctggttgtggggtcagaaatgaagagactccaaataccttcccctcaggagatggtggcacaagagagacagcaccctcctaagatcacctccggccccactaggtcacctttgcaatttcattagctccaggctgtcttgttccattcagatttacagaaattttagatctgggatttggatcaaatggcagaagcaagaaaaattcattttgagtgttttttgaaaccaactctgtaacaattgaatatatttgatgtagaagttgtcaccatctagactgatgtcctcatcatcaaagggcaagagcaaatgtctctaggttcctgtgttgtccatttgtttcccgctccctttttaaaacggccttatggaaggacaccttcttcttcctgtaggaatgggccacaagcttcaggtaagagccttccctgacttccctcagccaccaagtggaagcagtgtcttactctcagaacccacatggcattttatccatggcatttatccagcagggtgtccctttgggagcctgtcactttttattctgcatgataggtgactgtgtccatgctacatttcccattgtagaggatgaacccctcgaggatgtgtctttgattgatttacccttgaatctcccacggtacagtatgtccatgcagtagcggctttaaaaagtataactggaaagcatttcatcatatagtattgtggggctgcctgaaataaattgatgagcagtactgaaaaccacacaaatctcagtacccagtctttg

SEQ ID NO: 60434 - DNA, 735 bp, Homo sapiens
ccctaagccaaggacaatcctttttcatggattctttcctactgtcccgacacagtcctctagttcatcacgccaggctgatttagttcagcttgacatgcaacacacgagacttctgttttctagaataaatctccagacattttatgaaccaataatgtccaaagagtacatgggctcttttgcggcttggtaattaccactgacctctttcctggaccsttctccataaagaggccacctccttggggcagctccgccctccccttttctccaaggccgtaggtggaacaagtaagttcctaattagccagcccgcgcagggaagcttggtgtcaggttttcaggtcagcctttgatgcaggggtaaccaggggaagtgacgcatcaactttgattaaagagctatgatgaaccaagataaaaattgacatttaatttctctcagactcgactaatcttgcagaccaaaattaaaggtgaattgtcttctcttttggtttgtggggtgaggaatagactcacagaagtgataaacttgacaaaaatttgctataattttgttctcaaatcattgctatttaattaaacaaagcctcccgtcatgaatttgtggagatgcaaagtctcctacttttttcaaccaaatctgtaatattcttccagcactcagaaacactcaaagtccgttcaccccagctgccagctggggaactccatccaagaaggatccta

SEQ ID NO: 60435 - DNA, 735 bp, Homo sapiens
ccctaagccaaggacaatcctttttcatggattctttcctactgtcccgacacagtcctctagttcatcacgccaggctgatttagttcagcttgacatgcaacacacgagacttctgttttctagaataaatctccagacattttatgaaccaataatgtccaaagagtacatgggctcttttgcggcttggtaattaccactgacctctttcctggacccttctccataaagaggccacctccttggggcagctccgccctccccttttctccaaggccgtaggtggaacaagtaagttcctaattagccagcccgcgcagggaagcttggtgtcaggttttcaggtcagcctttgatgcaggggtaaccaggggaagtgacgcatcaactttgattaaagagctatgatgaaccaagataaaaattgacatttaatttctctcagaytcgactaatcttgcagaccaaaattaaaggtgaattgtcttctcttttggtttgtggggtgaggaatagactcacagaagtgataaacttgacaaaaatttgctataattttgttctcaaatcattgctatttaattaaacaaagcctcccgtcatgaatttgtggagatgcaaagtctcctacttttttcaaccaaatctgtaatattcttccagcactcagaaacactcaaagtccgttcaccccagctgccagctggggaactccatccaagaaggatccta

SEQ ID NO: 60436 - DNA, 735 bp, Homo sapiens
ccctaagccaaggacaatcctttttcatggattctttcctactgtcccgacacagtcctctagttcatcacgccaggctgatttagttcagcttgacatgcaacacacgagacttctgttttctagaataaatctccagacattttatgaaccaataatgtccaaagagtacatgggctcttttgcggcttggtaattaccactgacctctttcctggacccttctccataaagaggccacctccttggggcagctccgccctccccttttctccaaggccgtaggtggaacaagtaagttcctaattagccagcccgcgcagggaagcttggtgtcaggttttcaggtcagcctttgatgcaggggtaaccaggggaagtgacgcatcaactttgattaaagagctatgatgaaccaagataaaaattgacatttaatttctctcagactygactaatcttgcagaccaaaattaaaggtgaattgtcttctcttttggtttgtggggtgaggaatagactcacagaagtgataaacttgacaaaaatttgctataattttgttctcaaatcattgctatttaattaaacaaagcctcccgtcatgaatttgtggagatgcaaagtctcctacttttttcaaccaaatctgtaatattcttccagcactcagaaacactcaaagtccgttcaccccagctgccagctggggaactccatccaagaaggatccta

SEQ ID NO: 60437 - DNA, 735 bp, Homo sapiens
ccctaagccaaggacaatcctttttcatggattctttcctactgtcccgacacagtcctctagttcatcacgccaggctgatttagttcagcttgacatgcaacacacgagacttctgttttctagaataaatctccagacattttatgaaccaataatgtccaaagagtacatgggctcttttgcggcttggtaattaccactgacctctttcctggacccttctccataaagaggccacctccttggggcagctccgccctccccttttctccaaggccgtaggtggaacaagtaagttcctaattagccagcccgcgcagggaagcttggtgtcaggttttcaggtcagcctttgatgcaggggtaaccaggggaagtgacgcatcaactttgattaaagagctatgatgaaccaagataaaaattgacatttaatttctctcagactcgactaatcttgcagaccaaaattaaaggtgaattgtcttctcttttggtttgtggggtgaggaatagactcacagaagtgataaacttgacaaaaatttgctataattttgttctcaaatcattgctatttaattaaacaaagcctcccgtcatgaatttgtggagakgcaaagtctcctacttttttcaaccaaatctgtaatattcttccagcactcagaaacactcaaagtccgttcaccccagctgccagctggggaactccatccaagaaggatccta

SEQ ID NO: 60438 - DNA, 755 bp, Homo sapiens
ggtaaaaatactgacaaatgtttcctagagtccaattctctggctttcttacatcagtacatgctgttcctagcaaactttataaggatcaaaaacactgcctgctgaacacagtgcacgtctccaacatacaaccaaaatcatacccattccagaagttggacaacctgaaggattatggttacggcatctgtgttcaagaccagcatccaggggtaatgtccattcatcctctagttccttcatgatctagcctcagtatttgataactgtaaagtgtaccaccaatgacatgccctataaacagggtggaagaaacaggggaaaaataggaaaacaaatagtttaaatgtgttatatgtacatgatacaccaaaagagaaaaatctccccttacctagggtttcaatttccatgattttggttaccaacrgtcaactgtgttccaaaaatatattaaatggaaaatttcagaaacagacaattcataagttttaaactgcatgatgttcagagtagcgtgatggaatctctcgctgtccttgtctggaacatgagccctccctttgtccggtggctccacactgtagatgctccctggcccattagccacttaggagccgtctgcagagtggatcagattcaccgttgtggtgtcacagtgaattcaagtaacccttattttacctagtaatggctccaaaatgcaagattagtgatactggaaattcaaatatgccaaagagaagctataa

SEQ ID NO: 60439 - DNA, 767 bp, Homo sapiens
ggtgtgcgatcctcgtttctcaagacaggaaacctgagcacagaggttaacttccctgaggacccacagcttctagacagcggtgcttgcaatcaatattttaaaggtaggcgccataagattcatctatggttttkttttgtttttttttctgctcacatcgcacatgtggaatcagtttccagagcaatcaaattttaccaaatataacggccaaacacaatgaggagctccggcagggagcagaaattcctaaagaggaaacaaaatctaagtaaacgacttgtagggtagcccacagtacccaggacggtacccctttgagcacgttctagtgtcccgtcccagacacccctccatcccaggcaaaccaggacagctggcagccaagcctttagctcacctttgaaccatcctgaacaactaaccaactccgagccgaatgtccagaaagtccctgctagtattcctatgtccggaattggtgggttcttggtctgacttcaagaatgaagccgcggactgtcgcagtgaatatcacagttcttaaaggcggcgtgtccagagtttgttccttctgatgctcaaatgtgttcggagttttttcctgctggtgggttcgtggtctagctagctcaggagcaaagctgcagaccttcacagtgagtgttatagctcttaaggcaccacatctggagttgttcgttcctcccggtggattcgtggtctcacaggcttcaggagtgaacctacacacctttgtggta

SEQ ID NO: 60440 - DNA, 767 bp, Homo sapiens
ggtgtgcgatcctcgtttctcaagacaggaaacctgagcacagaggttaacttccctgaggacccacagcttctagacagcggtgcttgcaatcaatattttaaaggtaggcgccataagattcatctatggttttgttttktttttttttctgctcacatcgcacatgtggaatcagtttccagagcaatcaaattttaccaaatataacggccaaacacaatgaggagctccggcagggagcagaaattcctaaagaggaaacaaaatctaagtaaacgacttgtagggtagcccacagtacccaggacggtacccctttgagcacgttctagtgtcccgtcccagacacccctccatcccaggcaaaccaggacagctggcagccaagcctttagctcacctttgaaccatcctgaacaactaaccaactccgagccgaatgtccagaaagtccctgctagtattcctatgtccggaattggtgggttcttggtctgacttcaagaatgaagccgcggactgtcgcagtgaatatcacagttcttaaaggcggcgtgtccagagtttgttccttctgatgctcaaatgtgttcggagttttttcctgctggtgggttcgtggtctagctagctcaggagcaaagctgcagaccttcacagtgagtgttatagctcttaaggcaccacatctggagttgttcgttcctcccggtggattcgtggtctcacaggcttcaggagtgaacctacacacctttgtggta

SEQ ID NO: 60441 - DNA, 749 bp, Homo sapiens
atccccaattcaagagattctgatgcattaggtttggcatttttcacaacacttcagatcattcttattcaggttgctgaggttgacacactaaaaaacctctgcattaaggcaataactcatgactctgaagcctactttttcttgaagaatggtttaagttctgtattatctattactatataacaaacatatctattattatattatctatcaaacaaattgactattactatataataaacctccccaaacttagcagcttgaaacaaccccagtgatttattttgatcatgattctgaaatttagaaagtgcttggtgggatgtctcatctccatccttgcagcgtcagcaggggtggtttgactggagctagatagttacttccaacagcctcactcactcacatgtctggcaagttggtcctagctgctggctgggagctcagccaggagtcttagtttctttcttcatgagattatctacggagctgcttgsttggcctttctcacagcatggtggctgagttccaagagtaagtgttccatgtcaaggtagaagcttctagtatcttaagatctggctccccaaatagacatagtaacatttcctctgtgttccatttgtcaaagcaatcacagagctctaacagattcaaagagtgggtgttgactcctcctgtctcaatgggagaagcgtcaaaatttttttagctagtttattatattaacctcattatttcagatt

SEQ ID NO: 60442 - DNA, 605 bp, Homo sapiens
agttatgctcaacccagctctacccttggacttttcaattacatgagtcgataaactcttttttttttcttaaatcagtttgaggagagtttctcttaccagtattatttcttcaccaaaatgttttcagtgtctacatagtctcttaacttctgagtatttttcatttacttagaagcttaggattcttaattgaaatagacatttaaagtctgctagaccgatcttctcacaacgcaggaacatcatctacagctgtgctgtccaatgtgacagccaccagcctcatgttgctatagagagaaggcatgtggcaggtccaaatgagagtgctttaagtatagaatgcacactagatttggaaaacttggtacaaaaaagaagataaaatatcatacataattattctatattgattatmtatcttaaaagtcttttggatatattgggttaaatagaatatattattaaaattaattttacctgtttctttaaatttattaatgtggctactagacaattcaaaatcatatatgcaactcacattatatttctattagacagtgctagtccctgacaaagggtgatgcagcctctgcttgaaa

SEQ ID NO: 60443 - DNA, 1329 bp, Homo sapiens
attcttatcaattcagtaaattcatattaaatatttattgctttaaaaaatttttcttactctcttttcctgagtcttagcattgatccctaaatcaatgcagaatatattccagcagtgcttctctggacactcaacctaggttttactaggtcataccagtatgctggccttatgggagagaaaaaaccaaggcattaaatatccctgyccattagatctaggagtattaaagctgcttccctcagtaagtataagatgaaggattccgtgacacagctcaactctcacctgcaaaagttctgtggtccaaagtactttttttttctcctgaaatagtcctaaagtctgggacaccactggctttctccataagcttcacttgtacgtctctgttggatctctttcttttctctttttttttttttttttttttttttgagatgaagtctcgctctgttgcccaggctggattgcagtggcaagatctcggcccgctgcaacctccttctcccaggttcaatcgattctcctgtctcagcctcctgagaagctgggattacaggcatgtgccaccacgcctggctaatttttttgtatttttagtagagacggggtttcatcctgttggccagactggtctcgaactcctcacctcaagtgacccacctgcctcggcctcccaaagtgctgggattacaggcgtgagccataacgcccgccccagatctctttcaagagcccttccttcccttgctagtgggcccaggtctttgactcttggtttccctctgcaactcatccatccagattgttccttgccaccattgtcaaaacaatgtggtcatgcacatttctggatcttcagggcacaataatcctgaagtttttgtaactcttctaaggagagagttctggaaaacatgtctataatatggagactgggatgaaattaagttagttttcctgataggaatccatacaagtctttaatgctggctttctttcctgatcctttttcccccaacatcagactttcgtaaggacttattatacccaagagccgtgctaagcactctataggaaagggtctaatgaactcctttggaaacgctgtgtgaccaatttgttaatatttctgttttaaagatgaggaaactgatgcttataaatagggtgtttctattttgtttcaaattcttattcagactttaagcttaacccttaagaggttaagactttaaaataaaaactttttttccaacaggatgcttcagaataccaaattagatgtgaaaaaatttaaaaatattatcgtcataagagaat

SEQ ID NO: 60444 - DNA, 2604 bp, Homo sapiens
tgcatgaaaagagaattggtagcatcaactagtttggttgttcactaagaaagaactgaagtctccagtatttctaaattgggatatgaatatctaccaattggtatctgtgaggtagacttggggggcaggtgtgcatgcaatttaattttccctataaataccacattatgacagcatttccctgtagaagagaggatcacatagtttggttttaccaagagacttttttttttttttttcagtttggggagccatcagagccagtctctctccctcctccgaacctcactcctggaaggtgttttcttggtattagttctccaggacctcaaaatatatgaggatactttaatacaactactgctctgctaaaatggaatgactaacattgaaatgattcccatgtcagtttttaagcagatcagttggacctccagaaaatgtatgaattgaaaagacatgcttcacttagaataatagtctccaatctcatccaggtcaggaatggaaaaccaaacattgaatgttctcactcataagtgggagctaagctatgaggatgcaaaggcataagaatgacagtggactttgggaactcagtgggaaagggtgggaagggggtgagggtaaaagactacaaactgggtgcagtattcactgcttgggtgatgggtgcaccaaaatctcacaaatctccaccaaaacacttactcaggtaaccaaacaccaccattccccaataacctatgaaaataaaaaattaaaagaaatgaaaagagagccgagatctttagagaaacacacgcaccagtacatatgtgtatgtatacatatatgaatatgtgtatatatgtgtgtgtgtgtgtgtgtgtgtgtgtgtgtgttgagttgagggtatagtggcaatgatactactgagtgtttcctttacttagctcttaccccaaaagacatattttctaatcagtaaaataaaccaggtacaatcccatagtgtaggtatttccaaacttcactgaccatcagaataaaaatagccagagtttctctgaatgcttactgtataggaagaaccatgatgaataacttatctgctcgatggtcctcccaagtaggtataatttccctctttcatagatgagataatagactcagtcaggttgaattatttggccattaactcatctagtgagagtgaaaaccataatttaaacataagcagtctttaccaagagctcatactctaccaattgtgctaaaatataatacattattgttggagcctaggaatcagaataattaaaagcccccagatgattcttatgcatccagctcaatactggtccaagaatccactggtaagtytttgatgtgcatatcaatcacctacagattttgttaaattataaatattgattcattaggtctgggtgtgggcctgagaatctggatttctaacaagttccaggtaatgccaatgcctagactacattttgagtagcaagtaaatagggcacagcattcagttatacaatgttttaaattgttctgtaatgaaaactataaattacgtccccagataaattggaagcacctgaagtatcaattttacagtatctccatatgctagtagtactagacccataaaaaaattaagccattcaaataatgcttggtaagtaattcccaagagaagtgctcttctgactctttttaacacccagcacaagaagaactggaacaaaggggcttgcttactctcagagtgcaggtgtcctgatttacttctgcatggaagaggttacagattctgtccctctgtctggtcacttgataggttgtcattaacaatagtcttctttctattacttttttttttttttttttttttgagacagagtcttgctctgtcacccaggcaggagtgcagtggcatgatctcgtctcactgcagtctctacctcctgggttcaagcaattctcctgcctcagcctcctgagtagctgggattacagatgcccaccactgtgcccggctaatttttgtaattttaatagagatggggtttcaccacgttggtcaggctggtctcgaactcctgaactcatgatccacctacctcggcttcccaaagtgctgggattacaggtgtgagccactgagcctggcccaatagtcttctttctaaggagtctaagaaaatagttatgaagggatatcaacaaagtcattagaaagcagaacaaaggtaaaatacacatgttctttgggattaaagaaattaagtgcaaaaaaccccacaattttctcccatcaaatttccattcaatttttttcatattaattattacaaggtttttgcacaatttattctcctatacactttaatctcatgaatggaaaaaactttgcctgaattcttgactcccatgctctttgttctcctatctgatccccaactatgtggaactgtcatcacagaaaaataattgccctggtcactccccagaaagcttgctcaagattttatccacttttgtttcaccaaagatttgatcttggggaaaaatatatccaactcagccagcttttgaaataac

SEQ ID NO: 60445 - DNA, 558 bp, Homo sapiens
tacagaacttgctcagactgtaccagtttttacatacttgcctggatatgtgtgtgtgcttctgtattgttttgtcacatgtataggtttgtgtaaccacaaccaaaatcaagataaaaaatcattccatcaccacaaaggaactttcttatactctttagaataatatatcttttaaaaaatatacgtgcatataygtgaaacagatgttaatgacactcaggagaaaaattaaagtttttgccctcaaggagttcacaattatttgagtaattgggtactttttaactttgaattattatattggaatgtcaataataaagttgacattcctgggcctcagctgaggccacgacgagaaagaagagagctagtgttttgaagacctactgtgtcctaggcaccttgttaggaactttaccctgttaactcatgttcatctgacagatctcttccacctctgtggttctgcccattgctgaacccgtgaactggctcggccagttcttagtgtgggatagtttcttctctaggcaatcaggttcttagagaaggtca

SEQ ID NO: 60446 - DNA, 558 bp, Homo sapiens
tacagaacttgctcagactgtaccagtttttacatacttgcctggatatgtgtgtgtgcttctgtattgttttgtcacatgtataggtttgtgtaaccacaaccaaaatcaagataaaaaatcattccatcaccacaaaggaactttcttatactctttagaataatatatcttttaaaaaatatacgtgcatatacgtgaaacagatgttaatgacactcaggagaaaaattaaagtttttgccctcaaggarttcacaattatttgagtaattgggtactttttaactttgaattattatattggaatgtcaataataaagttgacattcctgggcctcagctgaggccacgacgagaaagaagagagctagtgttttgaagacctactgtgtcctaggcaccttgttaggaactttaccctgttaactcatgttcatctgacagatctcttccacctctgtggttctgcccattgctgaacccgtgaactggctcggccagttcttagtgtgggatagtttcttctctaggcaatcaggttcttagagaaggtca

SEQ ID NO: 60447 - DNA, 679 bp, Homo sapiens
tttcatcattttcaccatttcattatgctaatagtatcatttcgttattttacttgaagtaccacacaacagtaatttaggttggttgtgatgccaagttcagtggattgggtgtgtcccagatttgtagaaaagaacaacaaaaaatcagccagatatgatgtaacattatctgttacactgtgtaattactatagcttcaaaactgcagccttggaattctgagttaagggaactattagtcaaataasgtcacgcctgtaatcccaacactttgggaggctaagtcaggaggatcgcttgaggtcaggagttcaaaagcagcctgggaaacatagtgagacccccatctctacaaaacatatatatatatatagctgtgtgtgatagcacatgcctgtattcccaggttttcaggaggctgaggcaggaagatggcttgaaaccaggagttcgaggatgcagtgagctatgatctcaccactgcactccaacctggatggcagaacaagaccctctctcaaacaacaacaacaacaaaacaaaacttcctgagagcttggtcaggaaagatggagatcatgagtgtatctgtgcttcacttgatctttaatggccggagcaccccaggactcagtgctgggttctcttcttccttctgtcagtactcacacccttg

SEQ ID NO: 60448 - DNA, 679 bp, Homo sapiens
tttcatcattttcaccatttcattatgctaatagtatcatttcgttattttacttgaagtaccacacaacagtaatttaggttggttgtgatgccaagttcagtggattgggtgtgtcccagatttgtagaaaagaacaacaaaaaatcagccagatatgatgtaacattatctgttacactgtgtaattactatagcttcaaaactgcagccttggaattctgagttaagggaactattagtcaaataacstcacgcctgtaatcccaacactttgggaggctaagtcaggaggatcgcttgaggtcaggagttcaaaagcagcctgggaaacatagtgagacccccatctctacaaaacatatatatatatatagctgtgtgtgatagcacatgcctgtattcccaggttttcaggaggctgaggcaggaagatggcttgaaaccaggagttcgaggatgcagtgagctatgatctcaccactgcactccaacctggatggcagaacaagaccctctctcaaacaacaacaacaacaaaacaaaacttcctgagagcttggtcaggaaagatggagatcatgagtgtatctgtgcttcacttgatctttaatggccggagcaccccaggactcagtgctgggttctcttcttccttctgtcagtactcacacccttg

SEQ ID NO: 60449 - DNA, 616 bp, Homo sapiens
actgtgccaggtctggggcaggtgctggggtgcagggtgagtgrgacacaccagctctccaagagtgtatccttccaccagcacagggacagggcattgtgtgcacaaacaacacagcttccatcatggaccaggcactgcagagcgaaactatgatgcgccctgtccacctgctccacctgtagctttcttgtatcaggagaaatgggtgccgactaagaaaaagtcaacactgagaaggcaccacaaagagcttaaaagccacactgtaaaggaaaagtgattggccaggcagagtgagggcacagtgccgaagtgggtgctctccaaggagctaggaagtctgggctctgaagttatgccccatttcttggagctccttcttgtttgcaggttaagctgctcagaaaactcttggcttttaaaagctttaaaagtaaagtgaggccgggcgaggtggctcacgcttgtaatcccagcactttgggaggccgagatgggtggatcacctgaagtcaggagttcgagaccagcctggccaacatggtgaaaccctgtctctactaaaagtacaaaaatgagccaggcgcagtgacatgtgtctgtaatcccagct

SEQ ID NO: 60450 - DNA, 565 bp, Homo sapiens
atcctggaccccatactggctccacaggtccctgggsatctgcctcttgcctatttcatcatgcactgtcctgcattctcggtgtatttcaatccactcaggcagtgagggcctccagggtgggctgacgctctgctgactatggcgtgatccccagagcccacgcagggcctacccagaggatggagaaatgcccttcatccacccacccgtcccacccttcaaccacgtgaaggatgtggttcccaatgtgggttccagggaacagctccttgagccagttactgctcaccacaaagtttccatggaaaaattagttcggtaaagcttgtgttaaacaaggtgaaatattcctttggtgcaggaattctcagaacctccaataggctttgggtgtcttcaaaagcaaataataattgacaagatcctaacatgttgtgagtgctcagatgttgtgcactgttctgagccctcatgtatgttatcttgtgtaacacccaaaacaactgggcgaggcaggagcaccatcatccccatttgacagataaacagactgaggcaggag

SEQ ID NO: 60451 - DNA, 565 bp, Homo sapiens
atcctggaccccatactggctccacaggtccctggggatctgcctcttgcctatttcatcatgcactgtcctgcattctcggtgtatttcaatccactcaggcagtgagggcctccagggtgggctgacgctctgctgactatggcgtgatccccagagcccacgcagggcctacccagaggatggagaaatgyccttcatccacccacccgtcccacccttcaaccacgtgaaggatgtggttcccaatgtgggttccagggaacagctccttgagccagttactgctcaccacaaagtttccatggaaaaattagttcggtaaagcttgtgttaaacaaggtgaaatattcctttggtgcaggaattctcagaacctccaataggctttgggtgtcttcaaaagcaaataataattgacaagatcctaacatgttgtgagtgctcagatgttgtgcactgttctgagccctcatgtatgttatcttgtgtaacacccaaaacaactgggcgaggcaggagcaccatcatccccatttgacagataaacagactgaggcaggag

SEQ ID NO: 60452 - DNA, 565 bp, Homo sapiens
atcctggaccccatactggctccacaggtccctggggatctgcctcttgcctatttcatcatgcactgtcctgcattctcggtgtatttcaatccactcaggcagtgagggcctccagggtgggctgacgctctgctgactatggcgtgatccccagagcccacgcagggcctacccagaggatggagaaatgcccttcatccacccacccgtcccacccttcaaccacgtgaaggaygtggttcccaatgtgggttccagggaacagctccttgagccagttactgctcaccacaaagtttccatggaaaaattagttcggtaaagcttgtgttaaacaaggtgaaatattcctttggtgcaggaattctcagaacctccaataggctttgggtgtcttcaaaagcaaataataattgacaagatcctaacatgttgtgagtgctcagatgttgtgcactgttctgagccctcatgtatgttatcttgtgtaacacccaaaacaactgggcgaggcaggagcaccatcatccccatttgacagataaacagactgaggcaggag

SEQ ID NO: 60453 - DNA, 1018 bp, Homo sapiens
gtgtatgttcattgcactattcacaatagcaaagacatggaatcaacccaaaagcccatcactgatagagtggataaagaaaatgtggtacatatacactacggaatgctatgcagccataaaaaggaacaagatcgtgtcctttacaggggcatagatggagctggaagccattatcctcagcaaactaacacaggaacagaaaaccaaacaccgcatgttctcacttataagtagaagctagacaatgagaacacatagacacattgggttgggggaacaacacacactggggcctgtcgggggcgaggggagggagaggatcagggagaatagctagtgcatgctgggcttaacacctaggttaagcagcaaaccaccatggcacacgtttacctatgttacaaagatgcacatcctgcatgtgtaccccagaacttaaaataaaagttgaagaaaaggtttcaagaagtaaaaaaaaaaaaataacagggaaaaccaccaacgtacgctacctmcccaagcttccaaggaccctgccacagaggtcactgtctccacttccagacagagaaaatgagtcacagagaggtgaagtcacgtgcccaaggccacaaagctaatcatcactagaaccgggatctgaactcagctttgctggccccaggtccgccctctttagctgatgccatgctggctctgtcaacatgatgtgaataacagcaagagtaagtgccatgaagtttaaagggaagtgggggttcgtggagaaggtccctgagcttggcttcaccgtgttcagaaacctatatcagatactgaggcatcgcgcactcccacatcccaagtccccacatccaaccgaccaccaatcccattaacttaacctcctacatctctctcgaatccatggccctggcctatgcctccagcgtatttaccctgaagggctgcaatcacttcctaaccagctcctcatccatgtattgagggtctgccgtctccagccaccttatgc

SEQ ID NO: 60454 - DNA, 1018 bp, Homo sapiens
gtgtatgttcattgcactattcacaatagcaaagacatggaatcaacccaaaagcccatcactgatagagtggataaagaaaatgtggtacatatacactacggaatgctatgcagccataaaaaggaacaagatcgtgtcctttacaggggcatagatggagctggaagccattatcctcagcaaactaacacaggaacagaaaaccaaacaccgcatgttctcacttataagtagaagctagacaatgagaacacatagacacattgggttgggggaacaacacacactggggcctgtcgggggcgaggggagggagaggatcagggagaatagctagtgcatgctgggcttaacacctaggttaagcagcaaaccaccatggcacacgtttacctatgttacaaagatgcacatcctgcatgtgtaccccagaacttaaaataaaagttgaagaaaaggtttcaagaagtaaaaaaaaaaaaataacagggaaaaccaccaacgtacgctacctccccaagcttccaaggaccctgccacagaggtcactgtctccacttccagacagagaaaatgagtcacagagaggtgaagtcacgtgcccaaggccacamagctaatcatcactagaaccgggatctgaactcagctttgctggccccaggtccgccctctttagctgatgccatgctggctctgtcaacatgatgtgaataacagcaagagtaagtgccatgaagtttaaagggaagtgggggttcgtggagaaggtccctgagcttggcttcaccgtgttcagaaacctatatcagatactgaggcatcgcgcactcccacatcccaagtccccacatccaaccgaccaccaatcccattaacttaacctcctacatctctctcgaatccatggccctggcctatgcctccagcgtatttaccctgaagggctgcaatcacttcctaaccagctcctcatccatgtattgagggtctgccgtctccagccaccttatgc

SEQ ID NO: 60455 - DNA, 991 bp, Homo sapiens
gggtgcaaaggaaccaccactcagagaatcatggagccagtggagttagaagtggaagggacagaacaagacaatgctaaaacctgtggttcactaggaagggggaatgaaaacaccatgctccgaggtggattcagcatgaacacaactgtggggcaaggaatttccaagcaaacacaccacactagtaccacttcttcctaaacagaaaagggaaagagcatccttcgacttccccctccctccatcagcaccaactaaaactgtgggtttcaaaaacactgacaggaaaagggatggacatgattcccagaatccttcaggctagctcctccgcgcatccacgttcaaccgaggctggtgatgttggagcggccaccagggggcgccacgatgcggtggccggtgcgcctgggattgttgtcatctatctgggcacctgaaagagagcgccaatcgctgctggatgggatctgttagcatcagttccacgctgctcctggaggccatgtactctgccatgcactccactggacccaccttcattcagggctcagtccaggaccagccatgggaagcctccctggcctccacagagtccactgctccctcttctgtgcccctcagtccctgggctcccccmaccttcagccctgaccaccttgtggtgttcttgtcaaaatccccagtaaaatccgacattcctgagacaggtgatcaaacacttactgagtgcctactgtgtgcaggcgcacatttggtgctttaacatgttactgcatttagggcacacaatcatactatgaagggggtgtttgtactcccaacttacgggtgagcaatttgaggttcaggccacgtgtcttgcgggacacaggtgttgggtggggaagccaggattgaagcccaaactggttggttttcaaagcccatgatcttaggcacactgtcccacactccaaaggtattttacatattgtgtgtgtacaca

SEQ ID NO: 60456 - DNA, 991 bp, Homo sapiens
gggtgcaaaggaaccaccactcagagaatcatggagccagtggagttagaagtggaagggacagaacaagacaatgctaaaacctgtggttcactaggaagggggaatgaaaacaccatgctccgaggtggattcagcatgaacacaactgtggggcaaggaatttccaagcaaacacaccacactagtaccacttcttcctaaacagaaaagggaaagagcatccttcgacttccccctccctccatcagcaccaactaaaactgtgggtttcaaaaacactgacaggaaaagggatggacatgattcccagaatccttcaggctagctcctccgcgcatccacgttcaaccgaggctggtgatgttggagcggccaccagggggcgccacgatgcggtggccggtgcgcctgggattgttgtcatctatctgggcacctgaaagagagcgccaatcgctgctggatgggatctgttagcatcagttccacgctgctcctggaggccatgtactctgccatgcactccactggacccaccttcattcagggctcagtccaggaccagccatgggaagcctccctggcctccacagagtccactgctccctcttctgtgcccctcagtccctgggctccccccaccttcagccctgaccaccttgtggtgttcttgtyaaaatccccagtaaaatccgacattcctgagacaggtgatcaaacacttactgagtgcctactgtgtgcaggcgcacatttggtgctttaacatgttactgcatttagggcacacaatcatactatgaagggggtgtttgtactcccaacttacgggtgagcaatttgaggttcaggccacgtgtcttgcgggacacaggtgttgggtggggaagccaggattgaagcccaaactggttggttttcaaagcccatgatcttaggcacactgtcccacactccaaaggtattttacatattgtgtgtgtacaca

SEQ ID NO: 60457 - DNA, 925 bp, Homo sapiens
gctattttgacctaataattttctggattttaactacctctagttttaaaacttgggtatctgtctgtttggatggcttttatcttgtgctttcctactccatcaaaataggaattagagttcttcaaaaataatagcttctcactacctgcttcgtgataggtacactgattaagatttatgctttgaggaaaatgggatgtttggaattttggagaaaaatggctatagaaaaatacttatgagatttttcttagaaaatcataatatttgaaatccaaatgataacacgattgtcatatattaccagctctacatatctccctaacaagaaaattatccgtgtttatctcaaataggtatatgtaaaatcctgtacctgaaaactgtctcaagtatctatttcctgaggctactccagtatgaaccayggtttcattcaggatccagacaggttcaatgatagaaactaccatttggcagagatgtagtcagttaagacagcagcaagaacactggaaaggcattgtcatgcctagggtggaaggaacgaggggagataattggatacaaaagtccactgaaaactgaagcagtggaaacaaagtgctctggtggaaaatttagtttttagggaataacttctttttagaaagccactgagacagatacgttgagacctttgatttttttttcacctctcctaaattaagtcacaaatttcaggtggttttctgcgtaactagctttctttaaaacagattatttgttgagctatatgaaatagttgcgtgagagtaagatctagattttgacatactaacatcatttcatgtaactggtaaatagacctataacaaaattaattactatggaagatttttcccctttactggaaatattggtaaatatttcaaagatatgc

SEQ ID NO: 60458 - DNA, 917 bp, Homo sapiens
aaaagttattggaaagtggaaattgataggacttggtgacaaattgaattaaattgactaatcatttattattttgtgcatctcagcattctacatctctaccagtgaactcattaaagagatttttatgttaatagcgaagtttttaatgtaagttgatttgagagatcttttctggttgaatacagttggcaggctgttggatttagtaggcaaggccacatttatctggcatcattaaaattaggtaacctaaataaataaaatatttagacaattgaagcttgctgtcattgcccaatttggggaggcagtccagagggactggccagatcagataccattctgtggataagttatcctgagggacaagtggagaaacaaattcaggggcactttttctaagaacgggaaggggactcccaaagaaattccccaaactaagacatcagtctctgagacaaaatagaacatgaaatgaggatagagattcaaggatctaagtagtccattcattaatgaaataatattacttatgtgcattgagtacctacttccrtgctgaaagctttgcataggtcatttgttttacttgtatgtattgagcacttactaggtgttggctgagcaaagaacctaacaggtatgttcccagcccttatagagcttatagtctggtgtgggagatagtcatcaaacaaataattatacaaatacatacttagttacaaattgtgatcattgcagtaaagggaaatatagagtggcatggaggtaaaacaagggttctccacttagatttcacagtcaaaaatggtgttcctgagtaaataatattctagcagaaactttgaaggatgactgggaattagccaggcaaagactaaaaggatgagtgtcaaggacactgaaaggca

SEQ ID NO: 60459 - DNA, 917 bp, Homo sapiens
aaaagttattggaaagtggaaattgataggacttggtgacaaattgaattaaattgactaatcatttattattttgtgcatctcagcattctacatctctaccagtgaactcattaaagagatttttatgttaatagcgaagtttttaatgtaagttgatttgagagatcttttctggttgaatacagttggcaggctgttggatttagtaggcaaggccacatttatctggcatcattaaaattaggtaacctaaataaataaaatatttagacaattgaagcttgctgtcattgcccaatttggggaggcagtccagagggactggccagatcagataccattctgtggataagttatcctgagggacaagtggagaaacaaattcaggggcactttttctaagaacgggaaggggactcccaaagaaattccccaaactaagacatcagtctctgagacaaaatagaacatgaaatgaggatagagattcaaggatctaagtagtccattcattaatgaaataatattacttatgtgcattgagtacctacttccgtgctgaaagctttgcataggtcatttgttttacttgtatgtattgagcacttactaggtgttggctgagcaaagaacctaacaggtatgttcccagcccttatagagcttatagtctggtgtgggagatagtcatcaaacaaataattatacaaatacatacttagttacaaattgtgatcattgcagtaaagggaaatatagagtggcatggrggtaaaacaagggttctccacttagatttcacagtcaaaaatggtgttcctgagtaaataatattctagcagaaactttgaaggatgactgggaattagccaggcaaagactaaaaggatgagtgtcaaggacactgaaaggca

SEQ ID NO: 60460 - DNA, 917 bp, Homo sapiens
aaaagttattggaaagtggaaattgataggacttggtgacaaattgaattaaattgactaatcatttattattttgtgcatctcagcattctacatctctaccagtgaactcattaaagagatttttatgttaatagcgaagtttttaatgtaagttgatttgagagatcttttctggttgaatacagttggcaggctgttggatttagtaggcaaggccacatttatctggcatcattaaaattaggtaacctaaataaataaaatatttagacaattgaagcttgctgtcattgcccaatttggggaggcagtccagagggactggccagatcagataccattctgtggataagttatcctgagggacaagtggagaaacaaattcaggggcactttttctaagaacgggaaggggactcccaaagaaattccccaaactaagacatcagtctctgagacaaaatagaacatgaaatgaggatagagattcaaggatctaagtagtccattcattaatgaaataatattacttatgtgcattgagtacctacttccgtgctgaaagctttgcataggtcatttgttttacttgtatgtattgagcacttactaggtgttggctgagcaaagaacctaacaggtatgttcccagcccttatagagcttatagtctggtgtgggagatagtcatcaaacaaataattatacaaatacatacttagttacaaattgtgatcattgcagtaaagggaaatatagagtggcatggaggtaaaacaagggttctccacttagatttcacagtcaaaaatggtgttcctgagtaaataatattctagcagaaactttgaaggatgactgggaattagccaggcaaagactaaaaggwtgagtgtcaaggacactgaaaggca

SEQ ID NO: 60461 - DNA, 698 bp, Homo sapiens
caggttgcagtgagctgagattgtgccattgtgctccagcctgggcaacaggagcgaaatttcattccaaaaaaagagtatttaattgtgttgattttaatgattactgaaatttgggctgtttttttgaaactatttcttgtttcctttctctttcccttgtaaataagctgtaagagaaaactgyttaatcacaaaacgtaacataaggctttcatgtcagtgtccaataagaatgaattttttatggtgacaaggtagggttataatccagatctctggtaggcacatccataaggtgcaaggtgtatagaaaatagcatcagtttttttggctgggtgcagtggctcacgcctgtaatcctaggatttggggaggctgaggactgtggatcacctgaggtgaagagtttgagaccagcagatatggtgttcttgttctcaaagccgaggtgggtggatcacctgaggtcaggagttcaagaccagcttggccaacatggcaaaaccccgtctctactaaaaatacaaaaattagccaggcgtggtggcaggtgcctgtagtcccagttactcaggaggctgaggcaggagaatggcgtgaacccaggaggcggagcttgcagtgagccgactgcacttcagcctgggcacagagtaagattccatctcaaaaaaaaaaaaaaaaaaagagtcta

SEQ ID NO: 60462 - DNA, 698 bp, Homo sapiens
caggttgcagtgagctgagattgtgccattgtgctccagcctgggcaacaggagcgaaatttcattccaaaaaaagagtatttaattgtgttgattttaatgattactgaaatttgggctgtttttttgaaactatttcttgtttcctttctctttcccttgtaaataagctgtaagagaaaactgcttaatcacaaaacgtaacataaggctttcatgtcagtgtccaatargaatgaattttttatggtgacaaggtagggttataatccagatctctggtaggcacatccataaggtgcaaggtgtatagaaaatagcatcagtttttttggctgggtgcagtggctcacgcctgtaatcctaggatttggggaggctgaggactgtggatcacctgaggtgaagagtttgagaccagcagatatggtgttcttgttctcaaagccgaggtgggtggatcacctgaggtcaggagttcaagaccagcttggccaacatggcaaaaccccgtctctactaaaaatacaaaaattagccaggcgtggtggcaggtgcctgtagtcccagttactcaggaggctgaggcaggagaatggcgtgaacccaggaggcggagcttgcagtgagccgactgcacttcagcctgggcacagagtaagattccatctcaaaaaaaaaaaaaaaaaaagagtcta

SEQ ID NO: 60463 - DNA, 698 bp, Homo sapiens
caggttgcagtgagctgagattgtgccattgtgctccagcctgggcaacaggagcgaaatttcattccaaaaaaagagtatttaattgtgttgattttaatgattactgaaatttgggctgtttttttgaaactatttcttgtttcctttctctttcccttgtaaataagctgtaagagaaaactgcttaatcacaaaacgtaacataaggctttcatgtcagtgtccaataagaatgaattttttatggtgacaaggtaggrttataatccagatctctggtaggcacatccataaggtgcaaggtgtatagaaaatagcatcagtttttttggctgggtgcagtggctcacgcctgtaatcctaggatttggggaggctgaggactgtggatcacctgaggtgaagagtttgagaccagcagatatggtgttcttgttctcaaagccgaggtgggtggatcacctgaggtcaggagttcaagaccagcttggccaacatggcaaaaccccgtctctactaaaaatacaaaaattagccaggcgtggtggcaggtgcctgtagtcccagttactcaggaggctgaggcaggagaatggcgtgaacccaggaggcggagcttgcagtgagccgactgcacttcagcctgggcacagagtaagattccatctcaaaaaaaaaaaaaaaaaaagagtcta

SEQ ID NO: 60464 - DNA, 518 bp, Homo sapiens
caggaagagatgttctcagctcggtccatggatttatccaagacttgtagcttagctttcgggctttaaactgcctttggtttgaaagttggatttcattggggacatgccactatctgcctacgggcttgtctgactcctgccactattaaaagtactaaatcagtgcatctagcctgagggctgcccctcgtccacccagcagaggtttttgttttgttttgtttttcttttgttttaattaaaattttaattaaaagggactaatataragggtttttaaaaaattaccatatgtgttgagtatttatgctatgccaagcactttgcatatattttctcatttaatcctctaaatagtgaggttgattgccttatctccatcctatagatgagaaagctgagactgagagaaattaagaaacccacatgaggtcatgttgtatgtaagttagtttttgctgcatcataaaccacccgtttatgatttcaaacaggtaatacttgtttctcaataa

SEQ ID NO: 60465 - DNA, 518 bp, Homo sapiens
caggaagagatgttctcagctcggtccatggatttatccaagacttgtagcttagctttcgggctttaaactgcctttggtttgaaagttggatttcattggggacatgccactatctgcctacgggcttgtctgactcctgccactattaaaagtactaaatcagtgcatctagcctgagggctgcccctcgtccacccagcagaggtttttgttttgttttgtttttcttttgttttaattaaaattttaattaaaagggactaatatagagggtttttaaaaaattaccatatgtgttgagtatttatgctatgccaagcactttgcatatattttctcatttaatcctctaaatagygaggttgattgccttatctccatcctatagatgagaaagctgagactgagagaaattaagaaacccacatgaggtcatgttgtatgtaagttagtttttgctgcatcataaaccacccgtttatgatttcaaacaggtaatacttgtttctcaataa

SEQ ID NO: 60466 - DNA, 1179 bp, Homo sapiens
ggagaaagaagcctagttgctgcttaggaagacaaggagtaatagctgaagcatgtggcttttttttctttctttttttttcttaagatggagtcttgccctgtcacccaggctggaatgcagggttcaagcaattctcctacctcagcctcccaagtagttgggactacaggcgcgtgccacagtgcctggataatttttgtatttttagtagagacggggtttcaccatattggccaggctgatctcaaactcctgacctcgtgatctgcccgcctcggcctcccaaagtgctgggattacaggcgtgagccactgcgcccggccatggcttttatttctgaggtgataaaartgttcaaaagttgactgtggggatggttgcacatatctctaaaacactaaaaaatattgaattgtaaattttatatgggtgaattgtacggtgcatgagtcgtacctcaatgaagctaggtagaaagtaaactctattgtcttctctttcccctggcgaaacacctcagcttagggcaagtctgaacagaaaccttgcctctcagtgaaggaaataggagtcatctcaacttcacttgtagtccatctaatcatctatgccaccacagctctctgatatctttaaaacgattacatttccaatttctttactttttgaactacttgttccagtgggagtgatgcagtgccactgcctcctatattctacctagaatcagaacttcagctccaatccctttggcctgatttctgctcctcaagtaccccaaagcctttcccacttcactgtacttaccatttcctcctcttgaaatggttttctttcaaatagccgctaggcattttctcattacattcatttcttcagggttaatgccaccaaaaagccttccttcccagactaccctaactagctggcgcacttttaccttctatcactctgtaactcccttccctgctttattttcttcgtggcacttgtcactctctgacaccctatatagtatatatgtttaatgactatttcccttactagaatgtaagtgccaggggctactttgtctttcttgctcttcactgaattcccaacacaagcattggaactagtgtatagtgcattcccagtgaatactgagtgaaagaatacactccactttcaatggg

SEQ ID NO: 60467 - DNA, 678 bp, Homo sapiens
ggcgggtggatcacgaggtcaggagattaagaccatcctgtctaacatggtgaaacccagtctctactaaaaaaaaaaatacaccaaaaaaaataaattagccgggcgtggtggcgggcgcctgtggtcccagctactcgggaggcggaggcaggagaatggcatgaacccgggaggcggagcttgcagtgagccgagatcgcgccactgcactccagccrgggcgacagagggagactctgtctcaaaaaaaaaaaaaaaaaaagaaactgcaactttaagtaaaatattgtactatataacaaaaccaattttaccatatgctaattgatataaataagagttaagttcctatggcatacagtatgtcttttcacttaaagttgcaatttcaaataacctatcaatgacattaagttatgacttactatacatgtaatgtgcctaagacattatgttttatgtgaacgttgagtgatatttgatgcccagagtatgggccctggagtcagactccctgggtgagctttgtaactatgtggccttgagacacttactccctgtattagagtcctctggataaacagattgtgtgtgtatgtgtgagtgcgtgtgtgtgtgtgtgcgtgcacatgtatgtgcgcgtgcgcatatgtgtgcatatgtgtgtgtgtgtgt

SEQ ID NO: 60468 - DNA, 1144 bp, Homo sapiens
tggttttcttaaacaaaggttgctattaactgcaaactacttatattaagaaggctatgaaatgagatatgaaaaagagttaaaaggcaattttataagggagaactttgccaggggaataaatgtattctagacagcattctgaattccaaaaagaactcatccatggttaggttaagttttattttatgattttaactagtgtatgaccttggacaatgatttgatttttccttatttggaatgttggtaaagattaaatgtgttgacttgtttaatgcgtaaaaataacaagaagatgagtttaaatttctcaccccttttttttcttccagaagctctcaccactgaatcccaccttcattttccatgctgatgattcagtccccatccatcccactcaaaatctaaaattagccaggatcagtggcttgtgcctgtaatcccagaaactcgggaggctgaggctaggagggtcacttgagcccaagaagtcgaggccagcctgggcaacatagggagaccctgttcataaaaaataaaataaaaattttaaaaatcaggcaggcgtggtggtagatgcctgtagccctagctatctcggaggctgaggcaggaagatctcctgagcccaagcgttcaaggctgcagtgagctgtgattgccactgcacttcagcctaggtgacagagcaagatcccacctcaaaaaaaaaaaaaaaaaaaaaaaactatgggctgggcgcagtggctcatgcccaccctcagcactcctgtttctcaggccttcagacttgaccgggattccacacatcatcagctctcaggctctcagggctcaggactcagaattttaccatcagctccctgggtcttcagctcacagatggwagatagtgggaattcttagtctctataatcatgagagcaattccttataatatacctaattatgtatgtatctccatatcctattgcttctgttattctggagaaccccgactttagtattctagagaaaaacttttttctactcatgcaacacttatgacaccaaatgtatggagtttatcctcacatttagcaattctccaactctccagacacaaactggatgacctacaagtaaactatgacactaacta

SEQ ID NO: 60469 - DNA, 922 bp, Homo sapiens
tttgcatgaggaactaaactgttgttttgatatgttaatgagagactgagttttcttagccctgaagagaaggggcattttgctccttccagctgaaaggcttccctgggtgaccgggggccccatgggagtgtctgggaggttgaccaccccatgacgtgcagcagccctgcaagggaatccccaacaaaaattaattttataaatggctcatctaggtaacacatgtaagggctaatcatctggtgttttgagccctctctgaggtcacagacctctggagggagaaactgagacatataaaagggttgaaactactcagtggtgacacactgtggagtcctgcccacaagcagcacatgttgatccaccacacaaaaaccatggaccatagctcagttcctcccttaaaaaaaaaaaaaaagaaagaaaaaaaatgggaaacaatctaagaatgatgagaaaacaaggagaatgacccccttttgagcagtctgtaggttttatggcacctctacttgccaaaataatatggtctttgtgcacatttacattaaggaaaaaagagcccttggctgggygtggtggctcacccctgtaatcctagcactttgggaggctgaggtgggtggatctcctgaggtcaggagttcaagaccagcctggccaacatggcgaaatcccatctctactaaaaatacaaaaattatccgggcatggtggtgcatgcctgtaatcccagctactcaggaggtgaggaaggagaatcacttgaacccagagatggaggttgcagtgagccgagatcacgctgttgcactccagcctgcgtgacaggagtgagactccatctcaaaaaacaaaacaaaacaaaacaaaagccctaagtgtcaggcctctgagcccaagctaagccatcata

SEQ ID NO: 60470 - DNA, 922 bp, Homo sapiens
tttgcatgaggaactaaactgttgttttgatatgttaatgagagactgagttttcttagccctgaagagaaggggcattttgctccttccagctgaaaggcttccctgggtgaccgggggccccatgggagtgtctgggaggttgaccaccccatgacgtgcagcagccctgcaagggaatccccaacaaaaattaattttataaatggctcatctaggtaacacatgtaagggctaatcatctggtgttttgagccctctctgaggtcacagacctctggagggagaaactgagacatataaaagggttgaaactactcagtggtgacacactgtggagtcctgcccacaagcagcacatgttgatccaccacacaaaaaccatggaccatagctcagttcctcccttaaaaaaaaaaaaaaagaaagaaaaaaaatgggaaacaatctaagaatgatgagaaaacaaggagaatgacccccttttgagcagtctgtaggttttatggcacctctacttgccaaaataatatggtctttgtgcacatttacattaaggaaaaaagagcccttggctgggcgtggtggctcacccctgtaatcctagcactttgggaggctgaggtgggtggatctcctgaggtcaggagttcaagaccagcctggccaacatggcgaaatcccatctctactaaaaatacaaaaattatccgggcatggtggtgcatgcctgtaatcccagctactcaggaggtgaggaaggagaatcacttgaacccagagatggaggttgcagtgagccgagatcacgcygttgcactccagcctgcgtgacaggagtgagactccatctcaaaaaacaaaacaaaacaaaacaaaagccctaagtgtcaggcctctgagcccaagctaagccatcata

SEQ ID NO: 60471 - DNA, 846 bp, Homo sapiens
cactgcacacccttttcagccaaattcagcagaaaaataaattagagatttttttcttcaaagtcctttgctcattcactcccaggaggttctcactttcccttaccccttgaatgactccatcctccaccctttttctcattctttcatttcttctccctacttcctctcagggacaaatcctcaaaactcctctcattttccaagtgctsaggggctcaccttttaccagtgatctcttggaaagacagccccttgattgtgatggtgggaaatccacgctgttgaggaggattatgagtaatgagctttcttgctctccccatatcattccatagatattctcaagtgtggggatacctataatattagttatccatgtaacagattacttttgttactgctactgctctgctatgtattactactgctattgttaactcctcctcctgttactactactacttactgaacacttgctggacaaagcacttaaagtctatcatttcatctaatccttacaaaaatgccattaagtaggtattatctccgtgttactgtaaagaaaatgaggcttaaggactttaagtaacttaaagtcactcagctagaaaatggtggtcaatcctaaagccatatatttaatcatcataatagaatgttgttgttacaaagcaacatattttggcttttgaatatagtgataaataatgccacatccacatattttggcttttcaatatagtgataaataatcccacacacactctagcacagtctgcaactgaaaatatgtactttagttggaaaacatcttcgtattgggaaaacatcttcaaatctata

SEQ ID NO: 60472 - DNA, 531 bp, Homo sapiens
atttgaagctaacctagctatgatagtacccacaaggagtgaagatataaattatgttatttggcattttctgtgtctcctagggcctattctgttgttctagtaatgactgcaagactctgagagctaatgcctcttagaaagcagagaggggcagataaccctctgacaaccaatagtgagtccttagaatgcacgttcaatattttagtcccattcagttagaatttctgggaagctgagcctgttctaggcttttcagatcacacccacaggaatattcaaatagtctaaatgaatgttgaccaaacacacycttcaccttcttggtggcatgtgcctgtagtgtcgtgtcagctactctggagcctgaggcaggaggatcgcttgaacccaggagtttgaggctgcagtgcaccatgatagaagctgtgaatagccactgcactccagcctgggcaacatagcaacatcccatgtcttaaaaaaaaaaaaaaatcaaaacccagaaaatcccacaatgcctgcttc

SEQ ID NO: 60473 - DNA, 1094 bp, Homo sapiens
cttctcattccagtatcaaaagctatgaaccaggaaacttcttccttaatacttttgattcaatatatctttccactcataaccttatctccttttaccttcagaagcatgaccttaagaaaagttctattgaagaaggtgaaaataaaaagtttattatttcttacttggttatattgtttgttcacaatgtgagaggcatgtagggggtgtcattgtgggttttagggtggctcttcacaaggcattccaaaacaayagcacacttcactgctgagctgtatcagttccttagcaggtagccacaaggaggaaagagagggcacggtggatcttcttggtgatacaaacatggtaataacttttaggatctctttttcttacaggtttattaacttaaacaaaaatggacagggcagctgcttcagccacagttaagtgctccattgtctctacacagtattaggagcacctttaaaccttgaacaaattccacaggctccacctctcaccttctattccactcctctgccccgctctccttccccagttgaatctgtcagaggtggccagcatcacctggtcctgaccaagatggtgctgatccaaaacttcaagaggaatggggaagagggaagtcaggtactcagagatgactggaagtgggtttatgttccatgtcctcatccaggttttcatggagacttctctgacatcagccttgtgctcctctgctagttgtcttatattgtgtaacctaatagaggaagcaagctctcatgcccaaaaggtgcaagtcacttcgctgtctggttctgcctccctgaaactggtgaatgtttcatgccactcattacatctcttgtgataactgtttcaaacttaaaaaccaaacaaaaaaactttttaaaattagaggagtagtatggagcacataattagatttgcctacctctcaggagacctaaaattccacttctcaaaaaaaactcatttattttcctgtctttacttccagtgctccacgtaattgccgatccttcctgcatcttccggggcttgggcatatgacagtaagatgctcaacaagttca

SEQ ID NO: 60474 - DNA, 1094 bp, Homo sapiens
cttctcattccagtatcaaaagctatgaaccaggaaacttcttccttaatacttttgattcaatatatctttccactcataaccttatctccttttaccttcagaagcatgaccttaagaaaagttctattgaagaaggtgaaaataaaaagtttattatttcttacttggttatattgtttgttcacaatgtgagaggcatgtagggggtgtcattgtgggttttagggtggctcttcacaaggcattccaaaacaatagcacacttcactgctgagctgtatcagttccttagcaggtagccacaaggaggaaagagagggcacggtggatcttcttggtgatacaaacatggtaataacttttaggatctctttttcttacaggtttattaacttaaacaaaaatggacagggcagctgcttcagccacagttaagtgctccattgtctctacacagtattaggagcacctttaaaccttgaacaaattccacaggctccacctctcaccttctattccactcctctgccccgctctccttccccagttgaatctgtcagaggtggccagcatcacctggtcctgaccaagatggtgctgatccaaaacttcaagaggaatggggaagagggaagtcaggtactcagagatgactggaagtgggtttatgttccatgtcctcatccrggttttcatggagacttctctgacatcagccttgtgctcctctgctagttgtcttatattgtgtaacctaatagaggaagcaagctctcatgcccaaaaggtgcaagtcacttcgctgtctggttctgcctccctgaaactggtgaatgtttcatgccactcattacatctcttgtgataactgtttcaaacttaaaaaccaaacaaaaaaactttttaaaattagaggagtagtatggagcacataattagatttgcctacctctcaggagacctaaaattccacttctcaaaaaaaactcatttattttcctgtctttacttccagtgctccacgtaattgccgatccttcctgcatcttccggggcttgggcatatgacagtaagatgctcaacaagttca

SEQ ID NO: 60475 - DNA, 551 bp, Homo sapiens
caagttgacagccccagtcgcaccccaagctgaccaccagcatcaattgccagccatgtatgtgagccatctcgaatatctagcccacctgagcttttagatgattccagccagtgacatctgacaccaagtgagaattgctcagtgagccctgtaaacccacagaataagagatgataatagattgttttaagaagttttgggggtggcttattatgcagcaacagataaccaagccatttgaagtaaaaatgagttatttccagacaagaagataatttctctctattcagcactgacatagtgcaccacctgcccccrtggcaagagccatgcaggttcctcactgagcattcagtaaaagcttgataagtgaataaatcagtcaacggctggaaggaaaaggtggtaaccgccagcctgtgaggtccccaagagcagggcctgcttattcctcctctttcttcttttcaggacactaagtatctggaacagcctagaggaagtgtctgaccaatgtcagagtgcatttgagttcaaatgtccatcct

SEQ ID NO: 60476 - DNA, 1133 bp, Homo sapiens
ggaaatggtctcagccacaggcacagatggggaacccaaggcaaagagaggttaagtaacttacccttggtcatgcagacagtggctgagcccgaattcagccccagtgtctttaactccaggtgtgagggcagcggctccagcacgcgaggccccaggagccaggcactgctcacagcaccaggcgtgaccgcagcggctccagcacgcggggccccgggagccaggcactgctcgcagcgcgggtcgctcacgtgttctttggaggcaaatccatgcggcgttcacacacacggaccttgcagttgcttgcgcctttttttctctccaactcatcacagggcatgacttctctccaagctgcctgaaataaaatgaataactttttatgtgaagttcttcgtgctgaagagaacttgttccaaatggggaataattggccttccagggctccataccggcaatgaagtgaaagatgctgacgtttcagaggtgtggaaataaaaggactaaaaatgggattcggagcagctaatgagggcagatccgcagggtttgagagacaaaatggggatcgcaggtggaagctggcaccgcggccaggggcagcccacgcagcagcgagtggggccgaggtcgtgggcgggtgtccggaccctcatcacaggaacttgctggaacccccagaggccccggcctctgctggctttgaggcctcagacctccctagtccagtcacgagccaccgagccccctatacgagtctgctcagcggctgtatgaagcatgttatgtttgacgaaggattaaacaccagaaatgtattgtccccggttctggaggctggaagtctgagatcaaggggctggcagggctggttccttctgagacccctctccctggcctgtgggtgccatcttctctctctgtgggtgtccatgtctttaccaccccttctcctaaggacaccagtcctattggattaaggtccaccctaatggccccattttaacttagttacctctctgaaaatcctacctccaaatacgatcacagactccaagctgctggggtgaggacttcaacatgtgaatttggggygaggggcagcttggttcagctcctaacatgca

SEQ ID NO: 60477 - DNA, 2500 bp, Homo sapiens
gtgaggagacagaatgagatccttgtcagactctgttatgtcagcatgaatctcctcctagggccattttgcctcaaagagtatgttttgagtctttttgtcctggaaaaacccacaggagctgtgagtaaggatggtggcatgcaggggcccaggtgtgggctggaacacttcttgctgccagctccagagttcctgggaaagcagtatgatagtggtaggaagaatttctaggcaatactgctttcagggaataaaggtgaaagtgaagggaaaattaagctcacaaatgaaaatgaaagataaagtagcctttcttttctctggcctgattaagcttagtactctttcgttgatgaaaagaggatccaacatgaggattttaagcttgtgctgtccatggtggcttcatatctagaaggtatttttaataaaaggagtgctcagatcactggctagaagaaagagcacccaagcacatcagagatgtcatggttagtcccagatctcacaaagggaaccaaaggattgaccaaccccacacaggtcaggtctcttatgtttgaagccttcacagtggcctaaaaacatctgcatgaagcctccaaatggtagacaactggatgcttgatatctcctctattttcttattttggcatagattaatggcttatgatattgcatcacattggtttattaaaaccagaactaacttccctttaattttaattatgagtgaggtttattcagagaccattgcgaatgggtaggaatcaactacaaaagtgtaaaacctgttttcagatagaggccccttgctcccaatgttggaaataaggtcctaatcccaaagttaggtaattttcaggtcaccccagtgaccactggagagacaagagaagccagggagagagtttctctgagaatcagtcagaagtctaggcctgtgtctctcaaccttgattgtatagtaagatctccagggaggttttttttgtttttttgtttttttgtttttgtttttttttttggttttgtgtgtgtgtgtgtgtgtgtgtgtgtgtgtgtgtgtgtgtgtgtgtgtgtgtgtttaattcccagagacggcagacaagctcaagaggtcttcaggtggaaaactagagccattacctgagtagctgtaatgcagctgctgcctcaactccgtggtaaaagggagatattaaagatattggatcaaatatttcaccccctgcagagaagtcttcatgctgcctacgaagtcttctcttgcttaaaggtgcttccccactccccagaatacaaagtccaatgcatagcatctctgagaatcaggcctctttctcctgttcccagcttcccaagaattccaccattccagtttttttctaggtatctaaccttatctacatagccatgtatctgagtgatggctgactccatccctatatcaaagtaagtgtctaagccagatgttggcaaactatggcccttgggccaaatccaatctgccacttgtttttgaaaataaagttttattggaacacagtcatgctctttcatgtacacattacctatggcagtttttgcactacatcagcagagttgagtagttgcaacatatgatatggtccagaaaacataaaatatttattgtttagctttttatagaaagtgcttgtgaatcctggtctaagtctttttgctcagagacagatttagaagtgacaacatgagctatttcaggccaaccaagtatgatgagatgtctgctacagtttcctaaaaagacagaacaggaaaagagagccctgtccatcttctgaccattgctatgtctggatatgagagtcaaccccttgaagactccttgaagaggaggtgttgaaagaacttacgtccttgatgacactgttgagtctctcaatcatccaactttgcagaattccccactctagacttcttaatatctgacatactaactacctgtattgctcaaatcagtttctgatggggtgcaatattatttgcatgttaaatatcctgagtcaaatataaattactaaacttgactccaagagaaatattaagctaaaaaatactaatacacatttwaaaatttcgtagatagatcattgtcaataatctaactacaaaacaaggaacagattcatagagtataccaagccctcaaagaacaaataacttattttacacaacagttatagaaactataaaagggagatgctctccatatcctttttatgaagctagaaaaactttgatattaaaagtgcataagggcagtatagtatgagaaaaaatgtataatagacatagctatgaacataggtacacaaacttttcataacacctaatatctgttactttttaaccaaagaaagtaaggaagcagaagagagggagaagagagaaaaagagagagagagaaagataaaaagagaaagaaggaaaaaagcaagcaagaaaaaaaatt

SEQ ID NO: 60478 - DNA, 671 bp, Homo sapiens
gcataatcacaatcaaagacttgaacaatgagaaataaaatggaaaggttgaggttacagggggaaaactcttgtaacctagtcaatagataagtatctataagaatttgagcttgatggtcatttgaatactacaatgaaaaaaaaccacaactgtggaatttatgggaatctcatatatacttgcataaatggagatcccaaaagaagaaacaaactttaaatgaggaaaggtacaataaagtagratatttgctcccaagtaatttctattcatctaccctcaaagatatattaccttgggttgtttctaaaatataattgagaatgaacttttgtttcagcagatttaaataaaacattataagaatgacttttaaaacatgtggataaggaagattcatttgcccagatcagtggtcctcaaacttaagtatgtttcagaatcacctgaaggttgttgaaagagatcactgggtcctgtcacagtgtttctgattcagtaggttggctgtggtgcataaaaattgaccacatagttggaagtaaagcactcctcagcaaatgtaaaagaacagaaattataaactctcagaccacagtgcaatcaaactagaactcaggattaagaaactcactcaaaaccgctcaactacatggaaactgaacaa

SEQ ID NO: 60479 - DNA, 1496 bp, Homo sapiens
ccttgccccaagtccaaattccttagcatgcagtgcctttgaatacaactccaaacttgcttcccagcaccccagtctttgctctaaacccacctaaatactgattcctgcttagggagatcatgcaatatcaaactatggcttaacatctcctctctccctaggatttccttactaccttatcaatcttgcaagcttcagctcatctttcaaaacccaggttccatgtcacctcattcataaaactacccttggctttcacagaagtggtccatcctgtacatgtgctggggcacatgtacacacttgtgctacttaacacacagcacaagtakcctcggttagcaaggccctatttgggaggaagtcacatatttaaaatcgaaggctaacctgattaagcccgccaaacttaacctgtctttttcatcgcttacttctagttgatctattttaaactccccactagcaagtcacatagcaaatctcccacgaacttccttacagataacttccgaatgtgggtcactacagtaacggttgcttaaagttatttccaggaaccagttggcagctcttgtccacttcaagctgattaagaccaccgaaccttcaactgggcctgcatgaatgcccaaagagaggtgactgtttgatgtcagagggccaaaacctccttcctcagatcatggtgatactgccatttttcaaacatgcattctatgaagagctgtgtaacttgactacatgtatgcagatcctaactaactcacttttccttacccccaatctttctcccccacaccttggagaaccttggtactctattccaaaaacatccttaaaatcccatctttggagaggtgggtttgagatttgttctcccatctcctcatttggcagtcttgtgagtaaaatcttttctctttgccaaaacaagtcatcgcagtgactggcttgctagttcaatatattcgtatacatctttcaactcaatgcaaccctgcagaagcctgacacaaagtggttcacgaagttagtgaacctcaacaagtatttgattgattattcaatttaactttaattctatttccctttatagagactctttttttaaactagccctaattagagcactaaaaacagaattctggaaaaattagcagcaatgagagtaggcatgaatgaatcttcctgaataaaaacaggcagtcgactacataacaaaccaagaatccaagtgcaacatttacaacaaaactagggggtcaatgtatcccccttgaagtgcaaaatgcaacgaggaggggataaacaaccagctatggagacttccttagcatgtgaacgaagccatattctaaaacaaacaaacaaacaaacaaacaaaatcctccccgccacctcccgaaggaaaaaaaaaaaaaccaccacaaattacaggcaaaaatgagaaaaaacgatcagaatcaaaccctctataccagcagtcctca

SEQ ID NO: 60480 - DNA, 598 bp, Homo sapiens
ttagcattatgtgagctgcctcagtacttggtgttcttaaagaatcagcttgtggtgagtaagaggtggaaggagctggggtgggctcctccagtctgacattagttaaatttacattatgattaacagcagaggttgatgatgctgggtttgtttcaggcgaaaggtaagggactggagatgaagcttctgctttctgtgaagtgtttaaaatattttaaatatagtgtttctgtttactgctaactttccacttcaatttatagtgattggtagacatacattttaagtgtgctgaataacaaaattatgacctcatgtcctaaactttttgggaaaaaaaaaaaatccagtacattgctgtgttaagacaaacacacaaaatttagaattaagcccttggyactctcaaattgaaattgaagattaattcttaatctggagaaaggacaacatatatatttttaactcaatcaccacattctaaaatttaataatgcacctctatctacaaaacgttgaatgcttgctgcttacctgttgagaggctggcttaaatccaggggagtctattctatgaattggttgtggctgcgct

SEQ ID NO: 60481 - DNA, 548 bp, Homo sapiens
tctaagtttagmaattgaggtcccttttttttgaaaaagcacagacagcattgtattggaatggtgagattatgggtatttttctggtttactttccaatttttctgtaatgctatgcatattcaaaaatgaagaaaaagaatggacttttaaagaatgcttgttctttaaacactaccaagatagttaactcataacttctacctaaagaaatgagttccacgttatgaaaagttaaagagaaaatggtagacatggccacataaacacatgtaaatgacctgcacacctaatgcctatctttgttactctttccctggacttaacaaacaaagctcacagggtattttgaaactcacgattttatcactgcatttttgtttaatacatgtttttatcttcattatattttctttctcattttctagaatatagctgattttttagttagggcaagggtgacagtctaggggggatttcagttgtacaaatatatacaggaaagtttgagtgtttttacttcaacagaaaagaagaagagaaacatt

SEQ ID NO: 60482 - DNA, 636 bp, Homo sapiens
aggccacagcatctacgggaaccaccccaccactgaagacgtcgtgagagttgaagtctcggaggtagtggagggtggaaaatgcaaacagccagaccggggcttgcaggtggagaacaacccaaggaggcggagtccaaaatggacctggatgcaagttcctggacrtgcccaagaactgccaccggctggccaggtgatccccatcaccaagcagtgcgccttcaagtgcattctctggggcttcagaaagtgctgcccacgcgcaggtgtgcgtcctggggactgcgggacaggagccagtgggagtcatcctgctgaggccgctcctcctgttcccctccgccgagtcttccaggaagaacagctcgggcctaaagcaccttcacgaatttttcaatattccatttttgcagcttcagagggagaaaaagcagttggaggtggactccacgctggaggagcggtggtgcagcaggagactgaggaccagaagcattgcactttcctccacgtgggggctcccagccgcagctccgcgtccccgctggcggccaacaggcaaagccggtccttggcctcccaggagccagtgacgcttctgagcgcagtgtccacccggagctccagaccccc

SEQ ID NO: 60483 - DNA, 680 bp, Homo sapiens
ggtgatgtataatcatgttttaaagacaggtaaataaaaaattattaacttaggtgaataagaagggcaagaataaactcaaactgtaaagacaaagctattaatttttgtatatttatttggaaccattcactttactayacaggcttatttttgctagtggtttttcaccccattttcttgagagaatataaaatcactagcaaataatatatgtcacaaattgaggtgtagcggatcaaagtgagacaaaactcaatatttttatgggttattcccaaaggtgtgggtaggaatcactcacctaacaagtgtctattgatggttattgtacacgaggccctgtgataagcactgaagataaagtgacccagcaaaaatggcagtctcagacctcaaaacacttaccttcaaatggtggtgtgagacattggttaagtaatcacacccaaatgcaaaaatgtatggagaagtacattcggctaagacggcatatgatcgcaggagtacctaatcagggaagacaaggaaggctttcctgtagcagggacactggacctgaggtcctgtgaaagggtagaaagaaggagatggtggagcaggaccaggggaaaggactgaaagcatgccctgtgcatgggacgaggggtgctcaaagtcaggctggagatgtggacaga

SEQ ID NO: 60484 - DNA, 662 bp, Homo sapiens
aaatgatgaatacatttcaacatgaatattaatgctgccactacttactagttgtattattttttaatcctatggcaaaattgtttgctcttgcggaggaaggatgcaaagcaagtggcttatgattaatttcttttccagttaccaaggggatactaccaaagaaagaaattaggtggcatgatttgattttcagcaaatgtgctgaaaaccagtgacaactgctgtgactagagagttcttacctatagagagctcttcgcaggatgtccctggcttagggttgtttatggcaaaaaaaaaaaaaaaaccctagaatctatgaatttataatgcatctgtctctgaaaaatatctaattggctgtacaattttctagagtataaggtagagatgttttataaccaaatttgtcatggctctgtgaggtgaccacactgataacagagagcttttcttcagcggaagactctcctggagagtcaatcaggaagtccaaagcctctctcttttttgtccatgcgtctcaactgtattacggaaattgtttgtaaaggctggatcttggttaagatgtctkatttgacaaacagattttctggtttacttctcactcaagttacatgttggttatgattcaatgacagctttgttctggatcc

SEQ ID NO: 60485 - DNA, 1348 bp, Homo sapiens
tgagtactgcagaacccaggaattatttggacatagggtctttacatgggagttaaaatgaggttgttgggaagggaccctaatccaatttgactaatatccttgtaaaaagggaaatttggagacagacacacgtagagggaagatgatgtgaagagatcaaagaagaagacaggtgtctacaaaaccaggaaagaggcctggaatagatgcttygttcatagccttcagaaggagccaaccctgctggcaccttagtgttagacttctatcctccagaactgtcagacaaaaaatgcccattgtttaagtcacccagtgtgtggcactttgttatgatgtctctagcaaactaatataccttgtgaccttggcagttctgtcttcctgcctctgtaaaatgcaaatattactgatatattacctcctagggcttctgtgaagaggcgatgagttaatacatgcaaagtgctacaacagtgcagacgtaatattaatactcagtaaatgttaagatgattattaacatcaacatcatcatcaccactgtataaaaaaaagaaaattggggctgatatctgatctctacaactttaccatgcagcatccctgtccattgctttttctaaattctattattaaccttgagtgtcttgtaattgatcatgtttcaacctttctttgacagcaagtactctcagaaataaaagtattactcggaccaagcaattgaacaacatattcatgcatttatgttcatgtagaaataccaattatacacgttttattttattttattcatgactctattttgtatcttatacttatttccccattgaaatgaggtgaattaaaaataaaaactttataaattaattagctgcaaaaatacttatttttgtttgtttttccaaatggttgcaacttacatagtgtaaaatacaattcatgaaagtggaaagatgcagaaatcagaatggaaatgagaaccagcaacctgagagtaccacagaaatattcagtcacatctgtgtaaccaggggctgtacagtcttaggtggaggtattccagatttttgtttcttagtttctgtcagatgtaaaatgtgtatgtggaactattgtgcactttctttgtttggtagagacagtctctctgtgttgcccaggctagtctcaaattcctggcctcaagtgatcctcccacctcagcctctcaaagtgctggtactacaggtgtgagccaccatccccagcctactgtgcattttctattatttgaagcaaaattggggccacaaggaaggtcatctgtagtatgccaataacataaacctctgacatttca

SEQ ID NO: 60486 - DNA, 827 bp, Homo sapiens
actgtgttggccaggctggtctggaactcctgaccacaggtgatccacctgtctctgcctcccaaagtgctgggattacaggcatgagccaccacgcctggcctggagctgggttcttaaggcccatccaattgcagggataggcagtaggtcagggtggcacatgaacacagtttggaaaagtctacacaatttcagacggctgaaagttgaggtaaaaggccgaaattaaaccagtctattccacagaataaatgttcttgttgatatttgaagtgcacccaagaagtacagagttgcaaatgattcactaaatttacttcattctgctccaagtacctaagggtacaaggaattggaatcttctgccttcctttttaggggrcagatgagaaatagagaaagggaagcctctgagaacggggaggtagaagggagagcaaagggtctgttgtaaggggtgtgggagagacagcagatttggaagcagggtacatccagccctctctggccttcttggatgagcctctctcctcccatctttgggactacaatggggattacctcgtttttgtttttttgaagaaagcatggttacatttgtcttatatattttttaatttgtatgaatttatgggtaacaagtgcaattttgttacatacatagtggtcaaggcagagcttttagggtatccatcacccaaatgctgtagattgtacccattagtaatttctcatcatccccccacaattctgagtccccactgcctatcattccactgtctacatccaggcagacactttttttagcactcacttatgagcga

SEQ ID NO: 60487 - DNA, 827 bp, Homo sapiens
actgtgttggccaggctggtctggaactcctgaccacaggtgatccacctgtctctgcctcccaaagtgctgggattacaggcatgagccaccacgcctggcctggagctgggttcttaaggcccatccaattgcagggataggcagtaggtcagggtggcacatgaacacagtttggaaaagtctacacaatttcagacggctgaaagttgaggtaaaaggccgaaattaaaccagtctattccacagaataaatgttcttgttgatatttgaagtgcacccaagaagtacagagttgcaaatgattcactaaatttacttcattctgctccaagtacctaagggtacaaggaattggaatcttctgccttcctttttaggggacagatgagaaatagagaaagggaagcctctgagaacrgggaggtagaagggagagcaaagggtctgttgtaaggggtgtgggagagacagcagatttggaagcagggtacatccagccctctctggccttcttggatgagcctctctcctcccatctttgggactacaatggggattacctcgtttttgtttttttgaagaaagcatggttacatttgtcttatatattttttaatttgtatgaatttatgggtaacaagtgcaattttgttacatacatagtggtcaaggcagagcttttagggtatccatcacccaaatgctgtagattgtacccattagtaatttctcatcatccccccacaattctgagtccccactgcctatcattccactgtctacatccaggcagacactttttttagcactcacttatgagcga

SEQ ID NO: 60488 - DNA, 358 bp, Homo sapiens
tgtgaagtgacttccttttgtaactaatgaataatttgtgaagagctgctttgaaatgatgtaaatatctgttgayttgaaaatacaacaaaattatactatgaattgaataatacatctaaattaatttgcattttatcaatgacaaccagatccacatacttttgtaaaacagttgctggtgtgtgtgcgcaacaggttgttgacttaggcaatgtgtggaatgttctggattcctagaccccgggcagtagctccaagacagttttgaactttcaagtaagacaaacttagttttgatttccagttgtacacttagaagctatggatggtagatactttgttggggaaaatggca

SEQ ID NO: 60489 - DNA, 1480 bp, Homo sapiens
tgtcatcattgccactcactgacccacacactcatggttcatagcctgagaaatagtttgcaaaggcatatttaccttcattgaaaccttagaaaacatatataaaggcagttcaaaaatcaaccttaaaatatgccataaaaagacagagagaggtaagaagatactcatgaaatcagtcattgtctcaaacaagaataattttagagaaagtggattgggtccttctttccctggttctcttgcttttttctattctcttctgcgagcaataatccttttgtctggcttcttcattatttcaaaggagaaagtacaatatgagcatgcattcacctatactgtcaattccagaaaaaaatagcagagttaaatataaatggaccttagtcatatttaaccattgctctccttgacaatccaaagcttaataaagtacatctctttgcatttagaaattcatatattcatactcatactgttaacctactaaaataaaaaagtagatggaaataatatacatggagctaaagtcaatattaaatagtcccagacatatggtttgtgactaattattaaacataatatatgaattcttccggtgggttatacaattttaattggttgattaaaggaccattctattcttcaaaggagataatcatgctaaattttaagaaaaattacagtggaggtattaatttatttatgtctttataaaaatgtaatataaaatgtttatgcaaaggaggcctgtgagagaggggagtgtcagggtttaataagatatttggagtagtttcatcccatgaccacacatgttctgctttaccatctgcaatctcattagctgtccatgaagatgctgtgctgaatgtagacctgaaatttagacataagcactcacatatatgaaatatacattgctagaggagcaaataaacaaagaagaaaaacattttttgatttgtggcttcacttttgaacaataaccaaaaatattctacatgctygaaggaaaaaaaaactcattttattcttatgagaccaaaggattttattcttacgagaccaaaggaaatgacaacagaaggtgaaatacaatgcaactagcctgggaaatctttctgcttggttcagctgggccatggacaatttcaaaacgaagcaatgtgaaaacagcacattaatgaatggatggataaagaaacatggagagaagatacattactttggctaccagaggtacaaatgcaaaaagattctccacttttgactagtagaactgatgatggatttaaaatcagctgcacactgagggatttttgttcaagtgtaacataaattgtgttacaatatgaggataaaatatgttattttgggctatgttttagtgcataaacactaacaacattaatgaaataataatttacttgaaagatgtttaatctatttgtaaatagctctgtcacctgctgaa

SEQ ID NO: 60490 - DNA, 1480 bp, Homo sapiens
tgtcatcattgccactcactgacccacacactcatggttcatagcctgagaaatagtttgcaaaggcatatttaccttcattgaaaccttagaaaacatatataaaggcagttcaaaaatcaaccttaaaatatgccataaaaagacagagagaggtaagaagatactcatgaaatcagtcattgtctcaaacaagaataattttagagaaagtggattgggtccttctttccctggttctcttgcttttttctattctcttctgcgagcaataatccttttgtctggcttcttcattatttcaaaggagaaagtacaatatgagcatgcattcacctatactgtcaattccagaaaaaaatagcagagttaaatataaatggaccttagtcatatttaaccattgctctccttgacaatccaaagcttaataaagtacatctctttgcatttagaaattcatatattcatactcatactgttaacctactaaaataaaaaagtagatggaaataatatacatggagctaaagtcaatattaaatagtcccagacatatggtttgtgactaattattaaacataatatatgaattcttccggtgggttatacaattttaattggttgattaaaggaccattctattcttcaaaggagataatcatgctaaattttaagaaaaattacagtggaggtattaatttatttatgtctttataaaaatgtaatataaaatgtttatgcaaaggaggcctgtgagagaggggagtgtcagggtttaataagatatttggagtagtttcatcccatgaccacacatgttctgctttaccatctgcaatctcattagctgtccatgaagatgctgtgctgaatgtagacctgaaatttagacataagcactcacatatatgaaatatacattgctagaggagcaaataaacaaagaagaaaaacattttttgatttgtggcttcacttttgaacaataaccaaaaatattctacatgcttgaaggaaaaaaaaactcattttattcttatgagaccaaaggattttattcttacgagaccaaaggaaatgacaacagaaggtgaaatacaatgcaactagcctgggaaatctttctgcttggttcagctgggccatggacaatttcaaaacgaagcaatgtgaaaacagcacattaatgaatggatggataaagaaacwtggagagaagatacattactttggctaccagaggtacaaatgcaaaaagattctccacttttgactagtagaactgatgatggatttaaaatcagctgcacactgagggatttttgttcaagtgtaacataaattgtgttacaatatgaggataaaatatgttattttgggctatgttttagtgcataaacactaacaacattaatgaaataataatttacttgaaagatgtttaatctatttgtaaatagctctgtcacctgctgaa

SEQ ID NO: 60491 - DNA, 1698 bp, Homo sapiens
ggggactaagtaatcctttccactgcctctattttatttctcttgaagaacataaaaatctaacaaaagtgcttagctatccaaaattatcaaatattgaaagaatgattttttttccacatcaaacaaaatttagttaaatggtagtttccacatagatataaaatgttgagcagcattagagattaaccctgtgaggtgggggagataaagaaaggtttagtggtggtacaattagctgaggagtcaagagaaatagaaaacaaaaaatcttctattttgtcttctttggatcatgaatccattgttatgttttatttttattaaacaattatttcccatgctggaagagtgaaagagttgagccatcctaaggaacttaaggtgtgacaatttacagagaagaatagttgtaacattgctcatttactctgagtataaacatgaaaaatagttttaaaaatacggtgaaataatttattccacagagaagtcatggagctctcttacacatcatattgtatactaatagctttgggtgggtggtcttcaggtgatagcacagaaatggagtacaaatttgcagggaaatgacacaaattgaatcaggcttcagtttaccagctactgattgctattaacagggcattttgatgtgagtctccactaagcatgtgagttagaaaatagctctaaagaccatccttgatggatcattactttgagatgcaaaccccagattgcattattaaaacatcttggaatcaattctgtgcatttccaaataagctctggcatgcatatgaccacatcattaatacagtttacttctctggatcctagactcttttttttctttttttttgagatggaatcttactctgtgcccaggctgaagtgcagtcggctcactgcaagctccgcctcccaggttcacgccattctcctgcctcagcctcctgagtaactgggactacaggcacctgccaccacgcctggctaatttttgtatttttagtagagacgggrttttgccatgttggccaagctggtcttgaactcctgacctcaggtgatccacccacctcggctttgagaacaagaacaccatatctgctggtctcaaactcttcacctcaggtgatccacagtcctcagcctccccaaatcctaggattacaggcgtgagccactgcacccagccaaaaaaactgatgctattttctatacaccttgcaccttatggatgtgcctaccagagatctggattataaccctaccttgtcaccataaaaaattcattcctattggacactgacatgaaagccttatgttacgttttgtgattaagcagttttctcttacagcttatttacaagggaaagagaaaggaaacaagaaatagtttcaaaaaaacagccaaaatttcagtaatcattaaaatcaacacaattaaatactctttttttggaatgaaatttcgctcttgttgcccaggctggagcacaatggcacaatctcagctcactgcaacctgtgcctcccgggttcaagcaattctgcctcagcctcctgagtagctgggattgcaggcgcctgccaccacgcctggctaatttttgtatatttagtagagacagggtttcaccatgttgaccaggctggtcttgaacttctgacctcaggtgatccacccgc

SEQ ID NO: 60492 - DNA, 1324 bp, Homo sapiens
ctggtcatattaaaataaaagttttycccccatcaggttagcagaaatgtaaaatggagattggaatttagatgtagagttttgtgtcagaaccacgtttgatagtcagttacacacatctggcccacagttaagaatgtaaactaacagcattaagagccagacatcctgggttcaaataccagctctgctatataaggcttggcctttctgtgcctcagttgtctcacttgcaaaatcaggatgatatcatcctccaaggattactgtgaggattaaattgttaatatgcttaaagtgcttggaacagaacacacactctgtgaagtcattactattatcattacattaacacttctctttttgaaaaaggacactttttctattagttaagacaaagcaagccatatatttgcaaattcctaaaacaatgattgaaattaaaattctataggagaatgacttaaattttctttgtaatcagaatagatatgcctccagttccattcttgaagcaggatacatgccaaggtcagaaggaaggtgacttctgctttcacaagcctgtgagagaatgggatccgggatgagtcctctgactcaggggctcacctttcccaccatgtcatgcaacgcatcaaggaggctcatgttctttcaatttaaggaatgcacatttcattgcttgaaagaggaaaatttaaatgtttcttcaaaggttatacagaatattatgacagacttaggacaacaaacaatgcttctgttaactgttagagttctctttggcagtgttattatgagttaactgctcagtaagaagatggttaatattgagtgtcaacttgattagattgaaggatgcaaagtattgttcctgggtgtgtctgtgagggtgttgccaaaggaaattaacatttgagtcagtggtctgggagaggcagatccaccctcaatctggtgggcaccatctaatcagctgccagcgaggaggcaggagaagatggaagagcagactactgagtcttccagctttcatctttctcctgtgctggatgcttcctgccctcgaacatcagactccaagttcttcagcttttggactcttggacttacaccagtggttttccaggggctcttgagcctttggccacagactgaaggctgcgctgtcagcttccctacttttgaggtttggggactcagacggaaccaccactggcttgcttgctcctcaacttgcagacagcctatcctggaattttaccttgtgatcgtctgagtcaatactccttaataaattccctttcgtatatacatatat

SEQ ID NO: 60493 - DNA, 1324 bp, Homo sapiens
ctggtcatattaaaataaaagttttccccccatcaggttagcagaaatgtaaaatggagattggaatttagatgtagagttttgtgtcagaaccacgtttgatagtcagttacacacatctggcccacagttaagaatgtaaactaacagcattaagagccagacatcctgggttcaaataccagctctgctatataaggcttggcctttctgtgcctcagttgtctcacttgcaaaatcaggatgatatcatcctccaaggattactgtgaggattaaattgttaatatgcttaaagtgcttggaacagaacacacactctgtgaagtcattactattatcattacattaacacttctctttttgaaaaaggacactttttctattagttaagacaaagcaagccatatatttgcaaattcctaaaacaatgattgaaattaaaattctataggagaatgacttaaattttctttgtaatcagaatagatatgcctccagttccattcttgaagcaggatacatgccaaggtcagaaggmaggtgacttctgctttcacaagcctgtgagagaatgggatccgggatgagtcctctgactcaggggctcacctttcccaccatgtcatgcaacgcatcaaggaggctcatgttctttcaatttaaggaatgcacatttcattgcttgaaagaggaaaatttaaatgtttcttcaaaggttatacagaatattatgacagacttaggacaacaaacaatgcttctgttaactgttagagttctctttggcagtgttattatgagttaactgctcagtaagaagatggttaatattgagtgtcaacttgattagattgaaggatgcaaagtattgttcctgggtgtgtctgtgagggtgttgccaaaggaaattaacatttgagtcagtggtctgggagaggcagatccaccctcaatctggtgggcaccatctaatcagctgccagcgaggaggcaggagaagatggaagagcagactactgagtcttccagctttcatctttctcctgtgctggatgcttcctgccctcgaacatcagactccaagttcttcagcttttggactcttggacttacaccagtggttttccaggggctcttgagcctttggccacagactgaaggctgcgctgtcagcttccctacttttgaggtttggggactcagacggaaccaccactggcttgcttgctcctcaacttgcagacagcctatcctggaattttaccttgtgatcgtctgagtcaatactccttaataaattccctttcgtatatacatatat

SEQ ID NO: 60494 - DNA, 1324 bp, Homo sapiens
ctggtcatattaaaataaaagttttccccccatcaggttagcagaaatgtaaaatggagattggaatttagatgtagagttttgtgtcagaaccacgtttgatagtcagttacacacatctggcccacagttaagaatgtaaactaacagcattaagagccagacatcctgggttcaaataccagctctgctatataaggcttggcctttctgtgcctcagttgtctcacttgcaaaatcaggatgatatcatcctccaaggattactgtgaggattaaattgttaatatgcttaaagtgcttggaacagaacacacactctgtgaagtcattactattatcattacattaacacttctctttttgaaaaaggacactttttctattagttaagacaaagcaagccatatatttgcaaattcctaaaacaatgattgaaattaaaattctataggagaatgacttaaattttctttgtaatcagaatagatatgcctccagttccattcttgaagcaggatacatgccaaggtcagaaggaaggtgacttctgctttcacaagcctgtgagagaatgrgatccgggatgagtcctctgactcaggggctcacctttcccaccatgtcatgcaacgcatcaaggaggctcatgttctttcaatttaaggaatgcacatttcattgcttgaaagaggaaaatttaaatgtttcttcaaaggttatacagaatattatgacagacttaggacaacaaacaatgcttctgttaactgttagagttctctttggcagtgttattatgagttaactgctcagtaagaagatggttaatattgagtgtcaacttgattagattgaaggatgcaaagtattgttcctgggtgtgtctgtgagggtgttgccaaaggaaattaacatttgagtcagtggtctgggagaggcagatccaccctcaatctggtgggcaccatctaatcagctgccagcgaggaggcaggagaagatggaagagcagactactgagtcttccagctttcatctttctcctgtgctggatgcttcctgccctcgaacatcagactccaagttcttcagcttttggactcttggacttacaccagtggttttccaggggctcttgagcctttggccacagactgaaggctgcgctgtcagcttccctacttttgaggtttggggactcagacggaaccaccactggcttgcttgctcctcaacttgcagacagcctatcctggaattttaccttgtgatcgtctgagtcaatactccttaataaattccctttcgtatatacatatat

SEQ ID NO: 60495 - DNA, 410 bp, Homo sapiens
ggatcctcccactcagtgctcctgaccccccaggtagctgggaccacaggtgcgtgccacctgcctggctaatttttgtwtttttggtagagacagagtttcattatgtttcacaggctagtcttgaattcctgaactcaagcaatccacctgcctcagcctctcaaagtgctagaattgtaggcgtgagtcaccgccgcatccagccaatttttataaggcatgaagtttaactattattattagtaatagtagaagagaatgctgtatgttgatttaggagtgttttggctaaaatctgaattaacaatttaaggtacctttgttttacaagatattagacttagtcatatgggttcacagcattccactgaagtttcagattgtgctctgagaaacagcctgcttag

SEQ ID NO: 60496 - DNA, 633 bp, Homo sapiens
ggatcccacttttagacatttgtagtaaagaattatgcaaactatggaagatgctttaaaaatgtgaagatagtaattgcagtttaaaatagcagaaagctggggacaggggcagaggtgttgtgactaaaggtctcacaataggaaaatgttgtcaattatggttcatccacttaactgaatttgaggcaaccactaaaacaccattatgaagcagtattactcattttatgatgaggcggtaaggtaaaaatgagtataataggaatgaaaacccagggtataagaagcatagccatagttggccaggcgcagtggctcacgcctataatcccagcactttgggaggccgaggcgggcggattacctgaggtcaggagttcgagatcagcctcagcaacatggtgaaaccccgtctctactaaatacaaaattagccgggcrtggtgacacatgcctgtaatcccagctacttgggaggctgaggcaggagaatcgcttgaacctgggaggcagaggatgcagcgagccgagatcatgccattgcactccagcctgggcaacaagagtaaatctccgtctcacctaaaaaaaaagaaacaaaaaagaagcatagccatagtttaattacaa

SEQ ID NO: 60497 - DNA, 1049 bp, Homo sapiens
atagaacaattaatttttcaacataaaatatcacagagtgaacacaggcaccccaatataagagagaagtaatttaagtattgaaaaagggacatggagaccagttaattgccaggatctgaaagtcagcggtctaatccgattaaatatgtaaatgctgcagtggtgttcattttcagtgtcctttagggctaataattaaatgatggatttagaaattaattgctaggtagtggagtgcgtgtgcagaaagcatggagtcctttcaccagctgtgcccacttgcaagttctatggccttggtcgtttctgacttggccataaaggaagtgaaaagaaatttacaccaagaacaaataacctccttcctctgccttctctctgacatgacagtcaaaatgagagaatattctcccttgaggacagtgctgtattgctgcttgacttgtaataagtgtcaggagagtagcactagggaaagatgaaaaccgaatcttagcggtcttgctcttcctgttagagaagaaaatgcctgtgtaaacctgggtgtctggttcataatggaaaaagtctctgcctgcctgcatcagcctacagccatctccacctccttcagttcccagagggaacattgtcttaacagtgcacccagagcatctcttccattgtcatcttgacttacttagtttactgcatacctaagcctgtttcttctagataactgtataaggagagccagggatgttgggtgatatgtgatttcttgctagtattttggctccatatactgtagtcatgtgctggcatgctctgggtggggtcgctcaggtaccagtctgcctctcggctccatcctagacaggtaggctggaagagtagcccgattgcattctaactagatatgagccttccttctattgggtaaactcatagcacattgtttgtaaatctgttatattatttatttgaattatccttgaatggtactatgtgcctcatataaggccttacaygttccataaagatctcatacagagttagagaatatg

SEQ ID NO: 60498 - DNA, 1078 bp, Homo sapiens
tgccatgacagtttacaaatgccatgacatcatcaggaagttaccctatgtggttggaaaagagaaggaatcctcagtttcgggaattgcccactcccttcccaagaacttgtgaataatccacaacttgtttagcattataatcaagaagtaacaataactgtaagcaggtgagcagcccttgcggctgctctgcctaaggagtagccgttcttttgtttctttacttctccagtaaactcactttcatgttactctaccaatttgcctgaaattctttcttgtgtgagatccaagaacccactcttggggtctggaatgggactcctttccagtaacaccagggcactcatttaaatgacaagggcagtctgtgggggttacctgggtttccttatggctcacgtggaggtgggaggtcctacattttgcctcttcttgtattccatctcctagttctccttgtcctcctcaagtgcccttttttagctctaccctcctggataaagcaaccttaattttccgttttgggtgaagttatttagctgttcatctacatttctcctaatctctttcttgtgaatgaattttatgttctgcttctttaggcctttcctctgtgacacaaaatcttttctcacttttttaaaaaaacttctttaacatttcagttctcactttaacactttggctttcaagagtactgtctttgaaacaagcttcaagtgactattttggaagtcaaatactgaatagtgatgctttttctctatgcyttccacctctaacaaccctaattcttctgcaggcaatggatgtctctgctgaatagcagttagtacaaaaaaaggcaaagcacagggacagattttaaagtattttctcacaacaaaactacaaggctactcatacagacacacaattcactgattctgacaggtagacttttttattttctttcttagtatatatatttaaggtgtataacatgctgttttgatatatattaaacagtgaaaggattacttcagttaagcaaattaacttacccatcacctttcatagttatcacgcttgt

SEQ ID NO: 60499 - DNA, 1078 bp, Homo sapiens
tgccatgacagtttacaaatgccatgacatcatcaggaagttaccctatgtggttggaaaagagaaggaatcctcagtttcgggaattgcccactcccttcccaagaacttgtgaataatccacaacttgtttagcattataatcaagaagtaacaataactgtaagcaggtgagcagcccttgcggctgctctgcctaaggagtagccgttcttttgtttctttacttctccagtaaactcactttcatgttactctaccaatttgcctgaaattctttcttgtgtgagatccaagaacccactcttggggtctggaatgggactcctttccagtaacaccagggcactcatttaaatgacaagggcagtctgtgggggttacctgggtttccttatggctcacgtggaggtgggaggtcctacattttgcctcttcttgtattccatctcctagttctccttgtcctcctcaagtgcccttttttagctctaccctcctggataaagcaaccttaattttccgttttgggtgaagttatttagctgttcatctacatttctcctaatctctttcttgtgaatgaattttatgttctgcttctttaggcctttcctctgtgacacaaaatcttttctcacttttttaaaaaaacttctttaacatttcagttctcactttaacactttggctttcaagagtactgtctttgaaacaagcttcaagtgactattttggaagtcaaatactgaatagtgatgctttttctctatgctttccacctctaacaaccctaattcttctgcaggcaatggatgtctctgctgaatagcagttagtacaaaaaaaggcaaagcacagggacagattttaaagtattttctcacaacaaaactacaaggctactcatacagacacacaattcactgattctgacaggtagacttttttattttctttcttagtatatatatttaaggtgtataacatgctgttttgatatatattaaacagtgaaaggattacttcarttaagcaaattaacttacccatcacctttcatagttatcacgcttgt

SEQ ID NO: 60500 - DNA, 750 bp, Homo sapiens
attactgaaaagtcaagaaataacagatactggcgaggctgtggagaaaagggaacccttatacactgctggaatgggaatgcttatacactgaactcatgtaaattggttcagtcattgaggaagacagtttggtgattcctcaaagaacttagaattagtgttcaacccagaaatgccattttgggatatatacccaaaataatataaatcattttaccataaagatacatgcacatgtatgttcattgcagcattattcacatcagcaaaggtgtggagtcaatgtagatgcccatcaacagtagactggataaagaaaatgtggtacatacacatcgtagaatactatgcagccataaaaagaatgagattatgtcctttgcagcaacatggatggagctggaggctattatcctaagtgaactaacacaggaacagaaaaccaaatacctcatgttcttacttataagtgggagctaaaattgagaacacatgggcacaaaaaagggaacagcagacactggggcccacttgaggttggaaagtgggacaagggagaggatagaaaaactgccatttgggtacgatatttcaccttggtgacaatctctacatcaaacctccatgatctgcaatttacctatataacaaacctgcacatgtaaccctgaacctcaaataaaaattaaaaaaagagaatgaaragaaaattaaaataataattatggaaaaaataggaagtcagta

SEQ ID NO: 60501 - DNA, 646 bp, Homo sapiens
gacaattcagcctggccagaagttcttggcaagctattgcctattaccagaaaatcaaaggagtgaacaagaaatttcccaacaactttccctttccctttatattattttttgaattagagtaaaatggacctttttgtgtgtttgtgtacaactgtatgccttttatttcatcttaccttattgcaccagctaggacttaacagtgtgatgttgaacaggagtgatgagagtgaatatccttgacttgttaccaatctcatggggaaattttctctgtcctgagtgttagggaacccctttcccgctgctggagccagaacaatagggctgctcctctagctcttgctttgcctgcctatgctatttttggatttttgactgctttgtgttccagctgggtgatagcagaggaaagggaagttgtaaactcaccactagttaggtgacactttgaattctgatatcktcccccaatccacctgctactctgtacttttcagttctcaaacagctactccctgtatcctgtcctggctttttagctgcattcagtgggagagtcaggatagaatgtgtttttgcttttgttgctattacttttggcatcttcatcatgaaatctttgcctgttcctgtgtccaga

SEQ ID NO: 60502 - DNA, 697 bp, Homo sapiens
ttagaagtcaagagtaggctgggcatggtggctcatgcctgtaatcccagcactttgggaggctgaggtgggtggatcacttgaacacaggagttcaagaccagcctggccagcatggcacaaccctgcttctatcaaaaaatacaaaaataagccaggtgtgatkgtgggcacctgtagccccagctactcaggaggctgaggtgggaggattgcttgagcccaggaggttgaggctgcagtgagctgagattatgccacttccctccatccagccttggcaatggagcgagatcctatctcagacaaataaaccaacaaacatacaaacaatctgtcaagagtagatgaagactagttaggaggttaacacaggaggaaattacatacttcagatggatgaaaactgaatgagctgctccttcaagtctttgttctactcattatctatatctacccatttctaaagctatattttttaaaataaaatttgttataccatatatattaaactctgaatttttaacttaacaatttattgtgaacattttcatcattttttctgttattttttaatgaccacataatatttcctcatgtgagaacatcataatttattgaatcatcccctattgatagatatcaaaattcttaatttttcaatggacactactgtaatgactatctttgtaaatat

SEQ ID NO: 60503 - DNA, 703 bp, Homo sapiens
ccacaggctgcaagaaagcgtaagattgccattcgaaaagcccaggggaaaaatgtggaggccattcgggagctgaatgagtatctggaacagtgagtattttacaagaggattgtgttttgttattctgataaatcttttttaattaaaatggaatttgcatttgattttcctgtttgttttcatgctgttcatttacagaatatctacacacttacttttttttcttttcctctcaccagatttgttggagaccaagaagcctggcatgaacttgcagaactttacatcaatgaacatgagtaagttattaaacacacaacattttgttgagtgcagttttcatcactgtaagttcagaaagcactgtggtttccaaaggattggtgagagggtgtgaatcatgtcatttgaaatgagaaacagaacaaatcaacaattaaatgaaaaagaacaaatcagtaattcactggtcataataagtgaatagctttaactaggtcatttgtgttttgccaaattgtttatgtttaggaaataagtttttctttcaaatatagatggcattctttggaaataaaaaggcctgcatttgctaagctaagtttatttttggtaaatcaaarttgtgaatttttagagttcagattgttcttatatacaaagagtattatactccctgctgtttaaaaattctgtcaat

SEQ ID NO: 60504 - DNA, 1046 bp, Homo sapiens
gtgcttataattgtattttgtaatctttattcacctatttatgaatactacttctatttactatggactatatcttttcactatgggaaagggattgcacaatgtaccaacaggaagtaccagcaaatggttttacagcagtgacagttttctgtctcacctgagtagcataagccactaagggccagccctcctctctgactcaaatccccacactcactattccaggcggtgggggaaaacagtggcttggaatttttaagttcactgtggagctgtccacctgtttgtcccagtatggcatgccaattaactgctagactttgctttggggattacttctgttgtggtatctatattcctaagtttacaggtcccctaaagatccttccatatttttgcactttcctattgtacattttgggagctgtagttttctcctcaactgatgccatatgttttattataatcattctttttgctttacaatgttattatgaacttataatttttaaatataaaaatattttttctgtttaagggtttggggtggaaggaaaagtagggttctgcattcatttctccatcttgatccaatctcctctacagtcttgtttagtttacactattagtatactaattttattcattgtctttaacagattgtactaagataaattttagatccacctaagtcaaaatacacaaattatgaattagtagtttaaatgaatgaggttttactgctgataaatgaagctttgtctatacaacaccaaacaaacctgtcaactcaagggaaaaacaaaatcagttgaactgattttaagagggaatgctttgattttaaagagttgcaataacgccatgtagacagtctgggttgcatttgacctatgaagtaattcaagcaattagaaattatgtgatgttctctagataacacagccaagtagccatttggtcaggartagcccccaatgagtacttgccctctgcaaatccttttggagttatttttcagctcattcaatcgatttatgact

SEQ ID NO: 60505 - DNA, 703 bp, Homo sapiens
tggatagactgaatgtaagagaattttgaaccactgattcatttctcttttgcttcactttgcttacgttcatatataaaacctacagaacaaaacaatgtgtgcagaattaatgattagaaaccatagttcttccaaatgaccataactggacccttgagtctggaagtctttgaagaaaagcaggtgtatcacatttctaagtatttccagtgtctaagcattcaatatccagaaagtcagtgcttcaaaaatatttcttttagcaagttttaaaagaaaattttaatccacaatatggttaagtcttgtgattcttcccatggtgtgttgagtttctctgccaagtgagactcacttttaccatatgcatcagaacttagttatatattaggtggcttaggggggatattccgggaaacatctttctacttgtcatttggtctagacgaatttataggaatacttatttgcctgccaattagcaaacaagccttctaatatgtcacttgctattttgcagtcacaaaatcctcattcaatatctcattttttwaaaaaaaccaaaacaccagtgttacaggctagaatagaataaactccctcttttgtagttcagaggaattgtttttctcttgaaattaaaacattgatgagaccttagattattacgtagaatagaccaaccttctactcagtgcaa

SEQ ID NO: 60506 - DNA, 438 bp, Homo sapiens
gggagggtaaatgcctcagtagaacatcggtgttctgcctctgatctgtgggcagctgtattgaagagaggatcagggcacattctagtttttccccctctcccatccccagggccttgggcatacattcactgaatattaaacttttatatttaattatattctttactacttacatccgtgtgtgaatattaaatatcctacagaagtggcaccaaagaaacagtttaaatgacatgctcaggtgcattcagcatattcagtggtattgcagacatgaatttttgttcttatagacactatactatgtytcttatacagtcttcccaatgacaccaaaaggaatttaacaccaggctctaggccatatctatccgtaccctgctgcttcaggaggtatgggacaaagagttctcactggagtcagcgtaagtggac

SEQ ID NO: 60507 - DNA, 652 bp, Homo sapiens
agagacagatcagagaccctgggttgattcaagaaagaacaacaattgcagagaaaccaagtaataaaaccacagttgctgagtcataggagtgggtttaagtacaaagaaattgatgctaagatgctcaagaggcaaattacagagggatgcccagtctgaatgctcagggcaaaaagttcccccatgggtttgcttcactattacattctgtctgttttgcagctgtgccatgccttagtaatgtggtcataatttttggtttgtttctgtcagctttagcccactaagcagtcttgggaagcaaccatgcataaaatcagctaaaagggggcaagtcaaactcatcagaagatacattctggattactaacctaaatattttttatccttactgtgtgtttcttaacaatgcaacagcatyaattttccccaccagtgtaaacattattaattgctgtaagttaagcaaagaaacaccattaattcctaaagtcaaaacagaggcagcaacaagcagtagagtcgccgccttccttaccaaagtcagagctaaggacgagagcgatgaaaggtgtggggtgcttctgtcaacagcttcctagctcccatcttttagcatctggggcccacttcatatttgccaacctat

SEQ ID NO: 60508 - DNA, 508 bp, Homo sapiens
ttagcctaagatacacttgaacatttcagatcatttttaactctaatttttttgtgtgaccaacaatttcagcaacagctaaacctagaggtgtatatactataaagagaaagcatcttcctaaattggctcatgtctgacacaagttttggtaccttttcatctttttcagtaaatgtcccaccgtttcctgatttcttgttgatggcctgggctacaccaacaacctggtataaggagagaaaagcgacaatttttttattgactgaaattacttgtaaaaattcaccaaaatgtatttatagaagatatcctgcatgtgctttaaaataacactagtctacaaaacaaaagcaaaacccctcatcagcatttgagcaagctttacatcatttaccacattctttcatcctaataagaattygaatgtttttaatttattagggcccaaactatgtttgatcctgtgatttcaccctgcattttgaatgaaattattttagcaatc

SEQ ID NO: 60509 - DNA, 1002 bp, Homo sapiens
agaattgattgttgagacagtaactctgctattaaggtgggcattgaaagaagagcaagctaccaagaggctacagcagtccaaagcgagggagagagcctcaggtgcaagtgctcatttttaatattcctaagatagaatggaaagggctgtatatgcacgagccaaagggagggctttttcctttattgctgaaggtcagaattcaacttctataattstggcacctcttaccccagagaagtcgtgtatgaaatgatagaacgtctatagtatactgataccattcttctacctcccaatcacacatgatataattcacattaaacagtcacatgttgtagaaaaacaatctgtactagaccatatacagattttataaggaggttgccaaaacaggctatataactcttaattcctccccgacactgaggtgttgagggaggcgtgagagtgtgttcccctctacctcaggtaagagagaggggtgtggagttcctgtgtatgtctcctatcatttagtgggtggaggtggggctagagtagacttgtgtctgactcttgtctggaaagtctaaaagcaaggcactcatatcagtaccagtctgttaagaatgttttgatgtttcttacctattctcccttcccattctccaagtatgaagaggtaagaaaccacatggaggttggggagagaggaaggagttagaagaaacacaaggtagggaatgggagaagcctaccagtgcagtaacagaaaacctgaaactttaaatcatgttcaaaatttggactgctacccaggagtacacatttttgtttctgagttgagaactctatactatatgttggaacctaaagtaactagagggcttttacttataaaatagtgaccagaaaagtgatgggaatccctgaatttttttccagggctcaggaaagaattagcccaactgagtaaacttagcaatattgtaaaattgctttaagattatatgtcat

SEQ ID NO: 60510 - DNA, 701 bp, Homo sapiens
agaacacgcagatgtatgaagcagtggagagagccatggccaagcaaatggtcacattggaggtgggtgaagtttagggacctctcacactgtacagccaaaccctcatcttttacctttccctcataatcactcatggtgtgtgtgtgttccgtcattgtgtcctcaccaaaattatgtgatttagatgatgagatccttattgtcctcaactaaagaatgaaagaaactaagactcagaatatttaagaaacttgtcaaatgtcatataaccaaaccacaactcargatgtttatccctttatgcctttgctttttctgcagaaagcaatattgactttaataatccattgacacagatgactactgccaattatctgtctctttcccattgcctgagcctccccatctttccgtgagaacagttgtggaaaaaaattaaaaataaacaaacaaacaaaaaacagaaaccctaggcactcttaagagaattagaagtgaggaaaagaaaaaataaaatcaacgaaaagcaggaagagttttaactcctggaatcatctgagaaactatttcaaactataaatttatataccctacttctgaaagttctgattcagcaagtcttgggtagaagctgggaatctgtatgactaccaagctcccccaggtgactctgaatgtgcaggtagcgagtgaagaaa

SEQ ID NO: 60511 - DNA, 1904 bp, Homo sapiens
gcagtatggtaacagttctaaatcataagatagtacaaatatgtatcatttggctttaaatttttaattacttaaaattttaaagactggttcaagaaatactggtttgggttgctgaattactttactcaccatttaaagtttgaaaatgagctaccttttcatcaatgctttttaagcttttggggttttttttgtaaatctgtgttgtctctctcaaaaatgaactttaaaaaaatatgctttcaaagcatgatagatactttaaatacaaccactaccttggtttaaaagaatgtttaaaaaaaatcccattgcagtttgggtaacccttacatgaaatgcttgagaccagaagtgttttgtattttgcattttttttcagatttttggaacatgtgcattatacttaatggttgagcagtccaaatccaaaaatctcaaactcaaaaatgtttcaaaatccaaaattctctgagcagcagcatgacactcaaaaggaaatgctcattagaggattttggatttcagatttttaggtttgggatgctcaacttgtaattagaaatgattgcttttgaaaatggaaattaagttaataagcctgattttttaactctaagtaatggaacgtgtataggttaggaattgaaagctgggtcctaaatctccttgtcctctcactaggtgtgagcttacagccaaatcatgtgactccctgaggctcagtgtccccaactgtcaatggatggctttacaggccagcactactctcttctcacctcttaaattgtaggagtgtaaagggatccttaaatctgcatgactgtgtcccaggcatccagtttttctgtgtgaattctagaatggttacaggcctcatctgagagccacttgtagactactttctttccaaatattaatatcaaaatgtcagattatgcagagattttctctttaattctgtacacaagcagaaatagctaaagtcaatattgtcttaaaaaaaaaaaacaaaataaattttctgccaaagtttgagccaaaagttatttctaggctggcttataaataatgtgtttgttatagcaataatgtcagactggaagttacaagagttttctttaaacatagggagtataactttttgttttccaaaacaagcaatggaatctaaatctgggtttttcactgttgaagaaaacagcraacaagatttggcattctgaggagtctaattatctctccaagaagacttagcagaattccaagcttgaagttctagtctacatgtggtagttctctcctgtgtaacctggacttcttttcctaccctgtaggttctgtcgtatcatgcttcagcagcagaggaagaaacaagagagctacagtcgttagcggtaattatcctctttctttttaaaaattactaattacagacacctaatttaaccaaatttggtaaatatttagatggatacttataaaaatgtttaattaactctgctttcttgcagggatgcaaagtcactgataatacaaagcaaaaggcattaaataacttatactgactgtgtaatatagtgtatgattctgatatttgttttccagtaattgttataatcattacatctttttggggccaaaattaaatttacttttcttttagttcctggagaaatggggaccatgaggtggttgtttggctagggtaataacaaaacaatttatagtttgttactgatacctactctgtattatcaagaattgagagtgattttaatttctgaccatatggcttataaaatgctgtttgaaattggggtcaaataaggtcagttcctgaattctctttgcattatttagcatacaatgagagaaaagcacatggatatgtaagtaga

SEQ ID NO: 60512 - DNA, 442 bp, Homo sapiens
gaagcccaaggcattcagagaacctgaacagataccctaaatttcttccattcatgctcttatccatccaccagcacagcttccactgcccaacacatgccaggtatgaygctaagcacttgtgtgtgcacatggaacatgcccctgaggtacaggcaaaggtggagccacccctcaacacagatgctaaatgggatgctgagagtgggaacaatattgacagagcagagaaaggaaaatactctacaaggggcactcatgcccaccaagtggggagtacctgggaaagagaactgttttcaatgtgaaaatcactactcattacatatatcatctcatgaattattattattccacttcacagatgagggaactgaggccaggagaagttgggaagcttgcctgaggtaactggccaagcacagcttgagcccgggcagcc

SEQ ID NO: 60513 - DNA, 730 bp, Homo sapiens
ccagggagagctgtgggattgatgggcacctttcagcctgggcttctgtctcaaaaccaactcagatagctggggttaggggtggaggggcagggaatggagaagaccatggtctgatatcatttcactaaacttayccagcagatggttttctgcctgatgaattcattccattttaatgtgtcccaggctacaaaccaggttttgctgctttagcaaaactcatcagttccctttcctattacctacctggggttccagaaggagaagagcccatctccagcacctcttaaggatctgatatccccccattactaaagtggacgtcccttcaatcaataaccattactctgttaagtatgaaggtttggaaaccctagccacccacagatgtggtggtcacacttggcagctgtggacgagcagtggttgggggctgagcgtagcaggggagaggcactctcacaccctagctctgtgggcttcaggttctcacgtttgctcacccacatctctaccagggacagcctgtgccaggaggggctgagaatcaacatgctgctgacgggccataagcagaaacttggttttccacacaagccatgtatttactattttctgagtcgctcaccaggatttttcttgtgtcttcccacttcggggtgaagatcatgtggttctcatgaggacagcactctgcagtgacatcctattttgttgctgctgttat

SEQ ID NO: 60514 - DNA, 730 bp, Homo sapiens
ccagggagagctgtgggattgatgggcacctttcagcctgggcttctgtctcaaaaccaactcagatagctggggttaggggtggaggggcagggaatggagaagaccatggtctgatatcatttcactaaacttatccagcagatggttttctgcctgatgaattcattccattttaatgtgtcccaggctacaaaccaggttttgctgctttagcaaaactcatcagttccctttcctattacctacctggggttccagaaggagaagagcccatctccagcacctcttaaggatctgatatccccccattactaaagtggacgtcccttcaatcaataaccattactctgttaagtatgaakgtttggaaaccctagccacccacagatgtggtggtcacacttggcagctgtggacgagcagtggttgggggctgagcgtagcaggggagaggcactctcacaccctagctctgtgggcttcaggttctcacgtttgctcacccacatctctaccagggacagcctgtgccaggaggggctgagaatcaacatgctgctgacgggccataagcagaaacttggttttccacacaagccatgtatttactattttctgagtcgctcaccaggatttttcttgtgtcttcccacttcggggtgaagatcatgtggttctcatgaggacagcactctgcagtgacatcctattttgttgctgctgttat

SEQ ID NO: 60515 - DNA, 683 bp, Homo sapiens
aggaaagagaaagccctgccacttggagccgaatctgtttcccttcaagaaatccaacccacaactgaactgtcctggctatgaaaaggaggtgagaatgttgggacacccacagtttcctctcctttttctcttcttctgccaccatctgcaaactgccatttaaggtgcatattctctaggttggctctttcatatactctgacccatttaatcttctcaacaaccctctgaattattgtcatcacttcatgggtgaggcaatgggggcagagagaagtaccttgcccaaaatcacaaagctattcagttgtagagtggagacctgaatccracagaccaaccctactgcacttatcactctgacaactttcaattcccatttctttagcatcagtctagattttatgactaatgctgaaatgtgcaaaggtaaggcctgttttcaaaaaggacaaattctacgctctgttacagggtttcatattctatatacccttacaacagtgactgatttcacggatttccaatgcttctagtgagctaataatgcaaatacatacttggttatattaactataggcaaatataggcaaagggtgcatggacgttcatcattctttcaagctttctgcaggtttagaaaattgtctcttgcatatgcatgtgtctatttggtttta

SEQ ID NO: 60516 - DNA, 683 bp, Homo sapiens
aggaaagagaaagccctgccacttggagccgaatctgtttcccttcaagaaatccaacccacaactgaactgtcctggctatgaaaaggaggtgagaatgttgggacacccacagtttcctctcctttttctcttcttctgccaccatctgcaaactgccatttaaggtgcatattctctaggttggctctttcatatactctgacccatttaatcttctcaacaaccctctgaattattgtcatcacttcatgggtgaggcaatgggggcagagagaagtaccttgcccaaaatcacaaagctattcagttgtagagtggagacctgaatccaayagaccaaccctactgcacttatcactctgacaactttcaattcccatttctttagcatcagtctagattttatgactaatgctgaaatgtgcaaaggtaaggcctgttttcaaaaaggacaaattctacgctctgttacagggtttcatattctatatacccttacaacagtgactgatttcacggatttccaatgcttctagtgagctaataatgcaaatacatacttggttatattaactataggcaaatataggcaaagggtgcatggacgttcatcattctttcaagctttctgcaggtttagaaaattgtctcttgcatatgcatgtgtctatttggtttta

SEQ ID NO: 60517 - DNA, 703 bp, Homo sapiens
tagatgctctgtgctgaggctggggttttaagccattccggagttccagactgtgttcactggccaagtccacatgtgtgagggcctggctggcaaagcatggctctgccctgtgcttctgcaaggccccagggtgtccttgacaacctgggcaacctcagtggttccattcgtttccatgatgccaaggtcatcatgatggaataagatttcttatccactcccacccctcgcactttttattgaaattcagtctatgaaagaaagaaaagggcacacatccaaacagttctgctcaatgaatttccacaaatcacacacacctgttggccaaatgtcatctggacacattagccatttcgtgttgtgtatttctttttcctcctttgccattttycatgttcagagagcaagaccaccctgtgattggtgctttaggggagagatgtaacagcagaagagggcagaagcctttgggcttttgtgtcataaaggtctactccaggggttgaaaacatgtttctgtgaagggccagatagtgaatatttttggttttgtgggccaaatagtctccaaccactcaactgctactgtggcacaaaagcagctagagataacatgtaaaagaacaggcatggctgtgtcccaataaaactttataaacacctggtggtaagccagatttggcccacgggccttact

SEQ ID NO: 60518 - DNA, 1226 bp, Homo sapiens
tttcaagctgaactgggcccccacaaaactctatgcagaagtcctaacctctagtgcctcagagtgcaacccgatttggaaacagggtcaacagggcacagacaaaattagttaaaatgaggctatactagagtaggttgagcccctaatccaatatgaagtgtccttatgaaaaggggacatctggagatacacacacacacacacacagagacaggcagagagacacacaaagaatgccaaacattgtcagcaagccaccagaagctgagagagaggcctggaacagattctccctcacagtgctcaggagaaaccaaccctgtcgacaccctgatttggacttccagcctccaggactgtacgacaataacttctggttgttgaagccrcctggttgggggtcctttgttatggcagccccaggaaactaaggaaccggacgacacaaggaccagatgctcctcgcggaacttacatgcagactaagggaaagcagggcagacatgaagtcatgaggaacaaaacacggactggaagggagtaaagaaatacaaattaggtgggttcgtagaagaataaagaaagctacctttcctacacacttgagtatagactctgattggtgaacatcatgtgattaacttcctgagtggttatcgagcttccttttacgcttcagtttcctcgcctttccagtagctgatttctccagttttacatctgcctaacccgcacacaacaattaccttcacctctgacagtgaggaggcggagaggagatatgatgtgatatgatgtaagagaactggatccagaagcaagtgggtctggaggcggagcacatgggataccacacgtgccttggcacacctccctccacatctgcttctgctgctgcttctccctgacaaattctccaacaggcagtctctgtgtggccccttatctagctcacaggccccgtaatccccacttcccacctcctaaccctctgtccatctttgaggccacctccaccctatttttccttcctacctggagcatctccacatcttgtttgggtatctgctatgctgcttaccactaaccttatgaaatggagggctgtcttcctcctgttcctcttatctggaaggatcttatctcccaaatatctgggttctgtgttctcagcagagagcattgcacaggagggtctccaataagcactagactgacgtgaa

SEQ ID NO: 60519 - DNA, 954 bp, Homo sapiens
tgcatctccacctccaagccccaccctttcactccttccaccacccaattctgttatttttctttgtgcttaacattttacctttggaagttcttatatctcagttttcacattttatctgttatattttactctttccccagctagaaaagataaagacattgatgtacatatagacagcctcccacagctcccaccccagtgcaccttcttcccagccggttcttctctctgtcatttctgccttgtctgggtttccgtcccatgaattctgttctctaactcccattcctacgttggtttcaatcaatactttgatcagtgctcactgctggcccattttctatgggttcttcagtcatttcttagttggccaagggtcgtcctgtggtaacttctccagaaaggatttaactacttgtaagttcaaaaatctttttccattgcctaagtacttgagcaarcgtttagttgatataaatttcctgggccacatgttctgcctttccttgtgtctgtatcagcatcactcactccagtgcctgtagagagaggctgctgcaaagacatctgcacagcccgagctcttttcccattatctgtgctggctacccaaagagtgttctggtgtatctctgaaacccagtgactttatcaggacacgcctctgggctcattattttgcgccattttttcttggggctttgctttgcaatctgagaataagaccttccatcatttcagttgagggtcttgaatttatattcaaatgccctttcttttacatcactttagttctcttctttatgagtcttgtgcttctaacccagctcagactctgtgaccttcacaaacattgacctcctctttggaaaagtggaaaaaatagagaaagccccctcctgcctgcctcccagggctgccatgaggctcaggatgacaggaacctgagca

SEQ ID NO: 60520 - DNA, 694 bp, Homo sapiens
caataccatctaagaagatgtagcacagagaaagatgtttagaagttaggaaagagactgattctaaataataggtaagagataattcagaccgcttggtacaaaagcaaaactaaaatcacccaatgtaagcagcccagcggaataaaacaaaagccaatggttaagagaaaaacagccaaaatgcctacactagtcatgggacctatagtatctacgataggaattttatgattcagtggtctagcctctttcaaatcgttttaattacaagatattatcccaccagagagagagagagagagagagtaaaaaggagtatctcttagtaaactaaatgtctttctactggtctgagaattcaaagcttcctccaaagatatggctccactactccatttttctggattaaagccattaaactggtgttcaaatttccctatcaaaaccacacaaactcaaaaaaatcataccttctcttttattggaagagaggccgatactaaacataaatttaagaaagaataaattatacaccaacttccatctaacgtccaccattgcaataaactgacttcttcactttgacttacaggcatgtttgtttttcttaggcatctttaagggacaggtagttggctcaaattcaactcagtcaygctgcttgccaaagaagaacagtctctagtgggtc

SEQ ID NO: 60521 - DNA, 802 bp, Homo sapiens
tattttacctattgtttctgctttgcttaacctatatattctcctaaaaatccacgtaaaagaagctttatatttttctctcagtgttaaggagaaggaatgattgtagtcatagcgaaagaaagtgttttttaagattctgagaaaattcctaaaccgtaggaatgcattcatcgaaaggaagacattgtgctattacccaagggattttacatgaatggaaaatacattgttcctgttctcaaggtttttgtgacctaaaggtaaattaagaaaagatgtgactatcactgaaactctgagctacattttcctgcagcctttcccctttgcacttttcyggactgagaagtattaaatgtgagtaataattatttttaaaagctcccctttaagggagcatcagcatttaaaaactatcaaaatatttcagtaaagaagggggaatgaagagttttgactatgcctattttttttggcagaggggaaagagctggttgcttaaaacatgtgggagggtaagttcactctgagtcatggagagttaatgtttgttttgatgtcaagttcctgtgcccacatcctctgaattggaaacattatcctcaccccaggattgagtcttgattacccattgtcaatattcctcccaaagggattatttcctccatctacatagatattatttaattgcttattagctcctttcagggagagcaaactaaatatttaagggctaataaattttatgtgtgtttattagtaaggtatttagatattgcctctttcatagaaaaactaa

SEQ ID NO: 60522 - DNA, 802 bp, Homo sapiens
tattttacctattgtttctgctttgcttaacctatatattctcctaaaaatccacgtaaaagaagctttatatttttctctcagtgttaaggagaaggaatgattgtagtcatagcgaaagaaagtgttttttaagattctgagaaaattcctaaaccgtaggaatgcattcatcgaaaggaagacattgtgctattacccaagggattttacatgaatggaaaatacattgttcctgttctcaaggtttttgtgacctaaaggtaaattaagaaaagatgtgactatcactgaaactctgagctacattttcctgcagcctttcccctttgcacttttctggactgagaagtattaaatgtgagtaataattatttttaaaagctcccctttaagggagcatcagcatttaaaaactatcaaaatatttcagtaaagaagggggaatgaagagttttgactatgcctattttttttggcagaggggaaagagctggttgcttaaaacaygtgggagggtaagttcactctgagtcatggagagttaatgtttgttttgatgtcaagttcctgtgcccacatcctctgaattggaaacattatcctcaccccaggattgagtcttgattacccattgtcaatattcctcccaaagggattatttcctccatctacatagatattatttaattgcttattagctcctttcagggagagcaaactaaatatttaagggctaataaattttatgtgtgtttattagtaaggtatttagatattgcctctttcatagaaaaactaa

SEQ ID NO: 60523 - DNA, 2001 bp, Homo sapiens
ttaatttcaaaatattctcaaagacatttaacagctgaaaagacaaagacagagtagttcactttattactacaaggtttggctagttggatttccattgcatatgttgaaatattattacctttatgtaaataaatttactatatattgcaggtgtttatttttacaattgaaagtctgaaacacttaaaaaaataggttttagaggaacatcatttgtaagagaataagtgaaaataactttttgatacagaaacacttatgtgttgagactcactgataattccaagctctcacagcctgtcatctctcttgcttaaactctgaatgctataacaggaggtaaccagattattttccctgtcatttttgtgagattaaagagatatgtcatttaggtaaatgccagtagttgtccattcatttcaaataatgaaattgatatggtttgcctgtgtccccacccaaatatcattttgaattgtaataatccccacgtgtccagggatggactctgtgggaggtaactgaataatgggagtggatttttcgtgtgctgttctccttatagtgagtaagtctcaggagatctgatggttttataaagcggagttctcctgcatatgctctcttgcctgtcaccatgtagaagtccctttgctcttctttcgtcttctgccgtgattgtgaggcctccccagccacgtrgaaccgtgagtccattaaacctcttttctttgtaaatgacccagtcttgggtatgtctttttatcagcagcatgagaatggactaaaacagaaatcatacacacacacacacacacacacacacacacacacatttgtcttcatggggctaaacacatagaaccattgctaatactagttaaaataaactacttttgaaatgtagaagcaaactacttttctttcagcattccgaatatgtcattccactgtcttctggactccatttttcttgacaagaacttaaccattaatcatattgtcaggttcctattcatgattacttgtttttctcttcttttcaagattttcttttataatttgactttgactagttaaattctgattttgcctagctgttattctctgtttttatcctaacagaagttcattgaacttcttgaatgtgtaaattaatgtattcttatcagttttgagaatatttcaggcgttagttttcgaattatttttctgctctcttctctctcccatccttctcctatttccatcccatgcataggcacattttgtgtgtttacacaggtctctgaagctctgttaatttgtcctcatctttatttctagtttcttcagattagataagtcctactgctctgtcttcaggttcactggatttttttttcctggcatcccaaatgaaccatgtagcccctcgagaaattttacttttaccctcaaatttgtttttcattccagaattttcatttggtcctttttaataatttatatcccttttttgatattctctaattgttgattctgttgacactacacttcccatgttatctttatttcattaacattactttagttctttgaatatatttataaaactactttgaagtacttatttctgataaattcatcatctaggccaacccagtgaaaattactattaactgcttctattttgcataaagtcacacttttatgtttcttagtccaccttataatatttgttgaaaaatatataatgagggagtattatgtagtaactattgattctgattcttttcccctcagagttattattatttgcttaataacttccctgaaataagcccgtagaatatgcctctgtcactgtaggtattatttcaagtcccttttctgtttgttttgtatttattttttgtttatttacttatttttatatttgagcctgatttgctaggggacacctttgtgtgatacatctcaatggtcagcttaaattggacggactttgtggtt

SEQ ID NO: 60524 - DNA, 534 bp, Homo sapiens
gattatttggatattgataggcaactttttttgctagagctaaaaataaaatttggaaattctggaactgaagataattaaaawtatgtaataatatatagcagagatatgaacattttccttcaaagaaatgtattttgtgatgaaaatagattgattataacaaaaatggttgcacatattaaaaactaacaaaaaggaataattgaaaagaaacatacatatgattggtaaaacaaaacagagttgtatagtatagtctttgaaacaaaactaatgcctatttcaaatggaaagctattgaattttcttataaatctgataaattacatgaattatttattgtttgatgacaaaataatacaatataattttaatttactaaatttatgaaaccttgatagttttctagacagtgtttagaaatctctgtgtattagcagtaagcaacaataaaattatctaaagatgatcttctgaaataaattttttgactgttatagattaactgaatattctattgaaaaatctcaa

SEQ ID NO: 60525 - DNA, 676 bp, Homo sapiens
ccaacctcccaaaacctttgagactctctctttctcctttattttcagcagacacagcagtggcagtgtcacagaggagagggtcacctaatattctgattggttcttggtgttttattggaactgtgtcttagaggtttggtcttcagaagtgtttctgtttcttgtccccaagagaaccttctcaccttctgttctctagtctcttaaccactgcagtctatttatttgaagctctctcctccgctaacaatgcttttattcatttatttctcattagctgatgcagaaaakctggattggaatgcagttctcttttctcaggtgtaaaaattgcctaactgctaatgtcattacctatggaaacaaggccttctttagggagaagagtcatgataggaatgcttttcctccccccatgagggtgatgtattgagatttctagggtttctagaattctctctgccataacctggtggagctcctagagggaaagtctgcagggtgtccaaccaccaatacttcagcgctagggtattctcatgttcacttccatacactcatcctccagcaattcatcaagattatcatatatgatattctaccagctttaagcgtctagtggcttctgtcctaggtaatcaaatcttgagtacactatctctctctagatgca

SEQ ID NO: 60526 - DNA, 1289 bp, Homo sapiens
tgagctacattttactaagacaaccttaatttttataatgtaaatttttataatgctataacatactgtctggaagtaggaattggttgattgggggaggggagagccaatgtaaatcagagaagcaataattactaggtcaagaaatagggcaattaaaaaaataattcatggcaagtaggagtgagatatttacattctgaaattaattatggtactttttatttaaattaaaatcaggaagaaaagttcaggaaaaagaggttcagggaaattttatatatattcatctcaactacaaattagtaaagatcttatattcaacaaatgtgtcagagtccattaaagacattagaaaaccctatttcattgtaactaaactgcttgacattttaacctccaaacttttttataatcaaatgtagagattgtgtctgtcttgataagtctacatatagtatccatgctgcaagaataccaaaaaaaaaaaaaaatggatccttagttttacaggattgacaaagatgtctgttggccaaatcaagtgtaagagttcctgtaaagtcctcagatcaacaaatttttaaaaagaaaatcttttatgttcacttagayagcaaccagctcgaacggacaatccatttcttgtgtagtgcatccttagaagctggcttttaactctgaaggtctatggtcttggtctttggccttctagggtactgataattactgctcctactgcacctcccgtttagtccttcgctttctattctttggttcactcttccttccttgtcacttccccattaaacttttctgtcctgggccctattatctcaacttgctctcagccccaaacttccttattactcactctgataagaccagcttggttcataagtgctggtgtaaagagggccctggcctgtcctgtctcattagcaactagggtatttagcatgctttcagtgtgtttttggtgatcacataactcacaggaagaagctaatatatggtaattttagatccactgataggtgagtggaagagatcattggcctttcaatttgcaagtctgatctttcctcagcttatattagaaatctcatttgaattttggaatggtgatataaaagacgaggttttagatttgaggacttaattgctgagaacatgtttgctggaaccagataaaacttcttccagtggatggtaagcctgtcttggggtagcaaacttaaggaatgaagtaaattccattatcagatattcaatttcaatatttaaaa

SEQ ID NO: 60527 - DNA, 1477 bp, Homo sapiens
tgaagttgcttccctattgccggacaactgcacctgtgacaggtggctggtctttctggggcaacctgggaaagattctgggactcgggggccacttgtaaccataaccaagagctgtctgaaggcaaatctacaagtcaaggtgcagtgaagtctccaagtaagaaacctgtcaccctctgaagtgtgtaggcttatctactgatgatgagctatcaaacaaggagagaatacatcagcgcagctcccgaggccttctgagaatttcacgggacagaactgggccaaaaggaagaagactgtttgcggcaggagggtagcagaggagcaagtggtaaacagaagacagatagaaggcagtattcttcagacccccayacatcactgaatgacagccctgatgaggaaactcaggcaagtagagtcttttattggagaagaagggtctttgcgagcaggtgaggacttgccttctgaactgtgcggcagggtgagcatcccaggtgtgctggctgggggcttgcatccagcacccccagcaaaaaaagccagggtgagctgggagaaagacgggtagtggggagggtttacggctgctttagaagagatagttatcactgaattaccatatttcaaattttgacatgggaatgtcttaagatcattattagataaaattaaactgactttattaaacagagtcacttcaggcctttttcttatgaacagagtgatccttagtcgggtaacatgtcaatgacagtgcactctgtgcctctcctgcattgtggggagggcacttcttaaggcaaagtaaaattcaggacctgcatgaaatcagttttgcttccatttgagttcgatttatgctattaatagttctgatcaccaaatttataacatttaaagtactgtctgttacccgatgtctggtatgtttacataaaacgtggttctgcccagtaacagcataaggtaaaaatgtgatttcccctaaaattataacatcatgtcatcctagagtgttacccacctgggagaggtacaaaaaacaaagcattagatttcaggctaagaacagccagttttaggagtaagaattacatcgaatagccttaagagcatttaaaaagtcaaggcatcttaaacttcagaaatgaaaacaaaaccaaaacaaaacaacaacaaaaacaacctaacccaaccacaaaactctaggagccaaggcactcagtatctgcctgttggttatgtacaaagccacaaatgggaggtcttttcaaattaatctggaaaatccaagcacaagactcttagcttgaaaagcctgacaactctgcctccaaatccaggcaactgtgcttccactcctcttcttgcttgccttaggaaaacttcactttagtaagataaggcaaaacagaaaataaaagagtcgtttaaccaaactccaaaaacaaacaaaaatagaaaataa

SEQ ID NO: 60528 - DNA, 1178 bp, Homo sapiens
atcaacctctttctccctttctccctgccacccttctcagctcctggtaaccaccaatttactctccatcttcatgagatccaccttttcagctctcagatataattgagaacatgggttatttgtctttctgtgcctggcttatttcacttaacataatgacctccagttccattcatgttgctgtgaatgataggctttcgttcttttctttcygcccacctccttcttacaacctcgttcgttgtaatactgggcccacctgggtaatctggattcaccatctcatttcaagatccttaatttaatcacctttgccaagtcccttttgccatttgaggtagcatattcacaggtacaatggattaagctgtgggcatctttggtggggctggggttgggggtgttattctgtctaccccaagtgttatccattcaaggaagatttgttaacagaagacctagtcaggattcacatacgcatctgtccatgctaaaccagtatctaaaaccaacgtactagagtttcctgtaagtgatcaaagtgacaaacacagtgtttagtactctgggacccacccattaccagtctacattccagaccataggtcctggtttgagtttggaaaccttagtctttggatccaagttgtattttcatgtcaagcttatcagaaggtccaggtgtaacttgcaatctcagtagaccctgaggtccccacagggacacatgaggttcaacgcagatcctggcagggtgaaggtgttcttgggtagccagcagggctctttgcagagttttacgcaggaaaccagaagctaaacttatgtctttgatcctttggatccttagagccttgaagacaactttgtatagacaaagctaaaaccagaattgtgaccgaattacaaccgggagctgtgtgtggcagttgaaatgctgaatagtcttttttttttttttttgtctttttagtagagatggggtttctccgtgttagccaggatggtcttgatctcctgaccttgtgatctgcctgccttggcctcccaaagtgctggaattacagacgtgagccatcacgcctggccgaaatgctgaataatcttaaatgttgaatgtctgaagatgttgaaccaagatcgatttgcttttcagttcctgggaagcctggatt

SEQ ID NO: 60529 - DNA, 635 bp, Homo sapiens
tccaggccctgtgttgtcagtttactcatgctcaaaatgaattgcttcatrtatatcatgaagtattacagctgcttactgtagaagggtaaatataatacctttagttggtaatagccagtctacagttttctgaggctctcataaataatgtaaatcctttgtttcacttttagcagtttgtcccagacctatcaccccaatttagtgcaagaaaattctactttttattgtactctagccattcatatctaacttacttttattttaaaataacaaacttaaaatcaaaaagatttataggatctacacttaaaatttctttggggaattatcttcccaagaaagaagccacatgaaataaatgcaagacatagattcctgccattgtctttagttttatcattttaaatactgtaactccaccaggatttgagactccccactgaaaaatgtactaagttaaaattaatgcatttatttactggggagctgtgaattttgttcagctataatccctatggtcattacatctcaaggtgccctcttttgcctcattcacattctgaaacctctcctgttccatagagacagagttcagctcagccctctgcagttggtgttcaacagcaaac

SEQ ID NO: 60530 - DNA, 635 bp, Homo sapiens
tccaggccctgtgttgtcagtttactcatgctcaaaatgaattgcttcatgtatatcatgaagtattacagctgcttactgtagaagggtaaatataatacctttagttggtaatagccagtctacagttttctgaggctctyataaataatgtaaatcctttgtttcacttttagcagtttgtcccagacctatcaccccaatttagtgcaagaaaattctactttttattgtactctagccattcatatctaacttacttttattttaaaataacaaacttaaaatcaaaaagatttataggatctacacttaaaatttctttggggaattatcttcccaagaaagaagccacatgaaataaatgcaagacatagattcctgccattgtctttagttttatcattttaaatactgtaactccaccaggatttgagactccccactgaaaaatgtactaagttaaaattaatgcatttatttactggggagctgtgaattttgttcagctataatccctatggtcattacatctcaaggtgccctcttttgcctcattcacattctgaaacctctcctgttccatagagacagagttcagctcagccctctgcagttggtgttcaacagcaaac

SEQ ID NO: 60531 - DNA, 869 bp, Homo sapiens
gaataggtggattgcctactaacatggaagattaaatgacaaggttagaaacaaaaaccaagcactattgtctcctaatgcaggtaatgtgtcttcagttcaccagaggaaagagacgratgtatcaaggtatagaaagcttgaattccttctctaaatttcacatactgagaaatcttatcagttataaaatctaccggataaaaatcatctggtaaatggataatatatttaaaaaggaaaaaaaacttgagaaattagaagtcactgaagagaacaattacatttcacttttaagacatctattagaaaataaaatataagccaaaaattgataaagaaaaattacttcaatttcagctagaacccagactacattcttttataagctttgagactatcacatttaaagataaagttatattctttgaaatggaaacttgaggaattgtgaatgcaattggccctctgagtttaagacattcatgtcttgaattttaattccaattttacagcttgcaagctaatgccataatggacatgttttcctctctatttagaagggaggaggaaagggaaaactacatatggcatcactggaaacaagccaagtggcagggtgctggggaaggaattggcagccacaccatctgagagatcaaactggcgacaacttttgttgcatttcaaaaataagatgtggcatagtatgacaagtacaaactttttaacaaaagcagtgaaaatcatttcactccctcccttttttttgcaattatcattctagctttctaaatgttcccatttgatttcagctacattgctattttggtataaatgtcaagaaagtcttaaagactatatttttc

SEQ ID NO: 60532 - DNA, 869 bp, Homo sapiens
gaataggtggattgcctactaacatggaagattaaatgacaaggttagaaacaaaaaccaagcactattgtctcctaatgcaggtaatgtgtcttcagttcaccagaggaaagagacggatgtatcaaggtatagaaagcttgaattccttctctaaatttcacatactgagaaatcttawcagttataaaatctaccggataaaaatcatctggtaaatggataatatatttaaaaaggaaaaaaaacttgagaaattagaagtcactgaagagaacaattacatttcacttttaagacatctattagaaaataaaatataagccaaaaattgataaagaaaaattacttcaatttcagctagaacccagactacattcttttataagctttgagactatcacatttaaagataaagttatattctttgaaatggaaacttgaggaattgtgaatgcaattggccctctgagtttaagacattcatgtcttgaattttaattccaattttacagcttgcaagctaatgccataatggacatgttttcctctctatttagaagggaggaggaaagggaaaactacatatggcatcactggaaacaagccaagtggcagggtgctggggaaggaattggcagccacaccatctgagagatcaaactggcgacaacttttgttgcatttcaaaaataagatgtggcatagtatgacaagtacaaactttttaacaaaagcagtgaaaatcatttcactccctcccttttttttgcaattatcattctagctttctaaatgttcccatttgatttcagctacattgctattttggtataaatgtcaagaaagtcttaaagactatatttttc

SEQ ID NO: 60533 - DNA, 869 bp, Homo sapiens
gaataggtggattgcctactaacatggaagattaaatgacaaggttagaaacaaaaaccaagcactattgtctcctaatgcaggtaatgtgtcttcagttcaccagaggaaagagacggatgtatcaaggtatagaaagcttgaattccttctctaaatttcacatactgagaaatcttatcagttataaaatctaccggataaaaatcatctggtaaatggataatatatttaaaaaggaaaaaaaacttgagaaattagaagtcactgaagagaacaattacatttcacttttaagacatctattagaaaataaaatataagccaaaaattgrtaaagaaaaattacttcaatttcagctagaacccagactacattcttttataagctttgagactatcacatttaaagataaagttatattctttgaaatggaaacttgaggaattgtgaatgcaattggccctctgagtttaagacattcatgtcttgaattttaattccaattttacagcttgcaagctaatgccataatggacatgttttcctctctatttagaagggaggaggaaagggaaaactacatatggcatcactggaaacaagccaagtggcagggtgctggggaaggaattggcagccacaccatctgagagatcaaactggcgacaacttttgttgcatttcaaaaataagatgtggcatagtatgacaagtacaaactttttaacaaaagcagtgaaaatcatttcactccctcccttttttttgcaattatcattctagctttctaaatgttcccatttgatttcagctacattgctattttggtataaatgtcaagaaagtcttaaagactatatttttc

SEQ ID NO: 60534 - DNA, 1196 bp, Homo sapiens
tgcatagactcattttaacatcttttttttttttttgagacrgagtctcgctctgttgcccaggctggagtgcagtggctcgatcatggctcactgcaagttctgcctcctgggttcatgccattttcctttctcagcctccctagtagctgggactacaggcacccgccaccacgcctggctaattatttgtatttttggtagagacggggtttcaccatgttagccagggtggtctcgatctcctgacctcgtgatctgcccgcctcggcttcccaaagtgctgggattacaggcgtgagccaccatgcccagcccattttaacatcttgaaactggaataccacaatattaagtttaaaaaatgggacacagaatatatatgaacccatttatgtaaatatacacacatattgacctgtgtataatatgagtatatatttattgatgtacttttaagagtctttaaccctatcttggtgccccttagggatcatacaatgaactatatatacccctttcagcgtataccagagaaatagttgttgcaaaagggattgtgaaaataaacaggaacattcactttgagtacgtggtttgaatatttcataaaatgtatataatcagaaaaaatcaatgaagccattttcattttggtgggaaatacttaaaggtggaaatttagtaggagattatggccctcgtttttaaaatgttaaacaactggatttttttaatgatacaggaagcattagcctctgtgttcttttacgatcagagccatgcaagttgtacatttatagcagtataggaacaatatcaaatttaagaatgttgctaagtagatctgcagaagttttgctctcaaatctctcagtaatccaaaatctaagttgacatctttggttagcttgtcttcctacaagtttttggattagggttccctagcttctttctctctggaaagatcaaaaattaacaggacaatactcaggggtgagaaagtgacatggattcttacctgactctaatttacaaacttgtgtcttacaggcttatttgcagctgggtatcaatgaaaagttaggactctctggaaggccagacaggcccattggctgcctcgggacatcaaaggtactcatgaaatgtcctcaaaaagtagtttttggattctaataccgcatactgaaatg

SEQ ID NO: 60535 - DNA, 961 bp, Homo sapiens
  misc_feature (1)...(961): n = A,T,C or G
annnnnnnnnnnnnnnnnnnnnnnnnnnnnnnnnnnnnnnnnnnnnnnnnnnnnnnnnnnnnnnnnnnnnnnnnnnnnnnnnnnnnnnnnnnnnnnnnnnngactaggctcagaaatcaagcaaactgtccatatttcatttttagaaattacatattaaagatctaaaacaaaggataaaatatatgcaaaaatatttgtatttctggataaattagtttcctgagttaactccttgactgttgacattgaatctattttaaattaaacaaggtgctgataaaacaaaagacaaagaaagaaattcaaaataaaattgaaagatgaaatyagagcttaccagagataaaatttcctctgacaatgtaaaagagatcttcatacaaaaagcagaatttatatagtctctttccaaaagaccataaaaccaatcagttaatagttgatttttatgtgaaaaaagagactgtaaaagaaaaaataatgacaccaaaatcccttttaaattcaaagagtcataaagtttcaaaaatgtaattcagataagaaattaatgtcagctacattcctccacagtaaaggtttgcatcaacttttcaactaatagttttagcattcattagaaaacttgtttcaaccattattttactaggtgttataacagggtactacattctttcatttttttcttcatttattagctggaataatttctaaaagaacatttcctctcaaatgtttattgattacaccaaaacacagtttggacaggaaaagcaagagaaatagacaaaagcttgatttttattcccctccccacttttcacagtaatgaattagtgcttcaacaaactttaatagtgattaaaaacttatttcccataataaaaatttgaagtatttgtaagtaaatgataaataataatttatccagtatttcatgagtacctataatcagcca

SEQ ID NO: 60536 - DNA, 540 bp, Homo sapiens
tgtatgtatggaggaaaaaacccacacattcggtcacagaagtcttctgtgttgctgattgatctttgtggtgtgaggctagaggaaaaacataragagttttctccacacagcaactatataatctgtgggaatatctctttttacacctagccctacctctatctggctacagtcatttatctggccttgggaaatgtgaccacagaatcagatatacacatgagattaaataatacatgtgtatgtcatttaaatatctagaaaagttatgacttcaccaggtatgaagaatataaaaagaactttgtcaagaatcatacagtaaatatatttttgaatttaatctagtacctaaacaatcagagtagggaggttagatattaaaatcaagctaaagatgtaggcaacacggatctagaaaacatggattgcatggccatttcacttagagttcatgggcttggaaactctattaacataaattttacaacgttagaatttgttcccatattaatgagggaaaaataaacaattacc

SEQ ID NO: 60537 - DNA, 858 bp, Homo sapiens
atttttttcagtttctactatatactaactaatggattagctctgcagtagtaagttgaagaatgggaagcagaaatagagtagaaaagataaatgacatttattaagtccatgctgtggactaggtgtgtgatggactttctgtacatatttatttatacaagaatcttacaaattaaaaattatcctcacttaatatataagaaaattgagactcagacaagtaaaataactcattcaaggttacataagtgggttttcaatccttattcgtctagttccagtgcccatgacctggctctctggaagggaaacaaactgaggaagagaaaaagtaaaataagcagtgaaggcagaaattgctaaactctgtagtgctatcaggggcacatgggcatcttcctggaactagcactacaagagtgtagacctctccctacatcaacaccatttctttgtagtgagctatagagaaacttagaaggcaagacctcaactgcctaagtggacataaatgtaaaatttttaggtcttgtgcaggtcctgactcagagtgaagaacctgaagcccttgctgcctcaggtgaggaacctaaatggatgtcaaayaaactcagtaatcaatgtaaacggtaatgtaatattttattaaatcaaaattaatgcaggaaatccatgatgaacaatatattaacattttaaataaagacaaaatcaatattactgaggttttcttttgcttcatgcttccatgtggcttggcaatagtgctgtgttgttactgatcctatcagaccactgagcatctgctagagatgataacaatagagtcaaagggtgagtcaaagagtgcatgca

SEQ ID NO: 60538 - DNA, 565 bp, Homo sapiens
tcaatgacaaggaaaatcaaagaacacctgggaaccaggagggggcctgtgcctgagtccaagccacattttgaaatgyctgccagaggattaaagaggtttctgaaaaattcacaccacctccaaccctccacggcccaggtagccctgacccaacctcccctgcaaccagccccagccccagccccagcccagtccctttggttcctttccccgacattcgttacggtcaaaagatccagggagtcagtccacccaggagcagaggagagatgtctctcacgaatgagacatgaagtgcagaggaaatgtgacaccacctgtcctagaagacaaggactgtcacggtcgcctagtgctcattccaggcaatccacccacccatgaggtgaaatacggagaggaaggaagcttccctgtctgagacaagtatggaagccaagagctccagggtcgtcaatactgccctatcaagcagaaacaggttgaaagagagaaacaatcacgacagggatctccaggaagtgtctccttgacggactgggacatgatcattgttgaagat

SEQ ID NO: 60539 - DNA, 565 bp, Homo sapiens
tcaatgacaaggaaaatcaaagaacacctgggaaccaggagggggcctgtgcctgagtccaagccacattttgaaatgcctgccagaggattaaagaggtttctgaaaaattcacaccacctccaaccctccacggcccaggtagccctgacccaacctcccctgcaaccagccccagccccagccccagcccagtccctttggttcctttccccgacattcgttacggtcaaaagatccagggagtcagtccacccaggagcagaggagagatgtctctcacgaatgagacatgaagtgcagaggaaatgtgacaccacctgtcctagaagacaaggactgtcacggtcgcctagtgctcattccaggcaatccacccacccatgaggtgaaayacggagaggaaggaagcttccctgtctgagacaagtatggaagccaagagctccagggtcgtcaatactgccctatcaagcagaaacaggttgaaagagagaaacaatcacgacagggatctccaggaagtgtctccttgacggactgggacatgatcattgttgaagat

SEQ ID NO: 60540 - DNA, 668 bp, Homo sapiens
aggtccccataataaatcacgttgttaactcccagataggcaggagattccaaggacttagaggttatttcctgrgagctaagatagagtcaaacctttctttggagtatgccaggtttgagcaattcaggcctatgaagtttccttgactgcacacaagtgatagtatataggaaataagtagtagcatattgctggtgaaagtagagtgttatatacccctttggaaagaaatcaagtgtgtatcacataaacattatatttggtttgtttttgtttttgtctgagacagggtctcactctatcacccacactggggtgcagtggcatgatcacaactcactgcagcctcgacctcccaggctccagctatcctcccacctcagtctcctgagtagctgggaccacaggcacctgcaagtacacccagctaatttttgtgttttttgtgcagatagggtttcaccatgttgcccaggctgatttcaaactcccgggttcaaacaatcccctacctcagctccccaaagtgctaggattacaggagtgagccactgcacccaacctatatttgtatatacattaaattgtatatgttaggccgggcatggtggctcatgcctgtaattccagcattttgggaggccaaggtgggcagatcacttgag

SEQ ID NO: 60541 - DNA, 1081 bp, Homo sapiens
ggatccctcgaacctaatagtttaagaccagcctgggcaacacagtgtgaccctgtctctattaaacattcaaaaactagccaggtaaaattagcatgcctgtaatctcagctactcaggaggctgaggtgggagaatcacttaagcccaggaggttgaggctgtagtgaatcatgatcccaccactgcatacagaagccaaataaagtgattccctttatttttgagactctgtatcaaaaaacacacacacaaaacaacacattattggcttttggtccttcattcaaaattcaagaggtactggggtggggagcagaatatctatattttcatacagacctcctgcagttttaaaatgttatcccccggataggtacagtttacatttaaacaaattatcaattatatcctattccctaacatgatgtcaaccatcttcagctcttgttacagaaacaaataagcaaaagatattttccagaaattcgacaacaacaaataaatgtttattgaaaacttataatrtgccaagcagggctctaagaaccagtgatacaacagtgaacaagacaatgagatacctgttctcacagagcttacatgtaagagcatcagtatctcaaagtacaatagatcagaagcataaaagctaagtaagcaaaatttattaccatttagggaaaaaaaattaatctcataggaacagtaaatttttaaacctttttaatctgtgaaaatatctgtttttctgtaacagttgacccttaaacaacatgagttggaactgcatagatctacttatatgtggattttttttttcaataaaatatacaccgagtatgcctctcttgcctccccttccatctcttttacctcttccctctctgccacccctgatacaaagaccaatctctcctcctcctcagctactcaacatgaagataacgaggatgaagacctttatgagatctacctccacttaatgaatagtaaatatattttctctcccttatgattttcctaatattttcttttctctagcttactttactgtaagaatacagtatataagatatat

SEQ ID NO: 60542 - DNA, 850 bp, Homo sapiens
taaaactattattttatagcctcttcacattaaaataatgtcttcataaattactaaacagccaatcccttccttttgacaggtgaaggaacaaggtattggagagttacaatgatgattaagggaatctctttatttggcttctgtataaaatttgattttcccttccccactaaaaaaattggatcaaccaaacaaaataaaacaaaaccggccaggcactgcttgtaatcccagcactttggaaagccaaggtgggaggattgcttgagcccaggagttcaagaccaggctgggcaacatcgttaagacttcatctgtactaaaatgcaacaaagttagccagctgtgatggcacaggtctgtagtcccagctactcgggaggctgaggtgggaggactgcttcagcctgggaggtcaaggctgcagtgagccatgatcgcmccactgcactccagcctgggtaagcaagacctcatctttaaaaaaaaaaaaaaaaaaaaaaaaccaacacaacttctttttagcaagtgtcagaaaatgctcatcctcttcatatagcctggcattttttaaaccacattttttaaaagataaaataatttattaaatgggaaacaagactttttcttcaattctcatatggtggagctgtgatgaatcacaagaatctgtatttggttctaatgtgactggatccatcaacaggcatttggtaatcctcactatgacatatcatcaaggcaatgcagcacacaggtatccctctcttaaaggtccaagtgtatctcagttggtggtcttaagttgaggtttggcaaacggctggcaatatttattttaatgtca

SEQ ID NO: 60543 - DNA, 850 bp, Homo sapiens
taaaactattattttatagcctcttcacattaaaataatgtcttcataaattactaaacagccaatcccttccttttgacaggtgaaggaacaaggtattggagagttacaatgatgattaagggaatctctttatttggcttctgtataaaatttgattttcccttccccactaaaaaaattggatcaaccaaacaaaataaaacaaaaccggccaggcactgcttgtaatcccagcactttggaaagccaaggtgggaggattgcttgagcccaggagttcaagaccaggctgggcaacatcgttaagacttcatctgtactaaaatgcaacaaagttagccagctgtgatggcacaggtctgtagtcccagctactcgggaggctgaggtgggaggactgcttcagcctgggaggtcaaggctgcagtgagccatgatcgcaccmctgcactccagcctgggtaagcaagacctcatctttaaaaaaaaaaaaaaaaaaaaaaaaccaacacaacttctttttagcaagtgtcagaaaatgctcatcctcttcatatagcctggcattttttaaaccacattttttaaaagataaaataatttattaaatgggaaacaagactttttcttcaattctcatatggtggagctgtgatgaatcacaagaatctgtatttggttctaatgtgactggatccatcaacaggcatttggtaatcctcactatgacatatcatcaaggcaatgcagcacacaggtatccctctcttaaaggtccaagtgtatctcagttggtggtcttaagttgaggtttggcaaacggctggcaatatttattttaatgtca

SEQ ID NO: 60544 - DNA, 1131 bp, Homo sapiens
agcagggtgtccactgcatttctgatccagggaggtgcccattgctgctcccattcaggctagaggctcaccttttttcctgtgtggccaagtacccgggttcatcctaatcragctgaacattagtcgctgggttccatggttcttttccatgacccacgccttctaatagagctataacactcacggcatggcccaaggttccattctttggaatctgtgaggccaagagcctcaggtcagagaacgaaaggcttgctgccatcttgggagccgccgccaccatcctgggagctctatgtgagctctaagaacaaagacctaccggtaacactaccttggcctcctggcagaacttgtttttgtaagacttatgctgtcactttcataaatactgggtagaatttactgccaaagaatgaattctgcaattcttgaatgtaaatattttaactcaagtggtccccaacctttctggcaccaaggacttgttttgtgaaagacaaaatattttccatggacaggtttggtggatggtttcaggatgaaactattctccctccgattatcaagcattaattagattctcataaggagtgcgcaacctgggttcctcacatacgcagtttataatggggtttgcactcctatgagaatctaatgccactgccacccatctgacaggatgtggagctcaggtgctaatgctcctttgctggccgctcatctcctgctttgttatccagatcacaaacaagtacctgtctgcagcccgggggagttggggacccctgttttaactaatgaattgaattgtttaaactaaatttagtaatgcccagattttctattttttatgggttagttttgatgtcctgtttcttaaaaagttgcccagtttgtcaaatattgttcttagtattctttccttatttttaaatatctgcatgacttatagtaatctcttgtttttttattttttctctggataatttatattttctaaatgtttttcttgatcttatattagtattattatttaaaattaatagatattattttatgtatttatggtatacaacatgatcttttgaagtttatgtgcattttgaaatgactgaatctagctca

SEQ ID NO: 60545 - DNA, 937 bp, Homo sapiens
ttgcttttcttgaataagttctgcatgaatctgtccaggtaacaaaagagataaagatagctatgaatacaataatataaatgtagttgtcctttaaactctgaactttgtccagctctaagagactgaggactttttataattttcacgctgattctgggtctagaaagtgcaggccaaactaggctgtggattaatacagtaggaagcagaacagtactcctcggataaaagaatggggtccagacacaaagatgtgaattttacctgagggctttactgatggactaatgagcagggattgtaacttaagaaacctttacagatattgaccttttttcttttatattgctgcattataagccatatcaaaatttaaacacctaaaacagctatctgattatctcttatttttccatgaaatgattgggctcagtttttttctctctacgtgatacttgctgggccattgttgaatggctgtaaatgtcaggctattgggccaatctaaaattggcctggaatgtccgacttggctcactcacatggttggcatttgatgctggcacttggcagggagatcatatgggattgacagaggcaagttagttctccatgtggtctccccatgtggcttgggcttctcatattatgactactcattaaagaacagaaagtggatgctgtctgttatcttaaagcctggggttctagaatgtcacttttgcctcatcttattggttacatccgaggacagcccacaatcaaggggagggtagatatgttctacytcttgacatgtagtatgaacataaaggtaagagaaaaatttttagacactgtcattggaaaccagctaccgcattactttatatatgcctatctttaggttaacagtttaataatctggatgtaatccattgcataccatagatgc

SEQ ID NO: 60546 - DNA, 1025 bp, Homo sapiens
tcctatgctttaagttgtccattattattgaatatttagcttgttttattctctttaataatgtcagtaatgtatcttttttcatgtttatgactatttgacatatttaaatttcaaaagtgaaaatacataagcaaaacatactaagagctttatgactatttattgccaaatgacttttcaaaaataatggtttaataccatttctacaaacacatttttaatccagttcatttgctgaatattatttactattctttattttctaattccaagtttayattattgtgttcatcctttaaattatttttataaaagcgatattttacctaaattaaaaagccagtgtgattacccagaattagatgacctcattgatgaatcaacaagtatcaaaaatggaaacatatcttctcattgaaagcatattcctctatttacatgcctttgagatttgccagctcttgtggcttggttttgtttttattcagacacggagagatttgttctgaactaaatcaataaatagcaactaaattaagttgctaactgcatgtactgcagtatgtccccatggaactgagacctgttttaattttagacatatacaacaatgtcaagttttctgcaattagctatgtgtcttgagacttaactacccttgtattgttcatacccagttggtatacacatgaaggaaaactgagaacaaattagaaagtacagcttcattggctgtttttcctttgaatgataaaatgagaatgctacacacagatttgcacttaataatctcaagaagcgacacattttcaacaaccttcagagactccaaattatagtagcattatcattggtttcttcattatagcgcagaggtattttaaataccaggcaaacctattctagtttttctattggaaaaggaacatcactaaactttcctaaagttacaatggtggtctgtgtgtgtgtgtgtgtgggtgtgtgtgtaaaagatactttaaaatttaagagaattaaaa

SEQ ID NO: 60547 - DNA, 943 bp, Homo sapiens
aagcatcttgaatgacttttctacttatgaattcatttcttatataaaacaattccattgcattagtaaatttattaatcaaaatctaagaaggatgtaaatgacatgtgatctgtattagctatgagatgttatgtgtataagaatgaattctagagccagactggtttttaatccagtgcttacaaattatgtgacttttgacaagtgacttagttatccctgtctctcagttaactcatatatcctcataataaagaatttaaagttctaaaaatgtacttggcagagagtaagcattactgtatatactttttaactactaatgtcagagaaaaatagcagtaggtataatcatttttttcttataaatctagcttgaaaacctggagacaagggaaatatctccagactgtaagtgaaatattaacttgaatagctgctttgcaaaatatgtgtttgttaactgactgaagtataaagtaacatttaatcacataaaaataaataaattattattattattgttattgttattattacttgcctatactttgttagaaattctaagtttgcaacaggcatcatgaatccctttctatcaacttgagctttaattcacttggggctagttttgggatttttagccctgagctagagatttttcatctaggtatagaaaagttgtggaagccacagagaatgaggacagaacacttctgagaatcacctgaaagaaaagggggcttgcagatttcattcaaatgtgacaccagttagggggagcatcctgcaatcayaactacacactgcatctattgacttcagttctctgactgtttccctgcggaacgaattcaagcacaaagctccctctgtcttcaaaaggaagcttcgtgcttgaatgggctcggcaggaaaaagatgagaaactgacccttga

SEQ ID NO: 60548 - DNA, 674 bp, Homo sapiens
tatcacatagaaaatgttggttacctccttgcccaagaatcctggccaaatcaaactcctgctcctgaatagaaaaagactttctacttagtcctgcctaaagcatgcttctcgagtacatcaatctgattttttccaaggtatttgactctgggaatatctattcccttcaggggaaacctcatactggactctgggtatatggtctggtcatgtggttctaacatgacagtcacataaaatctggtcagccagtcttaaaaacaccatgtgtattaatcataaccaggccaggtatggattgccaagctcagttcagttcattttcattgtcttctcattaaaggttaaccatgttttaggattatagcaaattattttggcatacaccccacaatgrgtcataaatttagatatgtttaggggtttgacaaataatgtaaatgcagaagttgtgtaggacaatggttctcaaaatgtagtcctgggaccagcagcatcaacatcaatcacctgggaacttataaaaatgcacattctcaggccccactgaatacccagcagatcaaacacttggggaggggcccagtaatatgttttaacaatccccactggtgattctgactcatgcttaagtttgagaacccctggtatcaaataatggggagtagtgg

SEQ ID NO: 60549 - DNA, 674 bp, Homo sapiens
tatcacatagaaaatgttggttacctccttgcccaagaatcctggccaaatcaaactcctgctcctgaatagaaaaagactttctacttagtcctgcctaaagcatgcttctcgagtacatcaatctgattttttccaaggtatttgactctgggaatatctattcccttcaggggaaacctcatactggactctgggtatatggtctggtcatgtggttctaacatgacagtcacataaaatctggtcagccagtcttaaaaacaccatgtgtattaatcataaccaggccaggtatggattgccaagctcagttcagttcattttcattgtcttctcattaaaggttaaccatgttttaggattatagcaaattattttggcatacaccccacaatgggtcataaatttagatatgtttaggggtttgacaaataatgtaaatgcagaagttgtgtaggacaatggttctcaaaatgtagtcctgggaccagcagcatcaacatcaatcacctgggaacttataaaaatgcacattctcaggccccactgamtacccagcagatcaaacacttggggaggggcccagtaatatgttttaacaatccccactggtgattctgactcatgcttaagtttgagaacccctggtatcaaataatggggagtagtgg

SEQ ID NO: 60550 - DNA, 1522 bp, Homo sapiens
aattatcggatgagttgaaggaaatgaaggagtggtgaagccaatcagcaattcctaaagcgatactccaaaaaggtatcatagctttgcattttctatatttaacggctaatttttagccaatgaagtggttaaaatagactatggaatgtacaggtgaagagaacatgcatatttaaattataatctatttccataagcaaattataaaaacctttctgctctctgaattataaagaagtgtatttttcatatttaataacttgtgaaatataaattttctcatttgctcaagatgattttgggaggctaatcatgctttctcaaaatgttcatccattcacagaactgtatactaagtggtctgcatttccaaagaggaataagacatgacccaaccttcaaggggctcatgttctgttagacgtgaaaagaaaacaaatgagtttattaatgtagaataaaatacaattgtatatagaaggtgccattattataatgagaaagaaattaaggtataaaacaaacacttgacaaaagatatggtgcttgaattatatattgaattcattcagttttttgctatgtaccatgctcagtactagccataagttgtaaaaatcagaggctcctagcatcatgtagaatacattctattaagaaaaaaagacaataaacatgtcacaaataaataaaatacagtaattacagatggtggcaactgttatcaaagagataagtaggtgatatgagagaggcaactggaaggagttgagggctgtataggagttgttcaggcaaatggggttacactggacaagggcattccaagggaaaggatccttttaagctgcctggttcccttctaaagcacagttggcacttgacataaatggtcatgaacatccttgcactgttcttgggaactgtctttgagagcaaatattaaccattacatccactacattctaatttgtccctaatctttcatttttcacccttttgactttacatcctttatttccctgtgagtcttatttgtttaaaagcatttttctgcctgcaacttctttggttttttttactctgaytcttattattttcctattatggccagaggtaaagggagtcagagggtaagaggtaagtatcacagaaggccaagtcttctacaacttcagaagtaacaccatgtagaacaggaagagctaaaaaaaaaaattaaaaatatatttggagggaccatgacatgatggaaagggaaggaaaggagagggtaggggaggggacacacccaggaacaatattttgcatccttcaatctaatcaagtcaacactcaatattaaccatcacatctgaatagcagtgctaagagatccacagtctcactgctgtttgtggttcttttaactctcttcactgctagtgtctcaatttatggggtaggtgagaaatcatatggagcttgttattttctttacatactttaaaaaccaggtacataatctatttaacatgag

SEQ ID NO: 60551 - DNA, 1189 bp, Homo sapiens
taggaatacccagtccccacagtgcccttttagatttttatagattgacacaaatgacatgactagggcttagggaccagccagaaacttgctgcaaaggtgacttgaaacttaacccaagattgttggctaagaaggtttatatgttctctgtttctgatcaaggttgatcctgagatcaggagtttgggctgcgactgctgggaactagcctgagtcatacactgggccaacattccagtgttatcttcagttagtttccttagtcatactccaaccacattgagacatactctccttgtcctttaattgtttataatttaattttcttctgcttgaaattttgtccattataagctattttcatatttgtgagaaaatgaaatcacagaatttcaaaattttggggacgaagatatrcaaccttccaccaaatccagttttctggtaagcatttactgctcttatcctttaagatctaaacttaaaactgtattttctcggaagcctttcctcattctttcagctgctgtcattcttgcctctattcaaatctatgatgcttcatttgcactttttgtttttttggcaatttattacagtaagtactttgaaatttagtggtctagcctgtttgtgtagctagaaaggaatacttgaggctgggtaatttatgaagaaaaaaggtttatttggcttacagttctgcaggctgtacaggaaggatggcatcagcatctgcttctagtgagggcttctggaagcttcgactcaggatagaagttgaaggggagctggcatgtagagatcacatggtggaaagtaagagagaaggaaaaagaatagggagggaggtggcagacttttaaacaattagatctctgggaactattagaactgaggagaactcactcattaccactgagatgggactaaaccattcatgagggatttgccccatgacccaaacaccttacactaggtcccaccttcaacatcggggatcaatttagatgtgagatggaggggacaattgtccaaactatgtaagtttgttatttttcctaaaacagtatcttataataaataggaatataagtgtgtgttaaaatataagcctgttaattttacaaatgtgaaacgatttgcagttatggcaaacaaacaaaacaactgaatctcattagta

SEQ ID NO: 60552 - DNA, 1256 bp, Homo sapiens
cagttattgtacagtaaataagtacttctcattttattctggcatctgaaactatacctacatgtacatatatatatacacacacataaatacatatatataaacatgtaacaatttctcatgtctctaactttagttttcagcattgagagtatagtcagtgtgatgtttttaccagagactgttgtaatcccaaatgaaaaggaaatatgtggtgctattgtggatgaatacaggctgctatagttgagcatcagaaaataaatatacagggtgagtttaagaagaatttttaagagatatattactgccctagaataatgcttgagtgctcattttccagtgtcaaagtagacatatggcagaagattccagagaacatttttcctatttatataaaatgggataaaggatatttaaatatagcattatctaagatttcctaatctatttattcatttagttacattctacaaatcttccagatataaatgtgatacaaagagactcatatattgtctatactctagggctatatatagggaaaagacagatatatgcattcaactgtaatttatggcagaatgtgatgagtcaattatagattcaaagcaagatatgtatgtacagataagagcataattctctgtaagtaatcagaggaattttcttggaagagaagggatttgawtaattgaactgagccttacaatttaggtaaggttttgctcctcaaagctacagagagagtttcatcaatgccccctagtcaataaatctattgatcaggtgagtagtcagtctagtgtggctagagtatagggaacagagagataagagaggagaggcacatgaggtcaagatcaaggtcataaaggaccctggaatgccaaagctaaagtttaggtttttttttttttttgagacatggtcttgctctgttgcccaggctggagtgcagtagggcaatcatggcacactgcagcctcaacctcctgggttcagaagatcctcccacccaagcctcctgagtaggtaggtgtgggagttcaatcagggttgtgggaaaaattgtagaaagatgcaaaccttcttgggaggctggaaggttttataatagtttcagtaaaagatttggctgaaggcagctgaattctcttaaaagcttagggtgtagatataaggaatgtaggggagtatatctaaatagcatgtttactcatgtggtcctaagactgacctttgatcatttgagg

SEQ ID NO: 60553 - DNA, 1256 bp, Homo sapiens
cagttattgtacagtaaataagtacttctcattttattctggcatctgaaactatacctacatgtacatatatatatacacacacataaatacatatatataaacatgtaacaatttctcatgtctctaactttagttttcagcattgagagtatagtcagtgtgatgtttttaccagagactgttgtaatcccaaatgaaaaggaaatatgtggtgctattgtggatgaatacaggctgctatagttgagcatcagaaaataaatatacagggtgagtttaagaagaatttttaagagatatattactgccctagaataatgcttgagtgctcattttccagtgtcaaagtagacatatggcagaagattccagagaacatttttcctatttatataaaatgggataaaggatatttaaatatagcattatctaagatttcctaatctatttattcatttagttacattctacaaatcttccagatataaatgtgatacaaagagactcatatattgtctatactctagggctatatatagggaaaagacagatatatgcattcaactgtaatttatggcagaatgtgatgagtcaattatagattcaaagcaagatatgtatgtacagataagagcataattctctgtaagtaatcagaggaattttcttggaagagaagggatttgaataattgaactgagccttacaatttaggtaaggttttgctcctcaaagctacagagagagtttcatcaatgccccctagtcaataaatctattgatcaggtgagtagtcagtctagtgtggctagagtatagggaacagagagataagagaggagaggcacatgaggtcaagatcaaggtcataaaggaccctggaatgccaaagctaaagtttaggtttttttttttttttgagacatggtcttgctctgttgcccaggctggagtgcagtagggcaatcatggcacactgcagcctcaacctcctgggttcagaagatcctcccacccaagcctcctgagtaggtaggtgtgggagttcartcagggttgtgggaaaaattgtagaaagatgcaaaccttcttgggaggctggaaggttttataatagtttcagtaaaagatttggctgaaggcagctgaattctcttaaaagcttagggtgtagatataaggaatgtaggggagtatatctaaatagcatgtttactcatgtggtcctaagactgacctttgatcatttgagg

SEQ ID NO: 60554 - DNA, 641 bp, Homo sapiens
ttcttgctgtgtggtgttgtgcaatagcctcccctcagccccacacgcagacaccagctgggcaaggggaggagtggaaagagggtggagagcgtggaatccaagccaagggggtgtcaaataacaaaaccaactgacccaactagtgcatcatagaaaagaacattttggacttcctttaacatgactgaatagtatatatcattttaaaagaagtatttcagttaattygctattgggctaatgtttgtttgagggttatggtactgcttcccttcctattatttccaaactaatttattttagtagtacatgtttgccattttataaactaggcacttatgaatacaggcccttgtttatctgagtgctaatagagattcttgaccattgtagatgatcaataaatgtttcatgatgatgatgatgataaattttatgaaatattttcttattctatgtgattgtgatgaaaatttcccaatttaatattacttatggagtggacttcaagaatcagattaccacaatgactatacctgagacttgtggttgaattattagaatagatacatgtcctttattaatcaaatatttacaacttgaaccaaaactaacaaaggattattttatttttgtaa

SEQ ID NO: 60555 - DNA, 641 bp, Homo sapiens
ttcttgctgtgtggtgttgtgcaatagcctcccctcagccccacacgcagacaccagctgggcaaggggaggagtggaaagagggtggagagcgtggaatccaagccaagggggtgtcaaataacaaaaccaactgacccaactagtgcatcatagaaaagaacattttggacttcctttaacatgactgaatagtatatatcattttaaaagaagtatttcagttaattcgctattgggctaatgtttgtttgagggttatggtactgcttcccttcctattatttccaaactaatttattttagtagtacatgtttgccattttataaactaggcacttatgaatacaggcccttgtttatctgagtgctaatagagattcttgaccattgtagatgatcaataaatgtttcatgatgatgatgatgataaattttatgaaatattttcttattctatgtgattgtgatgaaaatttcccaatttaatattacttatggagtggacttcaagaatcagattaccacaatgactatacctgagacttgtggttgaattattagaatagatacatgtcctttattartcaaatatttacaacttgaaccaaaactaacaaaggattattttatttttgtaa

SEQ ID NO: 60556 - DNA, 1318 bp, Homo sapiens
tgagcttccaggcaccatgctgatgtttctgaggtcaggttgatgaaatagaatggaacttcagatttagtgttaaaagccatgagggccaaacttgcactctttaaatctgtcacgtttagcaactatcagcaggaaaatgaactttccattgtctcgttgagacaattaacttgttttcattgtcccagagtactttcctccctccttccagccaaaccctatctacattttagtctcttccccctagaaaacttccccagaacactgcagcccagagaaatcttcccctcttctacacttccatcatttgttttctacaatacttaatagaaattaatcttcagtgctttgtttcggttcttacattattattattatattcttattattatcatttaggttgcttgatacttttaactgtttaacttttaaygtagtcatgctttgtctcctcaatcaaattattagttcctcaaaggaattaaagagctctaccacagtacttcaataacttatccttttgtcatattaatgtattttatatttatttgtttatttctaactctccttactagaatgtaatctctaagaaggcaataactttgtatctatctctgtaactttagaagcatgtcaggtccagcaagtgtgtgagactcatggagggcagagcctcccagacagtagtgtggggctatactcccaactccagtctccctaccaagcactagtgcctagcaaattataagtgctcagtagatgtgttggaagcatgaatgaataaatgagtgaataactaacttgtgtcttcctctttaatttaaatggtaacatttttagcatttgccttaacaaagctaacataaagcagaacctacatggaggttaaaagttcagtgtttgtagtcaaaaaggtatggattcaaatcctcttcattgtttacttcattttctggctatctgatatttgtcaaaccactaaacttctctgcctcagattcatctcctttcaaatgacgataacaacatctgcttcataaagttgatgtattaaataagatatggtcaataaaattcttgacatgtaataagtgtttaacagttcattgtacaaacctgtattgactatttacaatgctgagggcacagtggtgggaaaaaatatagtgttcaattaatgctgctatgtattgtatgtagctactcactggcaacaagtgtcttcctgaacattcttattcagatggggctttcaaacatgggtccacaattttatgctagaattagcagagagaccagaagtagcagagatgca

SEQ ID NO: 60557 - DNA, 1318 bp, Homo sapiens
tgagcttccaggcaccatgctgatgtttctgaggtcaggttgatgaaatagaatggaacttcagatttagtgttaaaagccatgagggccaaacttgcactctttaaatctgtcacgtttagcaactatcagcaggaaaatgaactttccattgtctcgttgagacaattaacttgttttcattgtcccagagtactttcctccctccttccagccaaaccctatctacattttagtctcttccccctagaaaacttccccagaacactgcagcccagagaaatcttcccctcttctacacttccatcatttgttttctacaatacttaatagaaattaatcttcagtgctttgtttcggttcttacattattattattatattcttattattatcatttaggttgcttgatacttttaactgtttaacttttaatgtagtcatgctttgtctcctcaatcaaattattagttcctcaaaggaattaaagagctctaccacagtacttcaataacttatccttttgtcatattaatgtattttatatttatttgtttatttctaactctccttactagaatgtaatctctaagaaggcaataactttgtatctatctctgtaactttagaagcatgtcaggtccagcaagtgtgtgagactcatggagggcagagcctcccagacagtagtgtggggctatactcccaactccagtctccctaccaagcactagtgcctagcaaattataagtgctcagtagatgtgttggaagcatgaatgaataaatgagtgaataactaacttgtgtcttcctctttaatttaaatggtaacatttttagcatttgccttaacaaagctaacataaagcagaacctacatggaggttaaaagttcagtgtttgtagtcaaaaaggtatggattcaaatcctcttcattgtttacttcattttctggctatctgatatttgtcaaaccactaaacttctctgcctcagattcatctcctttcaaatgasgataacaacatctgcttcataaagttgatgtattaaataagatatggtcaataaaattcttgacatgtaataagtgtttaacagttcattgtacaaacctgtattgactatttacaatgctgagggcacagtggtgggaaaaaatatagtgttcaattaatgctgctatgtattgtatgtagctactcactggcaacaagtgtcttcctgaacattcttattcagatggggctttcaaacatgggtccacaattttatgctagaattagcagagagaccagaagtagcagagatgca

SEQ ID NO: 60558 - DNA, 1318 bp, Homo sapiens
tgagcttccaggcaccatgctgatgtttctgaggtcaggttgatgaaatagaatggaacttcagatttagtgttaaaagccatgagggccaaacttgcactctttaaatctgtcacgtttagcaactatcagcaggaaaatgaactttccattgtctcgttgagacaattaacttgttttcattgtcccagagtactttcctccctccttccagccaaaccctatctacattttagtctcttccccctagaaaacttccccagaacactgcagcccagagaaatcttcccctcttctacacttccatcatttgttttctacaatacttaatagaaattaatcttcagtgctttgtttcggttcttacattattattattatattcttattattatcatttaggttgcttgatacttttaactgtttaacttttaatgtagtcatgctttgtctcctcaatcaaattattagttcctcaaaggaattaaagagctctaccacagtacttcaataacttatccttttgtcatattaatgtattttatatttatttgtttatttctaactctccttactagaatgtaatctctaagaaggcaataactttgtatctatctctgtaactttagaagcatgtcaggtccagcaagtgtgtgagactcatggagggcagagcctcccagacagtagtgtggggctatactcccaactccagtctccctaccaagcactagtgcctagcaaattataagtgctcagtagatgtgttggaagcatgaatgaataaatgagtgaataactaacttgtgtcttcctctttaatttaaatggtaacatttttagcatttgccttaacaaagctaacataaagcagaacctacatggaggttaaaagttcagtgtttgtagtcaaaaaggtatggattcaaatcctcttcattgtttacttcattttctggctatctgatatttgtcaaaccactaaacttctctgcctcagattcatctcctttcaaatgacgataacaacatctgcttcataaagttgatgtattaaataagatatggtcaataaaattcttgacatgtaataagtgtttaacagttcattgtacaaacctgtattgactatttacaatgctgagggcacagtggtgggaaaaaatatagtgttcaattaatgctgctatgtattgtatgtagctactcactggcaacaagtgtcttcctgaacattcttattcagatggggctttcaaacatgggtccayaattttatgctagaattagcagagagaccagaagtagcagagatgca

SEQ ID NO: 60559 - DNA, 583 bp, Homo sapiens
agtcagtgaggatcacttggaggtctggccctggtgtgagggtgggaggcaccagagctttaggtgacacaaaaggtttcctcaactcaaacaaaatggtacatttcagtgatttccaaatagaagcgtttttgtagcaccagctcccttagtaactaactgtctgccagtataatgaatttttaacttgcttggccccaccctagtcaccatgtacaggtttagggggatttggatgctccaaccccttcagtgaaagtcctggtgagccttgccatggccttacccttcagttattggtttcctcaattatyatttgcctactgcctactaactagctgctgagcaaagcattcctctcaggaggtcagagtttggtgtgggagataggcatgcaggcaggcaaagggtggtgcctatcacagagatgtgcccaagctgaaacagagctcagaggagggatgctagcccaggagagggcagaggctggtctgagaaggctttggataagggattggccaatcgagggattagaagcagcatcaggggtgttcatgagcgtgtgtctgtgtgcgcacatgca

SEQ ID NO: 60560 - DNA, 583 bp, Homo sapiens
agtcagtgaggatcacttggaggtctggccctggtgtgagggtgggaggcaccagagctttaggtgacacaaaaggtttcctcaactcaaacaaaatggtacatttcagtgatttccaaatagaagcgtttttgtagcaccagctcccttagtaactaactgtctgccagtataatgaatttttaacttgcttggccccaccctagtcaccatgtacaggtttagggggatttggatgctccaaccccttcagtgaaagtcctggtgagccttgccatggccttacccttcagttattggtttcctcaattatcatttgcctactgcctactaactagctgctgagcaaagcattcctctcaggaggtcagagtttggtgtgggagataggcatgcaggcaggcaaagggtggtgcctatcacagagatgtgcccaagctgraacagagctcagaggagggatgctagcccaggagagggcagaggctggtctgagaaggctttggataagggattggccaatcgagggattagaagcagcatcaggggtgttcatgagcgtgtgtctgtgtgcgcacatgca

SEQ ID NO: 60561 - DNA, 1077 bp, Homo sapiens
tttcttgttttcaaaaattattgttatttttagggaaatttaaaaggagccgtggtttaaatcttatgttcctttaagaagtcatttttttaggtattttggccttctaactcgtgagcacaatgttttatttttttattatgcagggaaccagattcagaaccgtatttatttgcctgttttctgacttgtccatacttatttatctacaaaagttaagatttttatctagaaacaagggaaatgactttctcttggatctcttccctctctccttaagttttagaaatttcaggttgccagaaacctttcaccatgcacatttatatgcttgttgctagcttactgatctagctaagcatggggacagaaagatggaactgaggccatgagtaattatacctgaagaattttgtccttgtgccagctctgatcatgtgcatgtgtgcaaacatgtgcatgtatgtgtgaaatcactatggcaggtccccgggtaagcatagccagaacacttacatggttgagaaatggtcttgcctcttggcccaatcatcgtttcaactaaactttccaacttaatgaaactgcttctccagcacccctgccactatgggttttcagtggcccacggtctagtagattgattcttgccctagttcctggtctaatatgcccaggcagctatttaacatattaaagatggccttgctgtcttagactagatctccacatctgggacttcctctgttgacctgaagtttcttctagtgtctgcccagaatcttgggattcactgttaccctgaatcttacataatatttggtttgttggcttgatttgatattcagctttgttttaagtaattgcagactaatcaagactgtggaaagataaaacatttaataagttatattgccttggattttaagatcagtcagaaagatatgagaaaaaagatagggtaccaatataataaattttataaaaccaaggtatcagtagtactttttatagaaaaaggtaaatataaagacaatcgttattaggtgtraaaaagagattctgttcttgaatgca

SEQ ID NO: 60562 - DNA, 878 bp, Homo sapiens
tgtatgcactcagatatatatacacacacattacatacacaattttttttattttgagacagagtctctgtcgcctaggctggagggcagtgacgccrtcttggctcactgcaagctgctcctcccaggttcatgccattctcctgcctcagcctcccgagtagctgggactacaggcgcccaccaccacgccctgctaattttctttttttttgtatttttagtagagacggggtttcaccgtgttagccaggatggtctcgatgtcctgaccttgtgatccgcctgcctcggcctcccaaagtgctgggattacaggcatgagccactgcactcagccgacatacacatttaagccagtcttgattaaaggtagggaataattgcagtgcagatggcagctattttattgattaatttttatttgtataagtttatgaagtacaagtgtaattttgtgacatgaatatattgcagagtgctatgaagtcagggtttttagggtatccctcacccaaatcgagtacattgtatccactaagtaatttctcatccctcacccccctcccacttccccatccttccaggtctccatggtctataattccactctctacgtccatgtgtacacattatttagctcccatttataagtgagactgtgcagtatttgtctctgtttctgagttgcttcacttcaaacaatggctactagttctacccatcttgcttctaaatacgtgattttgttctctttgatgactgaatagtattccattgtggcaatacgccacattgtcttcatcccatccagatggcagatattctaaaataagtatctaatgggggaactcctacttctctggcatacccacaga

SEQ ID NO: 60563 - DNA, 878 bp, Homo sapiens
tgtatgcactcagatatatatacacacacattacatacacaattttttttattttgagacagagtctctgtcgcctaggctggagggcagtgacgccatcttggctcactgcaagctgctcctcccrggttcatgccattctcctgcctcagcctcccgagtagctgggactacaggcgcccaccaccacgccctgctaattttctttttttttgtatttttagtagagacggggtttcaccgtgttagccaggatggtctcgatgtcctgaccttgtgatccgcctgcctcggcctcccaaagtgctgggattacaggcatgagccactgcactcagccgacatacacatttaagccagtcttgattaaaggtagggaataattgcagtgcagatggcagctattttattgattaatttttatttgtataagtttatgaagtacaagtgtaattttgtgacatgaatatattgcagagtgctatgaagtcagggtttttagggtatccctcacccaaatcgagtacattgtatccactaagtaatttctcatccctcacccccctcccacttccccatccttccaggtctccatggtctataattccactctctacgtccatgtgtacacattatttagctcccatttataagtgagactgtgcagtatttgtctctgtttctgagttgcttcacttcaaacaatggctactagttctacccatcttgcttctaaatacgtgattttgttctctttgatgactgaatagtattccattgtggcaatacgccacattgtcttcatcccatccagatggcagatattctaaaataagtatctaatgggggaactcctacttctctggcatacccacaga

SEQ ID NO: 60564 - DNA, 530 bp, Homo sapiens
gcttaaaccgaggaacccaactcgtagcactaataattattgcaatttgttgagaataacaatagcttcgtaaagcccagtgtttccctaaagggcaagtataataggcctataacttcaaacgtgtaagaataatttgttattcatgttaatcccctcgccattgccagccacatcaatctttttcaaaaggggagcactggaaaaaccactgaagtctgaagggaaaaaataaacatgtaaggtgaacaggagcacacagtaaagcaactctgtgattctgctggttgctgccagggactcgtaatgtttcattaacgttcacccaccaccccatacccatttggctccaactctcagtaaggcagggatgtgagccaggagaagaayaccaccatcaagtcattgctggctattcctacgaggatactatttttcaaaattttttgccacctgaggcccaggcaaaattactggcccttgtttaaatcactgcattctttactcatgtacaggtcagtttcaactca

SEQ ID NO: 60565 - DNA, 718 bp, Homo sapiens
ggatccaggtgattcctctataaacaaagaaacggcaaagatygccagcaaatcacaagaagctaggaacgaggtttggagcagattctctctcacagctctgagaaggaatcaagcctgctgacatcttggcaagcctctagaactctgagacaataaatgtctgttatttattttctagccttagcaaaccaatatacaatcttagccaattaaaggctgactagaataaccttagcttaatctagggcaattttcacaccattcagacagcagaaactacatacacatatccatgtacccatctgaacttctgtcataatttctcagtctatcaattttagcagtgtggccaaatgtcagtttctctggaatgccaaaataagggaattttgttgtggctgtcctatgaaaatgaagctctgtcacagagaagtgtgtgagccaaatccaaatactgagtttattttactgtccaaatagaatattttcaccccagtgaagcaattgtaagcatctcatccaaagcatattcactatccttgagtattcttggttgcttattgaatgaataagtgaatgaggtggatttggctgacactaacctttgggattacctcacagcttgccagtggcaagcttagtaagtactgggccatagtgtttgaggataggtctctagagtcatatgtctctaagttcaaatgctagcctcctg

SEQ ID NO: 60566 - DNA, 643 bp, Homo sapiens
ttattaagccaatgtgcattgtgaacacaggaggtagtggagatagttaaagtatgcagcattttctatttttgactatagtttgcttgattgattttttttttttttttttagacagaatcttgctctgttgcccaggctggagtgcagtggtctgatctcagctcactgcaagctccgcctcccgggttgacgccattctcctgcctcggcctcctgagtagctgggactacagttgcctgctaccamgcccggctaattttttgtatttttagtagagatgaggtttcaccgtgttagccaggatggtctcgatctcctgatcttgtgatccgcccgcctcagcctcccaaagtgctgggattacaggcgtgagccactgcgccggccacttgattgattttaaatgaagcatccagcagtgttagtgtgaaacttcattaggtagtacttttcagaccttaacttgcatatgaattgccaagggaacttactaaaatgcaaattctgatttaggagggaagagtgcctagggcagggacctgagatcctacatttcatcttcttttttcttcttttatttgaaacaaggtctcactctgtcatccaggctgaggttcagtggcatgatcacagctcact

SEQ ID NO: 60567 - DNA, 643 bp, Homo sapiens
ttattaagccaatgtgcattgtgaacacaggaggtagtggagatagttaaagtatgcagcattttctatttttgactatagtttgcttgattgattttttttttttttttttagacagaatcttgctctgttgcccaggctggagtgcagtggtctgatctcagctcactgcaagctccgcctcccgggttgacgccattctcctgcctcggcctcctgagtagctgggactacagttgcctgctaccacgcccggctaattttttgtatttttagtagagatgaggtttcaccgtgttagccaggatggtctcgatctcctgatcttgtgatccgcccgcctcagcctcccaaagtgctgggattacaggcgtragccactgcgccggccacttgattgattttaaatgaagcatccagcagtgttagtgtgaaacttcattaggtagtacttttcagaccttaacttgcatatgaattgccaagggaacttactaaaatgcaaattctgatttaggagggaagagtgcctagggcagggacctgagatcctacatttcatcttcttttttcttcttttatttgaaacaaggtctcactctgtcatccaggctgaggttcagtggcatgatcacagctcact

SEQ ID NO: 60568 - DNA, 643 bp, Homo sapiens
ttattaagccaatgtgcattgtgaacacaggaggtagtggagatagttaaagtatgcagcattttctatttttgactatagtttgcttgattgattttttttttttttttttagacagaatcttgctctgttgcccaggctggagtgcagtggtctgatctcagctcactgcaagctccgcctcccgggttgacgccattctcctgcctcggcctcctgagtagctgggactacagttgcctgctaccacgcccggctaattttttgtatttttagtagagatgaggtttcaccgtgttagccaggatggtctcgatctcctgatcttgtgatccgcccgcctcagcctcccaaagtgctgggattacaggcgtgagccactgcgccggccacttgattgattttaaatgaagcatccagcagtgttagtgtgaaacttcattaggtagtacttttcagaccttaacttgcatatgaattgccaagggaacttactaaaatgcaaattctgatttaggagggaagagtgcctagggcagggacctgagatcctacatttcatcttcttttttcttcttttatttgaaacaaggtctcactctgtcayccaggctgaggttcagtggcatgatcacagctcact

SEQ ID NO: 60569 - DNA, 788 bp, Homo sapiens
tccaacacacgcattgtggtattaaaacaaaatcacatcacgcatggaactctcragatagtggaaaataccagctacaacatccagtgatgtgtgacccggaggcacggagctgactagaataccgacgggccagaatttcaaaacgcggattttgaatctttttttctacttagcctaataagtttgggtcttttacttaacgtctatctaggcggctcagcttcaagttctgcaaattggagataatatcattaagttacagatgttatttgaaaaggcaacgaaccattgtaaccatttttgtaaaccatgaaggtatattataagaaaaggaggaggaaaatgagaggtaacttgtgcattgttggatgttgtttgcctgttctgctttttctcttgtccagcaaggcttgggtagacaatcatacatcatgaatggttaacttgaaaactgagttctactggaaagactggcaggcaagcagaggtcggaatcccgtcgtttctaagtgtctggtaatctttgccactgctaagattacctgggggtagaagcaccgtcggtaggaacaagatgtgccccttcactccccgaaagctcacttatcctgcgcagacatgttgaagggccgtcgggcttcagagcccaaatctcggctctgcagagacgtccccttcccccgcctccaccaaccgctcttcggcatgcagaaaagcggtccccaccccttccacgcccctgccccacctcttggccccctttacaaccccctcttctttgcccg

SEQ ID NO: 60570 - DNA, 720 bp, Homo sapiens
atccagccaatgatattagcactagacatggactggaaactaaccatgctttcaagaaattttaaaaaataaggtgcaatatttttattraagaactacaaattacttttaaaaatcccaaattggggaaaacctagaactaaaaagtactgtgaaattgaaaagacacagatggtttttaatagtaagatacaggttagtaaaattagtaaattggaagatagaccagaagaaaatactgagcctaatgaatgaagataagaaagagacttatactctaagagcatagtaaaaaggtctaacatgtgccataggaattttggaaagatgtgtatgagagacgtagaataagttagaagccgtgtttgaagacataatggttgagaatgttccaaaactgtcaaaacaaaaaaacaaacccaacaagcatacatttgaaaagctctttaagaatccaaggcatgttaaatacaaagatatttatacctagaaaattatactaaaccaaagacaatgaaaaaagtctaaaaagcagctagaggaaaccagagactacagttgctccttgccaagctgaaaatattttaagtcaaaaatgcatttaatgcatctaaactaccaagcatcataacttgacatagcctaccttaaatgtgcaggacattaaatgtgctcagaacacttacattagcctacagttgggcaaaatcatctaacaca

SEQ ID NO: 60571 - DNA, 1098 bp, Homo sapiens
catttctgacatgttcagataaatacaatgagtatcaatgtattgagaattaatgttataaatacgatgaatataaaagaaattgcttccttaagaattactaatatttaaaaaatgtaatgttcttcaaatcatatgataaacatgtaagttccgtaagcataaggctatcaatttttataacacacaaacatgtaatatatgtaagatacactggaaaaaggaagtaaaagtatctctactcaagatgacaatcttgtaggcagaaaatcctatggaataatttaaaaaaactgattcgactaataaacgagttctgcaaaactacaagaaacaaataaatatacagtggtggccaggtgtagtcacagatgcctgtaatcccagcactttgggaggccaaggcaggcagatcacttgagctttgtagttcaagacaagctgggcaacttagacttcatctatactaaaaataaaaaatacatgtaagtgcttagaagagtgcttggcacatagtcaacactatatccacatgaagtgattgttatctttctgtatgaatgagggaaactgaaaacccacagaagactctttgtgctgtttaaatcatgcaaatgggccaggcacagtggcccatgctggtaatcccaacagtttgggaggccaagacaggcagattacttgagcccgagagttcaggacaagcctgggcaacatgctgaaaccccacctctataaaaaatacaaaaattagctgagtgtagtggctcacacctatagtcccagcttgagagtctgatgtgggagaactgcttgggccccagaggtcgaggctgcagtgagctgaggtcgtgccactgcattctagcctgggtgacagagtgagaccctgtcttggagcggggacggggttgggggaggaggggcggaaatagcaataaatattctgaaatgaaatttwtaaaagtataaaatgtctacattgaaaactataaaacatcattaaaagaaaataaagactcaactaaatggaatactatctatgtgcctgaattggaaaatataatattgttaagatgtcaatgttccccaaactga

SEQ ID NO: 60572 - DNA, 1098 bp, Homo sapiens
catttctgacatgttcagataaatacaatgagtatcaatgtattgagaattaatgttataaatacgatgaatataaaagaaattgcttccttaagaattactaatatttaaaaaatgtaatgttcttcaaatcatatgataaacatgtaagttccgtaagcataaggctatcaatttttataacacacaaacatgtaatatatgtaagatacactggaaaaaggaagtaaaagtatctctactcaagatgacaatcttgtaggcagaaaatcctatggaataatttaaaaaaactgattcgactaataaacgagttctgcaaaactacaagaaacaaataaatatacagtggtggccaggtgtagtcacagatgcctgtaatcccagcactttgggaggccaaggcaggcagatcacttgagctttgtagttcaagacaagctgggcaacttagacttcatctatactaaaaataaaaaatacatgtaagtgcttagaagagtgcttggcacatagtcaacactatatccacatgaagtgattgttatctttctgtatgaatgagggaaactgaaaacccacagaagactctttgtgctgtttaaatcatgcaaatgggccaggcacagtggcccatgctggtaatcccaacagtttgggaggccaagacaggcagattacttgagcccgagagttcaggacaagcctgggcaacatgctgaaaccccacctctataaaaaatacaaaaattagctgagtgtagtggctcacacctatagtcccagcttgagagtctgatgtgggagaactgcttgggccccagaggtcgaggctgcagtgagctgaggtcgtgccactgcattctagcctgggtgacagagtgagaccctgtcttggagcggggacggggttgggggaggaggggcggaaatagcaataaatattctgaaatgaaattttwaaaagtataaaatgtctacattgaaaactataaaacatcattaaaagaaaataaagactcaactaaatggaatactatctatgtgcctgaattggaaaatataatattgttaagatgtcaatgttccccaaactga

SEQ ID NO: 60573 - DNA, 548 bp, Homo sapiens
aacattgtttctatggtgaaatgtttcaaatacatagcaaccaaatccccaagatgagaaaatgtcttcatttactaggtgaagaaagacacatataacccacgcccctgccatttgaactgacgccacgtgggaacctcagcattcctgaatcttgtagaagctgcccttgcccttctttcacrtcttccattttgaggagactaaacctgctctcctttggcagccgagggtgtttggaagtgactcatgtagggaacccactggttacccagtagcatgagcacatcagtcaaacgattagacccctgcctcatatgtagaccaatgaccctggaaattgttctgtcagactccttccagttctctgacaatctgataggtgctgggaacacactgcctggaggtgagttgtttacttggtttaagtggttcagctgaagatttcaacagagctctgctgagttcgtacggcaataccagtagccagtgtttaaacattcataccccatgaagccagacgatatccagaaatggcacagcttgga

SEQ ID NO: 60574 - DNA, 1187 bp, Homo sapiens
caatctgggcagcaggtggcacaagtaacctagatttcttaggccactgcagaaggaagccgcagaggtaaggatttggagaaactgggaagctgggagcatcatcccaagccactcttttgcctgcctgattgcagtacaagacataaaggcagtcctgtgaggatttcaagtcctagacatctgcctttccaaccaccatccttcaccctcttagtccatcctccaccctcttcagtccatccttactatggccaattttgttatttgccaacctgccttcctttttgaggaaaatgagcatttccattcatatcagtggcagtgaatattcataagacctcttcgaagggaaatgtagcagggctgatcaaaagaacacttaccctggaggagacagataataattccttaacagatctaactgcaatcatggattggatgttcatcattatttgattttcctcttctggggcaatggattcataaattattttaagggtatatgagcagataaacaagttaccttgactactgactatagtaaaggttgaattttgtatattaatgtagttattttgataaatttggtagtaattattataactttacataataaatttatggaaaatatagacatacaattgcataaagctaggtgggctaattaagtaccatcatattgctggtgagggtggctgttattattattacacaaaatatatttattctttgaacaaatatttattaaatgctacatatgcaaaaactacttatgaaatgaccatcaagtgccaggtactgtttttggtgctgggaaaaaataaatcagtgacaaattctctgcccttatgaagctttcaatgtaacaaaggaaataaatacatatatattattgccatatacatacacacatatatggcaagtgattataactgctatgaaaaaagaataaaagattataaaaaagaaaaaagaaaactattaaaaaaagaatgatggaggctgttatttttaattgggtgctcaagtactaattgtgctacagactcaatgttaattcaaaatcatacatgattcctacctccccaggactctactgtcagtgagagaaagaaccactactcaaataakgacactataatataattctctattgctattggtgccatgaagaagtacatgca

SEQ ID NO: 60575 - DNA, 712 bp, Homo sapiens
ggtttctcctgggagtgcttctttaatataacccttgcacacaaaagcttgactcagggtctgtttctaaagcagctgacctgctgggcatggtggctcacacctatcccagcactttgggaggctgaggtgggagaatcacttgagcccaggtgttcaagaccagcctgggcagtataggaagaccccatctctataagaaaatgtaaaaattagcccagtatggtggcatgtgcctatagtctcagctactcaggaggctgagctgggaggatcacttgatcctgggaggttgaggckgcagtgagctgtgatcacgccattgcactccggcctttggcacagagtgagatcctgtctcattaaataaagggagagagaaaaaaagaagctgatccaaggcaattgataaggaaggatctgattcgatcaatattgatagatgatcttttcagtccaaatagtataaaaatacactgatttagcaatcccacaaaaactgtctttcaaaaacctagatgatgcactatcctatctgtctaaactcagagttcactattaaaacttggaggaattgagtcactaggcattgctggggcttcggaggctggtcagtctgtggacaagaaaaagaagctggaacaaaatagactaagaaaatggtaatgtaggaactgacttccaatggagaaaatcaacagtctacataaca

SEQ ID NO: 60576 - DNA, 766 bp, Homo sapiens
aagataatcctgctctaagcacagtaaatagctctgggtagagctgtgagtataaaccaaactagccatccatcactcaaataccttctgggtccttgccccgtgctagaccctgggctggctgttagactcaggatggtgagtgaaatcacaatccacaactgatggtctggttgggtacacgtaggcatacaaagctaatactaaagtagcacaagggctctgctttgcctgggagtacagaagaaggaatgattcattcacatccccgtaagtgctagcaattcatccatgtggtatactggccaaggctggtgtctctgtgtcactctgccttcccagatcacaacctacttcttgccacttcracaaatggaccatcatttgtggtgctgtttcctttttttttttctttttttattgtttttaaaatttattttatttatttatttttttaagacggagtctcgctgtgtcacccagactggagtgcagtggcatgatctcggctcgctgcaacctctgcctcccaggttcaagcgattctcctacctcagcctcccgagtagctgggattataggtgcccaccaccatgtccagctaattttcatatttttagtagagacagggtttcaccatgttggccaggctggtctcgaactcctgacctcaggtgatccgcctgcttcagcctcccaaagtgctgggattacaggagtgagccaccgcaccgagcctgtggtgctgttttcatgtctcagtgcc

SEQ ID NO: 60577 - DNA, 591 bp, Homo sapiens
tccaccagaacataggtaatgtgttatgattatcccctttgtacaaatgaagaaactgagctacagagaggtgaaatggtttgcatacactagtaagtgacagagctaggattcaaactaagatatctaactctttttgttttgtttttgagatggagtctcgctctgtcgcccagcgtggagtgtrgtggcgctatctcagctcactgcaacctctgcctcccagattcaagcgattcctctgtctcagcctcctgagtagctgggattacaggcacgcgccaccatacccggctaatttttgtatttttagtagagacggagtttcaccacgttggtcaggctggtctcaaactcctgacctcgtgatccacccacctcagcctcccaaagtgctgggattacaggcatgagccactgtgcccagcagacatctaactcttaacgatgttggcctcagaggtgactccacagttcatccccagcatgatacagggcttttggtcagtgacttattgtgagaatgagcacccagctaacctgaaggtcaagtctgggcggtgatccctaccactgacctacttattcctg

SEQ ID NO: 60578 - DNA, 591 bp, Homo sapiens
tccaccagaacataggtaatgtgttatgattatcccctttgtacaaatgaagaaactgagctacagagaggtgaaatggtttgcatacactagtaagtgacagagctaggattcaaactaagatatctaactctttttgttttgtttttgagatggagtctcgctctgtcgcccagcgtggagtgtggtggcgctatctcagctcactgcaacctctgcctcccagattcaagcgattcctctgtctcagcctcctgagtagctgggattacaggcacgcgccaccatacccggctaatttttgtatttttagtagagayggagtttcaccacgttggtcaggctggtctcaaactcctgacctcgtgatccacccacctcagcctcccaaagtgctgggattacaggcatgagccactgtgcccagcagacatctaactcttaacgatgttggcctcagaggtgactccacagttcatccccagcatgatacagggcttttggtcagtgacttattgtgagaatgagcacccagctaacctgaaggtcaagtctgggcggtgatccctaccactgacctacttattcctg

SEQ ID NO: 60579 - DNA, 2185 bp, Homo sapiens
ggatccaggcattctggctccaatacatcacaatgtactgcttcactccaaaataagacaagatggcaaatgcagcaaggctgtccatgaagctgaggatagaaaagtgcttactggggccagacgcagtggctcacacctgaatcttagcactttgggaggctaaggtgggtggatcacctgaggtcaggagttcgaaaccagcctggccaacatggcaaaaccctgactttactaaaaatacaaaaattagccgggcttggtggctcatgcctgtagtcccagctacctgggaggctgaggcaggagaatagcttgaacctgggaggcagaggttgcagtgagctgagatggcaccactgcactccaccctgggtgacagcgagactccatctcaaaaaaaaaagaaagaaaagaaaaaagaaaagtgtccattggattaggcaaaagggccactggtaagctcagaaagaactcacagtaataaacaataggtgctaattaactgttcaacaggattggttcctggcctaactggtctttggggccagcagtgtgccatacacatggcacctctcagccctggcttgcattgtcctcgttggaaacctattccaggtttacgctctgaaaaagagcaggcacattccctaatgccttcagggaaaacaagacccagcgctccagcttcctgaagtgtataagagaagtgtgacgtgcctgtttataacccagcaactatactcaggcatagacttagatgcatttgaacatatcatcaacgcaattacctgtacccagattagcctcagcaaatctttaagctctcacagctgtcttcaggtgttcagaggattattatggagagatgttgatcagctgttctccatgtctcctgtgtagagaacaaaaggaaagaagcttaaatgtcagcaaaggatttagatgtaagtgagaactctgtgaggcagggaggtcctgtgtatccaagcgtttccaacctttctgtcttatttagctctaaatattcccttctccaccatgctgcttcttatgtttattataacaacgacaatgacaataacaataatggcaaacgcttatatagttcttactttgtgcctggcactgttactaagctttttattcatattcattcaatactcacagcaacacgatgacataaagactattgtcatccccattttataggtaagaaaactgaaacagagagagagtaaagaactggccaaaggtctcacagtcaacaaatggcagagccaagatttgaagccttaggccaaagtccatcgtcttaacaatgaccctatgtgctaatctggagatattgtactagaacagaattcaagataaggcagagcatggagaaatgctaataaattggcatggaggctgtagtagattgttacaaaatggccctaaaggaaccatgcccctctgaattcacccgtgtgtcctcccctcccacgcaggatccgtaccagcaaaatgactcgcctgaaccactgagaggtgatgggacttcaagcccagatcttaagagatctagagcttttgctttctctctgagaacccaactgccttgtaaagaagttcaggctgtccagctgtagacagcagcaacgtggagaaagaagccttgaaggttgagtccacatggaggaaaagagaggcatcccagctaagagccagcaccagcgtggcaaaggaggccatcttggatgcttcggtcccagttgaactgtcccagcagacaccatatagggcagagatgagctggccaaaattctaactcgaaaagcgttgtggttttagrtccccaagtgttttcttcctttttttttttttttttttttaggcagagtctggttctgtcgcccaggctagagtgtggtgacacaatcttggcttactgcaactttgcctcttgggttcaagtgattctcctgcctcagcctccctagtagctagaattacaggcgcctgccagcatgcccggctaatttttgtatttcaaaatgttgaaattagccaccagcctggataatttcagaccagctgttgcccaggctggtctcaaaatcctgagctcaggtgatctgcccacctcagcctcccaaagtgttgagatggcaggcatgagccactgtgcctggcccgtgtt

SEQ ID NO: 60580 - DNA, 1101 bp, Homo sapiens
tgtcctgatcaagataacatgtataggaaattagtgaaaagattaagatgtggcaaatgcctgaccacctactgtaatgcagaagcacttgaggctcatctagactgataaaaatgtttcagaaagatgtgtcaatcaagcagtagtgtgaaaaaagcactatgaaaacacatcagtttgctatttccctgatggccttaattttacagtggtctcggattactaaagataaagacaaaacacrttttctagaatgaactacagagatgtggtggcttagactttaaaagggttattataaaactcccaaagtaccagttttccagaaaaccacatttaaaaaagtttaatgattaatagcagcagcatgttcagttttgcttatatgagaaacatgtttaggcaactagtcagaaaaccagcgatggccatacagaaagggcaaagttaacccattattaaaaagtgtgtgtggggaggggggctggtttacagtaattatcaatttaaattattttctacaaatggggttttcttctcatgtgtaatcagattacgtcctctcccttctagtcgaacatggtttaaggaacagctgctctttggtttgtgatatgatttagaaacttatacattaacttaccacaatgctatcaattaaagattgtaactgatttctagatgattaattaggttgaagttcaatgaatggcctgccagcattgaaaattaaaaaacaaaacaaaaaaaccacagtgctttactaataagctcttcatagaacctcccacgaaccacttttgtagtacaaattagttacatttaaagggcagaagtgtcaataaaacaaaaaaaatgatcagtaactctggggagagatgaaaggcatctaagacctttacaggctttgtagttagttgaaggaaaacactgaattgcaaattctttcaatgtgcataatggtaaaagcacactgggatatttctatttgtatatgttaggacattgcttgatgattcatagcaaggtcctttagacattaatgtgagttatctaagtacagtcctaaaataattggtttaaaacatcagctaagaatca

SEQ ID NO: 60581 - DNA, 815 bp, Homo sapiens
tttacgggttccttaattgaatacttgatattggagaaaaaatgaactattaagtcaaaataattatgtaaacaagctcttatcttccgcctgatgaaaatgattttcagaacgccttggattttgtgaatgcagatggcacttcagatcattcctacataaggtagtttataaggtgtgcatatcttgtgtgttttatgatagttcataaaatttcactagtaatgggaataacccagatacatagggaagcatgccatgttgcacaggtatgtaggattatgtgtgtggtggcgcccgttcataataccaggtctgttgctttgatgacgccacaaaaggggaaaatgtggaatgtgctcaggaaacatgaacttaaagagatatacatttaaagcacattgtttaaaaatagatttatgttttatcaatattaaaaagcactagaaaaaattatttacccctgaaaaattatgctgtcatggtttgggggcagtatttaatcattaattgattttcatattttagactttaragccagtcctaagtttataagaatttcataagttaaagcacatacagtgctcagaagggtgtctcatacatagaagcagtcgattcatgttagatgttgttgttattgtgattatttgtacatgaaacaattcatagaaacttttgcctcatggtatcactgaatgtcgaacaatgggaaagttaataataatgtaaaaaatcttcagtattttcttataacgagagcaatactatcatccttgcacgttggcctttgacctattgagttttcattttca

SEQ ID NO: 60582 - DNA, 815 bp, Homo sapiens
tttacgggttccttaattgaatacttgatattggagaaaaaatgaactattaagtcaaaataattatgtaaacaagctcttatcttccgcctgatgaaaatgattttcagaacgccttggattttgtgaatgcagatggcacttcagatcattcctacataaggtagtttataaggtgtgcatatcttgtgtgttttatgatagttcataaaatttcactagtaatgggaataacccagatacatagggaagcatgccatgttgcacaggtatgtaggattatgtgtgtggtggcgcccgttcataataccaggtctgttgctttgatgacgccacaaaaggggaaaatgtggaatgtgctcaggaaacatgaacttaaagagatatacatttaaagcacattgtttaaaaatagatttatgttttatcaatattaaaaagcactagaaaaaattatttacccctgaaaaattatgctgtcatggtttgggggcagtatttaatcattaattgattttcatattttagactttaaagccagtcctaagtttataagaatttcataagttaaagcacatacagtgctcagaagggtgtctcatacatagaagcagtcgattcatgttagatgttgttgttattgygattatttgtacatgaaacaattcatagaaacttttgcctcatggtatcactgaatgtcgaacaatgggaaagttaataataatgtaaaaaatcttcagtattttcttataacgagagcaatactatcatccttgcacgttggcctttgacctattgagttttcattttca

SEQ ID NO: 60583 - DNA, 811 bp, Homo sapiens
atgtgctatgcaatgtttaatttattccaatgagatatattcattagtgtttctttggctgcacatgggattttattttatgatggtgaaccaagaaaatattgtagactctgatactttcaataaattcttaggattattaaaaagaataaaggaaatcaaaatacataagaaaacatatggagttaaggaaagcaaccatgtttaaaaggcaagataacgatatcattgcatacagatcagacctcacttgcatggtgaaggtctgtaactgtcaaaggacatctgtaatagccagcagatagatacagtatggtgtagtgcattttattacttttatttgctttgtacaagtagaaaaatcaactgatgcaatcaaacagtgaagtaaatgaaaatatagtgcattcgatatagtgcatattgataaaaattatggattgtcaactcagtgagagactacaaagttaattcatcatagaatggtccccctcctcaaagatgtaaaaacaactggaacacaaattttaaccacagtttattacttttttttagmtaaataacgggaaaatctgtgaaaaaggcagttattaagcaagaacaactagagagaaagaataaacctgagaatttctatggatgtcttctaaacttaagcataattgatatatctactcatgtaaacagaatgggctaactgaaacaaaatcaggtgctaatcagaatttaccgattattgagctacaaagtatgttcggttaacagacttctatgtggaaataaaaacattgataaggaaatagtaggatcc

SEQ ID NO: 60584 - DNA, 811 bp, Homo sapiens
atgtgctatgcaatgtttaatttattccaatgagatatattcattagtgtttctttggctgcacatgggattttattttatgatggtgaaccaagaaaatattgtagactctgatactttcaataaattcttaggattattaaaaagaataaaggaaatcaaaatacataagaaaacatatggagttaaggaaagcaaccatgtttaaaaggcaagataacgatatcattgcatacagatcagacctcacttgcatggtgaaggtctgtaactgtcaaaggacatctgtaatagccagcagatagatacagtatggtgtagtgcattttattacttttatttgctttgtacaagtagaaaaatcaactgatgcaatcaaacagtgaagtaaatgaaaatatagtgcattcgatatagtgcatattgataaaaattatggattgtcaactcagtgagagactacaaagttaattcatcatagaatggtccccctcctcaaagatgtaaaaacaactggaacacaaattttaaccacagtttattacttttttttagataaataacgggaaaatctgtgaaaaaggcagttattaagcaagaacaactagagagaaagaataaacctgagaatttctatggatgtcttctaaacttaagcataattgatatatctactcatgtaaacagaatgggctaactgaaacaaaatcaggtgctaatcagaatttaccgattattgagctacaaagtatgttcrgttaacagacttctatgtggaaataaaaacattgataaggaaatagtaggatcc

SEQ ID NO: 60585 - DNA, 554 bp, Homo sapiens
tgtgcatccagagcatggtcgaggagtgtgggctctgcatggcacaatcctttggcttctcaccccatggcagctgggggagacatggctggaggacagtcagaccaaaggctcctcttggcccaacctgggtagtacttggagttaatgtcccctttgttgtaatgaataagtgggaatcaacctctttaactgcacgcttttcattcataccttctaggtggcagagaaaggtatttcaaaagagatttggaactagaaattcaagatccctagcttcatataaggcaagatatctgcaccttggtatcactaaggattatgyaacttgctctttgaattgcaagtgcagtcatctgatttcctgccccagtttccaatggtccaaagccaatgaagaaacagagcctgttttgtattccaaaggagacatcctaacagtgaaatattatctaacatagaaataactttaattaagaggagagaatacaagctcatatttcattgtcataaatttctttagaagacaaaataagcagaagtcagagaaatgt

SEQ ID NO: 60586 - DNA, 653 bp, Homo sapiens
atctcttcaattgttactcagagtcttgtgcagagctctctcttgaaggaagaattgtaaaatgtaacrgaatcataaaagaggttaagattcaccaaacagttatttttggggagagaggataattttacagaggaaggaataaaagccgaaagaggtgaaataacttgcccaaagtttcaaagtggagtctggccccagatcccaggttgttgagccccaagctccattgtgtgttctttgtcctgctgcctctttgttggccaataccacaccagggtcaagtaggatgcagttaactctagaactctgggcttctggtagtgaaggtcattaaacttgagtgacaagttgtgttgagtaaaaatgatcctagagttgaagaaatggacatgttattcatgtccattgtgacctgtgagaggtgtctgctgttgaaacgctttttattcagtaataatattaaaggagtattattgaggtatggaccaattgctgtggtagggactgtgaagtacaagttgtatatcctgcctttaaggcacttataatctggtgagattagcagagatagaggaatcattaagtaatattcaagatggtggaagcagggctgtgaaggtttgtctatgctgtggagtcctaaaggggat

SEQ ID NO: 60587 - DNA, 653 bp, Homo sapiens
atctcttcaattgttactcagagtcttgtgcagagctctctcttgaaggaagaattgtaaaatgtaacagaatcataaaagaggttaagattcaccaaacagttatttttggggagagaggataattttacagaggaaggaataaaagccgaaagaggtgaaataacttgcccaaagtttcaaagtggagtctggccccagatcccaggttgttgagccccaagctccattgtgtgttctttgtcctgctgcctctttgttggccaataccacaccagggtcaagtaggatgcagttaactctagaactctgggcttctggtagtgaaggtcattaaacttgagtgacaagttgtgttgagtaaaaatgatcctagagttgaagaaatggacatgttattcatgtycattgtgacctgtgagaggtgtctgctgttgaaacgctttttattcagtaataatattaaaggagtattattgaggtatggaccaattgctgtggtagggactgtgaagtacaagttgtatatcctgcctttaaggcacttataatctggtgagattagcagagatagaggaatcattaagtaatattcaagatggtggaagcagggctgtgaaggtttgtctatgctgtggagtcctaaaggggat

SEQ ID NO: 60588 - DNA, 1490 bp, Homo sapiens
atatattttgcaccaaatgggagattaaattttattgcctattttttttcaactttattgttctgttaatagcgtgaggatttcaaagactgagcttaataatttgtataaaactagatactagaataattctgtctctgtgtcagagtgaaaatataatgcgagaagagagaagagggctatcttagtaaatattgaaaatattgctgaagagtttcttttaataaaactgcaggtgggccgggcatggtggctcatgcctgtaatcccagcactttgggaggccaagatgggcggatcacctgaggtcaggagtttgagaccagcctggccaacatggcaaaacaccgtctctactaaaaatacaaaaattagctgggcgtggtggcgggtgcctgtaatcccagctgctgcggaggctaaggcatgagaatcgcttgaacccaggaagtggaggttgcagtgagccgagattgcgccattgcactccagtctggatgacaagagcaaaattccgtctcaaaaaaaaaaaacttgcaggtgatatatatatatacacacacacatacacacatatatatgatatataatgatactgaccttaatatatataaatgtatcacccacagtttaattaaaagaaacaaacctgaactagtaaaaccatacctgagacattgtggcttatatggttggcaaattagcaccattctgcaaaaatgacttgttatcaaaatgagcaattaaaaactaaaccacacatggggatatgttgcctctaattttctatttttgattaataatattttcaactggtttttgcttcttgtgttaaaatatgaaagattaaaaaaaaatgtgaagacattttaagctttttttcccctcatgaaaaagaatcctagaaaaaaaaaaagctagtcttaaactgttatctcccactgtctacaaatgacattttaatactttaatagggagtgatttacactatgtgataactgcatggattaaaatgggagataaaatcccaaagtacttttttaatctttatatccctgttactatgttggtttttagccaaagattgaatgaaacttctctagcaaaatagcaattgaatttctttaatcttttaaaatatgccccgagcatttacaatctgtgtgaaaaataatagagctacaattattttgtcatattatttgtttataacttatatagccccaaatcatctttttggcatttcaatacattttcacatgtgaaatatctggttatctttatttttttatttcatctttccactgaaatggacaccratgtttgtttaagctatgagtctgttgaaacccatcatcctgacagcatgtctaaaggttcacttatttattcaaaaaaaagttttaaatgcccaccacaagacacaccaagtggtaaagatacaactttgttttttgctaccagcagtagaaaacatagccagtgtctct

SEQ ID NO: 60589 - DNA, 760 bp, Homo sapiens
ggatcctcctgccttagcttcccgccttagccttyggagtggctgggattacaaggctcaagtcacagcacccagcatccctgaaatatttaaagttcctgatttttctgtgggtctttgtaattgctgttccttctacccctttgcctggtgaactctttctaatcatctagtattaacttagaaaactttttaattaggaaacctttcttggttacagtcccccctctccagttttgggttactgcctcctatatatgctcatcttacaacttatttttgcccctaaagtagcacttagtgagcattttaagaagttgtctatatctttcatttgtctgaaatctccttaaatagaaaataacagcatagtacttgatgtatagatgcttaataaatacttggactataaatggatgcatatcaactttgctcagtaaacaaccattcggtaactacttcctgccaagggccaggcagtaaatattttagggtttggggccataaggtctctgttgcttcctaaaggacaatagtcaagtctcactggtggctccaaaatatctatataagacagaatttgagttaaaacttggaatgaaaggagtaggggcgcagctctgggttagaggacattacttgaagatatctttacaggcacacagttattgtttccactgaatatctattttaggtagtttgggggtgggtctgtgggtgaagctaaaacagaaagcatcatccttgctatgaccactgc

SEQ ID NO: 60590 - DNA, 760 bp, Homo sapiens
ggatcctcctgccttagcttcccgccttagccttcggagtggctgggattacaaggctcaagtcacagcacccagcatccctgaaatatttaaagttccygatttttctgtgggtctttgtaattgctgttccttctacccctttgcctggtgaactctttctaatcatctagtattaacttagaaaactttttaattaggaaacctttcttggttacagtcccccctctccagttttgggttactgcctcctatatatgctcatcttacaacttatttttgcccctaaagtagcacttagtgagcattttaagaagttgtctatatctttcatttgtctgaaatctccttaaatagaaaataacagcatagtacttgatgtatagatgcttaataaatacttggactataaatggatgcatatcaactttgctcagtaaacaaccattcggtaactacttcctgccaagggccaggcagtaaatattttagggtttggggccataaggtctctgttgcttcctaaaggacaatagtcaagtctcactggtggctccaaaatatctatataagacagaatttgagttaaaacttggaatgaaaggagtaggggcgcagctctgggttagaggacattacttgaagatatctttacaggcacacagttattgtttccactgaatatctattttaggtagtttgggggtgggtctgtgggtgaagctaaaacagaaagcatcatccttgctatgaccactgc

SEQ ID NO: 60591 - DNA, 946 bp, Homo sapiens
aacttgtaaaacgttcccctccactayattcaagttttctaaacactagatttaaaaaaaacctccaagctctttctgttgttaaaactcaaagtcataaggtaacagtgaaaaactaatccactccttcccacttcctattctgtcagtcttgctgacatcaaccactcactttgatttgccattttgtttaaatgagaataatgtatcattttcagtaatacacagaaaatggagtctaaacaacagagataggtgggcctaaaaatgctccatctggatgcctcatttaaatgacaataagaggatttcttaaaagtataaatctataaggaaggacaaaatgggaagtgaaacaaaaacaataaaatattgaagcggaaagtcagaagaacaaatgttaaacatgagaaaaccaaataccaagctggcagggaggtaagccaaggagcaacctgatttacaacacagaactatttataccggtatttttagataccagactcaaactttgctgcctcatatgacaaccattagccacatgtggtttgttttaaagttaaattgataaaaatttagtttctcagctaccaagaacatttccagtgctctttagtgacaaactattgtattgagcagcacagatataaactacttctatcatcacaaaaagttccaatgaagttgaggtagaaggtgaaaaactgtaatacaagatctataggaacactaaaaaaaaaaaatcacacacaaaggaataaatttaatgaaagacaacagtgtaacattatccaaaggaaatcctacatgaatgaagggatatactaccatgttcatggattggaggaccctccttccaaattaaaataatatcaattccccctagaataaactatggcttcaatcccaatcgaaatacccgtcaaaccatttgtttgacaagctg

SEQ ID NO: 60592 - DNA, 946 bp, Homo sapiens
aacttgtaaaacgttcccctccactatattcaagttttctaaacactagatttaaaaaaaacctccaagctctttctgttgttaaaactcaaagtcataaggtaacagtgaaaaactaatccactccttcccacttcctattctgtcagtcttgctgacatcaaccactcactttgatttgccattttgtttaaatgagaataatgtatcattttcagtaatacacagaaaatggagtctaaacaacagagataggtgggcctaaaaatgctccatctggatgcctcatttaaatgacaataagaggatttcttaaaagtataaatctataaggaaggacaaaatgggaagtgaaacaaaaacaataaaatattgaagcggaaagtcagaagaacaaatgttaaacatgagaaaaccaaataccaagctggcagggaggtaagccaaggagcaacctgatttacaacacagaactatttataccggtatttttagataccagactcaaactttgctgcctcatatgacaaccattagccacatgtggtttgttttaaagttaaattgataaaaatttagtttctcagctaccaagaacatttccagtgctctttagtgacaaactattgtaytgagcagcacagatataaactacttctatcatcacaaaaagttccaatgaagttgaggtagaaggtgaaaaactgtaatacaagatctataggaacactaaaaaaaaaaaatcacacacaaaggaataaatttaatgaaagacaacagtgtaacattatccaaaggaaatcctacatgaatgaagggatatactaccatgttcatggattggaggaccctccttccaaattaaaataatatcaattccccctagaataaactatggcttcaatcccaatcgaaatacccgtcaaaccatttgtttgacaagctg

SEQ ID NO: 60593 - DNA, 1766 bp, Homo sapiens
tttggaggaaacacatacattcaaaccacagcagctcctaactttccctctggagacttagaagatggtaaacagatgaaaaagagggacacttgacatctgaaatcttgagcattggaaggagagatggtctagacactttcatatgtatggacttcagatatggtcttggcccaagatagtgttgtcgtcaatatactttcatcctttaatgcagagtattacaaaggaaatgtttgaattgtcattaaatgttgaaatcagtttgtgatttttaagtttctgtactaattttacaatctaatttgctgaaaatgactrtttcccctttccgaaaacactttatcttcccttttacagtatatatgatttttaacttaaagcttattctctactctgttctatctctcatgtggatattttgtgatcatattccaactttaagaggcaatctcatttttattcttttgagacagagtatcactctgtcacccaggctgttgtgtagtggtgcaatcttggctcaccgcaacctccatctcccaggtttaagccattttcctgcctcagcctcccgagtagctgggattacaggcgcccgccaccacgcctactaatttttgtatttttagtagaaatcgtgtttcagcatgttggccaggctggtctcgaactcctgacctcaaatgatctgcctgccttggcctcccaaggtgctgggattacaggcgtgagtcaccacacccagccaaggcaatctcatttttgccattgatctagaacacaatgaacacatgtacagaggttgcatttcagtgtggctttattttttgacaaactggattaagcagggagtaggacctcaatgaccattggaattgtcatgcatgtagaatcctacctcaacgttatttgcctgccctacaatgatgattcacattatttatcaccagataatttaactgtcaccatcacatataaatatctatttactttgttacccttttcaaagtggacacaagcccttccaagaagggatctcttaggtggcaagccttctctccttgaggatggggtaggctcacctggagaatccctgatctgtatcagtgagcagagggtatggagacaaatctcagtgggagggaatcccgccctgtttagctcggtaaacccttattgggcaacttccctgtgtgtagcctgcatagacaatggacactgtctttcagtagcttacagtccattgagaagagtcagctttagatgaaaatttacactagtttttctaagaggaaaacaagcaaggtacttcttccaagtgataagtcacctggcctctcttgggcccttcactcacttcacccaggagagagggagtgatttagctaacagtgaatttgggaggagaaacttgccatgtggatctcaggtccttcctttccaattaactggaggaagctgggtgcagggaagttgcccgtgttgggaggagttggcttatcacagccgtgactggggatgagcccgccaagttctggagtttggaattgtgaaacttcttgctcaaagcctccaacaacagcttcattagtaataaagatgatttttggccttattttcaatgggttcagtatctgttagggaaaggaatgtcatttatcagggccctcaaagatacctacagtaagaatacctacaacgggagaacagaaatgggacccctaacctagactagggctcagggaaggctttttaaagcatga

SEQ ID NO: 60594 - DNA, 683 bp, Homo sapiens
ataatccatcaagcccccatggttggatctgattttttttttaataggagaaggaaagagaaaaggagattagcatttcatctctataactaagctatgagccaataaaatgacattttcatacacattttaagagctagccatagtaacttaaggaaccatggttagaatcctctgacatcttattaaaaccctgagtgataatagagtactgtgatggttaaggaggttattggtctttaaagagaaaaatgctctctgaayactgattctgattgtttctgattaaggctatcccttaaacatgactcaagaaaaaaattgttactctggagcttttattattctccattattttatttctggatacctttatttttaatcaatttcattaaacagaatattctcattctcataaggattgctgtccaaaatgcaatttacaatcccattcagagatctggttgtccttaatgactttcagtggacaaatttgccatccccttcagtaggcagatgtgtagctgcttttagtttggatgtttcaaatcaggtagaattgcctgacattccccatctccagtgtctgtaaagttactatacagaggagaaagagaatttatagtgtgagcaatatcatcaagagttgatctataatcccctataaacaattggctttgaat

SEQ ID NO: 60595 - DNA, 683 bp, Homo sapiens
ataatccatcaagcccccatggttggatctgattttttttttaataggagaaggaaagagaaaaggagattagcatttcatctctataactaagctatgagccaataaaatgacattttcatacacattttaagagctagccatagtaacttaaggaaccatggttagaatcctctgacatcttattaaaaccctgagtgataatagagtactgtgatggttaaggaggttattggtctttaaagagaaaaatgctctctgaacactgattctgattgtttctgattaaggctatcccttaaacatgactcaagaaaaaaattgttactctggagcttttattattctccattattttatttctggatacctttatttttaatcaatttcattaaacagaatattctcattctcataaggattgctgtccaaaatgcaatttacaatcccattcagagatctggttgtccttaatgactttcagtggacaaatttgccatccccttcagtaggcagatgtgtagctgcttttagtttggatgtttcaaatcaggtagaattgcctgacattccccatcyccagtgtctgtaaagttactatacagaggagaaagagaatttatagtgtgagcaatatcatcaagagttgatctataatcccctataaacaattggctttgaat

SEQ ID NO: 60596 - DNA, 1812 bp, Homo sapiens
tacttttaggattcaaatggtcygttttaggccaactcagtttggctgcaagaaaatatgattgtttttatgaaattcacctgaatgacctctttatgatagtctataatgtatgctgtgtccacatctcagatgatgagaacgtcaccacttctatctggtataatttcagcagcaaaggcaaagaccatgaaaatttttccttcagatactccagataagtatggctgtctctttaggaaggcctggttctcgttcagtttcctctgcatgtctactatgccaactccctatctccctattaataatgcttagctgtaatattaatattgacttcaatttacttttattttattctaactaataacagtttctgtatacagaaaattgatgaaagtatttaaagaaagtgtcagatttattcagtgaccattaatctacctcttttgaaagtatacactgattaaactctgtaacacctaaatgtgtctgcctgtggcttgtggtttgtgtgtatgtgttaatctagaagagagaaaggaagaatagggtggctcagctcactcgggctacaataataaaataccttaggctgggtaatttataagtaacagaaatttattgctcacagttttgaaggctggggaattccaggatcaaagaaccagcagatttggtggttgacgtcttgttctctgtttcaaaggtggtgtctctttgctgtttcctgacatagcagaaggggcaaacagctctctcacactacttttgtaaggtcactaattccactcatgagggcttcatcctcatgataaaatcacatcctaaagacgctatcacattggtgatcaagtttcaacgtataaattttgaggggaacattcaggccttagcagaggggctaaaaaaccttgtgagtaataaatgagaatggaaaaagagctgtaattgatgcattctgataggacagtagcttttctaatagcttatttctgtacgaattaacatgaatactttaatgaatataggtttgtatggaaggggagagacataaaaggtggataaatcagtgtctgttaacactatagtcttaaaatttgatttaggcaaccctccaagtaaaaatttgaccacctaaaaagggaattatattttaattcaaaatatttctattgtatgtgatatttaaccatctgttacagataataaatgaggaaaatacaaacaatggataatcaaaaatattgtatatagatagtatcatgtggcattgtggctttggtttctaaacacttaatccttttcttcttgtagtcaaggtaaaattaaaataagcccctaactatgagaactcagtgaagatttagaatgattataaagtaaaggccccttggtcttttatcattttgggtaatttgctttatccctaactgcatacaaatatttgagtattggcagaatgtgtttaatgagaaaatattctaacaaaaattgtaggcatgaactagactttgaaagtaactaaaatatgctctttagctcagatttttaggcaaaaaaatcacagaaatgaagggatccttttcctgctaattacattcgctaaagccttctttacttccttattcctgaggctgtagatcagaggattcaatatggggatcaccactgtgtagaacacagaaaccactttgtcctgatcagggagtagctggaactaggtctcaggtaggtatagatggaggtggtgtagaagaggattatggctgtcaggtgagaggcacacgtggagaaagctctgtgcctcccctc

SEQ ID NO: 60597 - DNA, 734 bp, Homo sapiens
agacttggggtccaaagcctgaagaacctagagttctgatgtccaaggacagaagaagagagaggaaatatcccagctccagaagagagagaggaaatcacctctcctctgcctgttctttcaggcccccatttgattggatggtgccagctcacattgacagaggatcttccccactcagtccaccagctcacttgccagtctcctctggaaacaccctcacaggcacacccagaagtaatgccttcccagttctctagattttccttgattcagtcaagttgacacctaaaattaaccattacaggtatagagtggcttgaggttataggttataggatcttgaaagttatactaaggaattccacctttacacaataaataatgagatttcttgaagaagagagtgtcataatctgataggaagcgaataggacattcaagcaaacgggacaaatttgacagggggaaaatgttaccaagcacttacttgtcatgcaataaaaaatatgctaggagcttgacgtgcctaatcttatataatagtcacaagggccacatgagaaggaaggcactcctgctacccattttatagtatagaaattgaagcttagaaactgagttttggaagcaagaacactattttcataatttagataagaaataatgagggtctgaactaggacagaataaggcccragagaaatgaaaagaatgagtggtattttagagaa

SEQ ID NO: 60598 - DNA, 1261 bp, Homo sapiens
ctgtacacagattggactttttgaaggactttctgttttaacataaaccaagtttatggtgtcaatattacatttaaaatgcagtacaaagatatattctaaatccgaagaggccctacagagacagaaataataaaaatcctaaaaggcattacaaagattcagcttccatgagctaggggtaaagaggcagtgttataagggcaacaggacacccgtgtgtgaaggatactccagaaatagcactactttccttctcgcttttgtggcttgtggacaagaaggtcatctgatctctgccaaatatctaattatgatgctgaaataagattataccaagcctcctccatatggtaacactgattatgacactgactttttgaaaggtgtacctatttatgccctcatggtccatttctggttacccctgaatgtcacacaccttaggggtaatactatcaactgacatgaatatttgaatccccttgggtttagccatttcaaattatgactatgtaaaactcttcatctcctatccagaggttgtctgaaattcagagacttgctaagctttgtgtcttttaaatttttgtggacttggtcttgaaatcctactcttttaaccatatattctgccctggaaaagtaaatatacttttagttacataacaggatccatgaacactatctgtctctctctctctctctctctctctgtgtctgtctgtctgtctgtctatctatctatctcccccaagaaaggaagaaaaggaaaaaagacacaagacacaaaggcaacaaactttactatcccaaacttcccatacaccaaaataacagatttggttttgtttcccttaccagcagcacggtctagcctgaaagaacccttctttggagttggaaagaccaacgcttaaatcccagttctaccaggtgtctagccttaggtaattacttattctgtggctgaagtaccttatgagctaggaactcttacatccccatgctacaggtgaggaaactgaggcttatggaggctaaaaacttgaagattttacttagtgcagagctgagaygggatctaaagcctgtactgactctggaactgggactcttacccactggtctcctagtggcctcagttttctgatctgtaaaatgcagatagtagtatgacacaggaattaaatgggcctacgcaacatgtttggaacagcatctggctcacagcagtaatcacaaaataattaactctttc

SEQ ID NO: 60599 - DNA, 693 bp, Homo sapiens
tcctggtgtggtggtgtgcacctgtggtctcagctacttgggagactgaggtgagaagagggtttcagcttgggaggcagaggctacagtgagtcgtgattgtgccactgcaccccagcctgggtgacagagtgagaccctttctcaaaaaaaagcaaaccccaaaacatcacaaaatcaaagataaagttattacaaatttaaagccggcaaccaggagcattaaacacaaayggcaggctctgagtgcccagcctggcccaggcgtgcggccagcctcaccctgctcccacccgccttagggcccttgccatgctattccctctgcttggaacactctattcctgccctccttcctgattcactcccactcagacaccgcccctggggagcccaccgggatctttcagcccgtgtcacccctccagtgtcgtgtccctcacgtctgaagccccgtcccagcgtgtgcatttatttgtgtgctcctttgagtcatttctgtcccccagcccagactggacgggtcatgagaccagggaacagatttttgttcttccatctcagagtatccagggcctctcacagtgggttagtagtcagtgtggaatgagtcattaatgggatgaatggcccagaggaggggacgaaagagcagtgcagaggcccaaagtgtgaaggaccagttgtgtttgg

SEQ ID NO: 60600 - DNA, 807 bp, Homo sapiens
aagactgtattttgcagacagggtctttaaagggtcgactaagttgaaacaaagtcattagggtgggccctaatcgactggcatctttataagagaaaatgacacagacaggcacagagggaagatggatgtgaagatgcagggagaaggctactgtttgcaagccaaggagagaggctcagaagaaatcagccctgccgaaacctcgatctgggacttccagcctccagaactgagaaaataaactcctgttgtggaagtccccagcccagcctgtgatattttgtaatggcagccctaccaacctaacacagggtaatcttcctacatataaattctccctctgtaaaatacaattaaatgaattttttttttgagacggagtctcactctgtcgctaggctggagtgcattggcgcgatctcagctcactgcaacctcccttccagggttcaagtgattctcctgcctcagcctcccgagtagctgggattacaggtgcccaccaccatgcctggctaattttttatatctttagtagagacgggttttcaccatgttggccaggctggtctcgaactcctggccttgtgatccgtctgcctcaagctcccaaagtgctggaattacaggcgtgagccactgtgtcyggccaaaggagtattgttttaaagcgagcaagcgtaggttataagtggattgtacatgactcttcagggcttcaatacccagcactctgctatgttctcagcaagccctccataaagcctcaaatgctagtgaaagtcgtggccactacctaatgca

SEQ ID NO: 60601 - DNA, 616 bp, Homo sapiens
gtcttgggatagaatttctccaggagccccttctgacctccctgaccatcgtctaggctggagactcaccacatcctccccatgtgtcctgggcccccgcttcctcttagggctcagcagaggccggggctttcccagtttctcttctcttattagcagtgggatcattgcttcaaacagaatctttggaatttggttgatccagactttgactcaggcccatttattttgacgttccaaagaaatgtctctgagcctgcatcttgcctgtagggacaatgttttccttcctctaaaagttcctctcaaatccaaacaccagtccacattccctgaggctggtggattccacatcctccgaaagatgctccgttctaattctagttctgctacctcccagcagagtggccttgggckggttaccaacttctctgagtctcagtttcctcatctgtaaaatagacccctagctcatactcataaacaggccaccaaaattaaatgagataatggcatgacgatctttgaggcatgcgggaggcattcggtcatggaagcttaattgcaataagaggggaactgcgagccacccaaggtcctgcagactctgggatcc

SEQ ID NO: 60602 - DNA, 644 bp, Homo sapiens
ctctgtggctcggttttaccttctataaaacggaagaaataattgtaccaatctcataggggtgttgtcgggatgaaaagggttaacttattaaaatgcatttaactgtgcagggtacatagttaagtgccaaagaaaagtaagttaaagccaggcacggtggctcacgcctgtaatctcagcactttgggaggccgaggcaggcagatcacctgaggttgggagtttgagaccagcctgatcaacatggagaaaccccatctctactaaaaacacaaaattagccaggcgtggtggcgcatgcctgtaatgccagctastagcggggctgaggcaggagaatcacttgaacccaggaagcggaggttacagtgagctgagattgcgccattggactccagcctgggcaacaagagcgaaactccgttttaaaagaaaaaaaagaaaagtacgttaaaataaatgcagcaaacacttattgagtacctactgtgtgtcaggcctatgatagactccaggagttgatggaggcaaaagaacagatcccatccctcatggagctggtaactggatagatggttcactcgtgtgtcttgcgctggcactacctgcatgaggctccgctggcctacctggaggtcaaa

SEQ ID NO: 60603 - DNA, 351 bp, Homo sapiens
ttgacccatctgatgcacttatactataccagttaccctacgctaaaagcattggctttggaataacagttctgtttgcagtttctgaaactgagtgagtcccagtttgcacatttatgcagttaggattgacagcaaggattgtttaaagatgaaatgggattgtgagagataaatacctggcatacytctagcaccaacaaatggtggttcccttcccttcaccatctgtgccaccctttcttattaagctccccagttatttctaccaactcagttttctgaactttcagtttgcttgccatgttatttatttgaaagtacgtttacaaatattattgcatttgatct

SEQ ID NO: 60604 - DNA, 1426 bp, Homo sapiens
ttataaatgcctaaggcactataagagtttgagagaattgtggggaaaaatattaattagagcagattctacttgagactcattctcttgtttaatcaggaatctcaacagtctcttgtaaatcaattgaagacccttacttgtagggactaaactgaaagagataaacataaagtgataacacattctgggagctcaataaatggtagctattcatattattctggggctaggatcagccccaacacatagttggttcagaatattgtatattatcacattctcatttcactagaacatatttcacttcttcctttttctacaaaaaaaataaaactcatcatttctgttgtctagcttacattaaccaattaaccatgccctatagaatcagatgagacttgaccagtaaccagaacaacattctctacaggatgttacaacacctgtagaggatgtttaaaagcagatgaactgtgtgctcccattccaggaacagacaaatggcaattcactgagtccagcctggggtgcagccagtatagtctctaccatcatattttccagccttcaaaccttttgcaaaataaattctaagcagctcagtaatgcaaattatttatgaaggatccatgctccaaaaacacatatgcacatgaggaaagagcagtctcagctcaattgcattttccttcactcaagtaacatttaatcaagatacaatagctgaaggtcacaaatcatggatgatgacaccttcgtggtcctgaagatttctaattgttcccttaattccaataacaagagtttctccctcagtctcacagctgacgtcttgttcrgcagtttaaaaaacaaaaacaaaaacaaacctgtgtatcagtgagtacgtgttcagcattaagtaacaacaacaacaaatcactacccctgttggcaccattctcatatttgttatttatcaacaaggagttgggttggctagcaagctctatagcatcatcaaagacccatgctcctttcaatctcccactccatcatcctcggggtactgatttgcatcccaaggcattgcaggttcatggttacaagtggctgctaatcttccagagagagtatctttaaacgtcagcattcaaaactatttttatttgattcaattttttaatcagagatttaaaaaattttccccagctccccatatcccaccccctctccaacctagtagactttccatgcctctcactgtccggagatacatggtcgcccttagttcaatcactggtgatgtggaaataattatcatgatttgcttagatctattatgatttatgattcaccaactaaatcaggcaccttgtctctcaaacactgtcagggttctgacttcaagaaaggaaggctaaaagctattgagtaggcaacc

SEQ ID NO: 60605 - DNA, 1426 bp, Homo sapiens
ttataaatgcctaaggcactataagagtttgagagaattgtggggaaaaatattaattagagcagattctacttgagactcattctcttgtttaatcaggaatctcaacagtctcttgtaaatcaattgaagacccttacttgtagggactaaactgaaagagataaacataaagtgataacacattctgggagctcaataaatggtagctattcatattattctggggctaggatcagccccaacacatagttggttcagaatattgtatattatcacattctcatttcactagaacatatttcacttcttcctttttctacaaaaaaaataaaactcatcatttctgttgtctagcttacattaaccaattaaccatgccctatagaatcagatgagacttgaccagtaaccagaacaacattctctacaggatgttacaacacctgtagaggatgtttaaaagcagatgaactgtgtgctcccattccaggaacagacaaatggcaattcactgagtccagcctggggtgcagccagtatagtctctaccatcatattttccagccttcaaaccttttgcaaaataaattctaagcagctcagtaatgcaaattatttatgaaggatccatgctccaaaaacacatatgcacatgaggaaagagcagtctcagctcaattgcattttccttcactcaagtaacatttaatcaagatacaatagctgaaggtcacaaatcatggatgatgacaccttcgtggtcctgaagatttctaattgttcccttaattccaataacaagagtttctccctcagtctcacagctgacgtcttgttcggcagtttaaaaaacaaaaacaaaaacaaacctgtgtatcagtgagtacgtgttcagcattaagtaacaacaacaacaaatcactacccctgttggcaccattctcatatttgttatttatcaacaaggagttgggttggctagcaagctctatagcatcatcaaagacccatgctcctttcaatctcccactccatcatcctcggggtactgatttgcatcccaaggcattgcaggttcatggttacaagtggctgctaatcttccagasagagtatctttaaacgtcagcattcaaaactatttttatttgattcaattttttaatcagagatttaaaaaattttccccagctccccatatcccaccccctctccaacctagtagactttccatgcctctcactgtccggagatacatggtcgcccttagttcaatcactggtgatgtggaaataattatcatgatttgcttagatctattatgatttatgattcaccaactaaatcaggcaccttgtctctcaaacactgtcagggttctgacttcaagaaaggaaggctaaaagctattgagtaggcaacc

SEQ ID NO: 60606 - DNA, 599 bp, Homo sapiens
tcccacctcagtctcacaaagtgctgggattaccagcaagaaccactgcacccggctgccaccttcttgctatgtgctccatggtcttttttcagtcggcgcacatgcagagaaagagagcragctctcactccctttctctttttgtataagggcactactcccattatgagggtctgtccttatgacctcatctaacccaaattacctccccaaaacgccgtctccaaacactatcatgttggaggttagggctttaatatatgaattttgaggcggtggagggggatagaaatatgcaatccacaatagaaaggaagggatggagagctttttatttccttgattccctccctgtggaattggtttagactgactgcctccctccactgaaggtctcagccctgccaagcagcccattccacacaactctctctgtctctgtctctctttgtctctctctctctattgctgtttctttttctgtctctcacaacctctccctctccccaaaaactcctcctctcacccttccctgttctggtctagaggtggtaggagtgtctttattattactaatctcagggtacttgcctatg

SEQ ID NO: 60607 - DNA, 599 bp, Homo sapiens
tcccacctcagtctcacaaagtgctgggattaccagcaagaaccactgcacccggctgccaccttcttgctatgtgctccatggtcttttttcagtcggcgcacatgcagagaaagagagcaagctctcrctccctttctctttttgtataagggcactactcccattatgagggtctgtccttatgacctcatctaacccaaattacctccccaaaacgccgtctccaaacactatcatgttggaggttagggctttaatatatgaattttgaggcggtggagggggatagaaatatgcaatccacaatagaaaggaagggatggagagctttttatttccttgattccctccctgtggaattggtttagactgactgcctccctccactgaaggtctcagccctgccaagcagcccattccacacaactctctctgtctctgtctctctttgtctctctctctctattgctgtttctttttctgtctctcacaacctctccctctccccaaaaactcctcctctcacccttccctgttctggtctagaggtggtaggagtgtctttattattactaatctcagggtacttgcctatg

SEQ ID NO: 60608 - DNA, 599 bp, Homo sapiens
tcccacctcagtctcacaaagtgctgggattaccagcaagaaccactgcacccggctgccaccttcttgctatgtgctccatggtcttttttcagtcggcgcacatgcagagaaagagagcaagctctcactccctttctctttttgtataagggcactactcccattatgagggtctgyccttatgacctcatctaacccaaattacctccccaaaacgccgtctccaaacactatcatgttggaggttagggctttaatatatgaattttgaggcggtggagggggatagaaatatgcaatccacaatagaaaggaagggatggagagctttttatttccttgattccctccctgtggaattggtttagactgactgcctccctccactgaaggtctcagccctgccaagcagcccattccacacaactctctctgtctctgtctctctttgtctctctctctctattgctgtttctttttctgtctctcacaacctctccctctccccaaaaactcctcctctcacccttccctgttctggtctagaggtggtaggagtgtctttattattactaatctcagggtacttgcctatg

SEQ ID NO: 60609 - DNA, 824 bp, Homo sapiens
ctacacagatgcatggggagatctgagagagctgggagaaaaatatatcccaagggatacttaaccaattgcaaatgtgagtacattcccaggccacacacacacaatcaacagagagggtggaaagctttatggacttaagatgtttgagtccaagctctattcaaatcattgacacaagtgaaaccactaaaaagccagggtaaaaaatgaaaattaagattaaaaaacatgtccagagacatcagtggctgcataccacagagaaggcatatctttttttccctaattttatgttccaggggtacatgttacatggataaattgcgtgttgctgaggcttggtgtacaaatgatcccgtcaccgaggtaatgagtgtaataccggatagataagcctccaacccacctctgctctaccctccccacctcaagaagtcaccactgtctattgttctcacctttgtgtccatgtgtattcaatacttaactcccacttttaagagagatcatgcagtatttggatttctgttcctgcatgagttcacttaggataatggccttcaggtgcatccacattgctgcgaagtacatgagttcatcctttttatggttgcatagtattctgtggtgtgtgtataccacattytctttatctagtccgctgtcgatgggcttcttggttgattccatgtttagtatatatgatgataacagtataaggatggaggaggaaatggagctatagtgaatcaaatttgctatatttaataaagattaagtcagtgttaacctgtagtagattatgatgagttaataatgca

SEQ ID NO: 60610 - DNA, 731 bp, Homo sapiens
acttctttaccctggaaatggcagtccattccagcgacagcagattaatcaagtttgcaatttttccaatacttgcaaaacaagcttcattgcaatttctccaaattattgttaccagctgaattatacccctttctgaaaagtcagggtcctaaccctacggagccccttccttccaattcatgggggccagcatcagctgatcagcttctcttttttcgattctgaatttcaacatcacagaacctctcctccaagcttctaaatttcaataattcattttttttctcctcaccccttcagccctagtggtggtagctttttcccgcagttgctagctctgtaacaccttargaattcttttttgacccttagttcttccaagactagttatgaacatttcatattgaattctcatctttaaaatggctggtgtgattcgactcctgattgaatcttgactctgtatgggtggggaaggccaaaagtaagggtggtaacagtttgtcttatagttcacatgacctgaaatcccccttctggacttaatcaagaagactccatcacctaaagatcctggactatccacccgctgcagtgattggaagagacttcctgttatccaccttggagaaatctgagatcaaggtgttggcagggttggttccttctgagagatgtgagagaaatgctccatgcttctctcctagctggttgctgctggtaatctt

SEQ ID NO: 60611 - DNA, 1095 bp, Homo sapiens
taaacaagtgtaagagtaaggtgaaatactaggaggaaaattcactcctagtagaaaacaaaactatttgttaagtatctatatgtttgtagacaccttgaaaatgtccatctatttaacatccagttccaaaattagcttaaatggatgtatatgggccatagttggcctgagaccatagagagacgagtattgactaattttatgctcttacatactgattagagactactactgcaattttcctgaattctagttgtattaaactttagtataatgcagagtcctcagatatcagaaggtggtatacataagccatagattgctattaaatcttatttttagacatcatctctactcctcaaaaccatagctgcatttttatttatttattaaattgtatttattttcttctacattaagtccttaactcaaaggaataactagtatagcaagatttcagccccctaaattagtattccttaaaggaagtttatagataatcacactggaattacttaaatatatatgtcttaatctctagagtaaccattaaaaaataatacaaaaagagatcctgaaaaagcctatagagaaatagaaaraaaaaattttcgttaatctcaaagaaggaagaaaagcatgaacaaaggaataaatgaccaatggaacaaatagaaaataattaacaatgtcaacgtatattaaatgtaaatgaaccaaactcccaaataaaattgaagatacatagtctgaaccataacgtatagaatggaatctgtttctgcagctgagcccagcgatttaaaattttaacaaatatattagttttttatgtacaataaagtttgattatgatttgattattatctgagctatttctgagttgtgtttgcatatgatttagagttaccaaatcaccttctctccaagctatttgaatagggaataaaatatggatagtatcaatgaagttggtacatgtgtgccaggaaagtaatactgtaatattttaattaaaaaaactgaaaaatatgtatgtaaagttatggttgtagatttttgtaattataactaaaatactagtaatacaat

SEQ ID NO: 60612 - DNA, 955 bp, Homo sapiens
tgtgtatttctttcttctatcttacatttaatactaaactccagactatagatgatagtaaaataatagtacaaatgcaagcacatatgttaatattcagtcttgcaaaccttaaatgttaaagaatagtcattgagatttcatgacatgtgagttaatcttaaacagttggaattgagttgttacagaggagagaatactaactcaatatgggctactaggtggttttaaatggaatgtttaagtaattccaaaaatgctttacaatctaaaattaaagcttatgtttgtcacacgtgcaatctttgaaaggatttytggacctcctgtgcccagaattaaaggattaaggacacttaaaaatcattttataaaatataaaaataaaagtggagaatattaataggataaatcagaaactggactagcaactgaactcttcctactcacctacaatgtcctcactgaatcattgtaaagtcgactggtctattaatttatgtttttgtggtttttttttgtgtgtgtgtgtaacaaactgcatatgtactccttgaatctaaaataaaagttcaaaaagaattatgtttaaataaggaaatgttgtggtttaaaaattatgtagcataatatcaaacaagtttttctacttttaacacctaatttccagatataaaaaacaaaaactgtagtgtataaattgcggaatcaagattactttaaacgtctggattttcataaaattattcaaggactttcaaaaaatagtgcctatttagccaattccaaagggttaattaaaatgcaagtttgcaaaaagtataacagaagaaaggatgagagctctgttttatttacacttggcatgatatctttccattatgctatattatgtagtgtttgccttgatattcctagagatgtgtatacaggttatttctattagtaatttgaa

SEQ ID NO: 60613 - DNA, 1757 bp, Homo sapiens
cacaaataattaattaattttatattgaactagttgataggtcaactcacaatttttcttctgcaggtttcccctctgtcttacttgagatcaccaattatcactccctgtctgagctaaaaaaaatttaaaaatagcgtatattttacttctcttttttcttttcatttatatacatcatttcttctttctttcttcctctgcacctataatgtccaagatatcaagaaacgtgacctagattgttaattcttccacaaagatcaccagaaaatatttttatcgagttgagttttattaaacttattgcaacgaggaagaatgccatcttaaaagaattttcataatgtctcagaagttagggaaagagatgtatagagtctggggtctaggctcaagtggggttaggtggcttcttcagatgctccctgatgtatgatggggttacaatcaataaatccattgtaagttgaaaatattgtcaaagccagttaccatattttaaatttatgataggtacatcctcatgtaatttgattgtatattaaggagcctactgaatatgtattccttttgcaccagcataaggaaaaaagattgtaagtaaatgcatcttaagtcaggggccgactgaattgtgaaagggcaaaatgcacgtwgtaagaaaggtgtgacctaaagtgtagaaatttaacatggttataatcctttataaaatgagggattgtgtgtgtgtgtgtctgtggtgtgccttgaacttttctccctaccacctcgcatttagcatatagcacatataacatatagcatagtggaaagatatttatgccaagtgtaaataaaacagaactctcatcttttctactgttatactttgcaaacttgcattttaattaatcattctagaactggctaaatatgcactattttttgaaagttcttgaactggttgaaattgggcaaaattcattttatattttaagatcaggggacttcatggggcaataataaagcaagacgtttgccaacataagaaagatgttatctaaatggaagaggggtttgcccacattagaaaactgatcaaatacatttgtttgtaaggatttcctgatgcaaagaggcaaatggttaaggtaattattggtttagagcattactttccttgtaatgaatttcctggaataaatggttaagtcatgttgatacaggtggtcttaattctcagtcaattgtatctccttctttgaaatcttccttttctgctctctagttatcatttatattatttctccctttcatctggatgcttaaaattatttttacatatggttttctaaccttccattaaaactacctttatagtattttctctaatttgctagaaaaaaattttaaatggcaccttattctgcaattttcatagtcaaatcttggagtgtctccagttttgaagttaccaacaaggataaaatccaggctatgacaatagtcctcattatttggccttggtttgtttctccaatatcttccttagtcaaacatctacatataatttttgccctagtcataccaaacttagaacttcctcaaactccgtattaatttcaggaagctctgctttttggatattgctagttttccctaagataatgactatttcccccaagtgttaactacaaatctttcaatcctgaataactgctaatctttcataattagcaggtctctaaaacacatttgacagtagttacgag

SEQ ID NO: 60614 - DNA, 930 bp, Homo sapiens
ctctgttataaatgttctacatatagtttttcccaggtgtttcctgcctcaggtttgaaagtggatattaaatattggagagtagatttcttttcattccaattcacggagagggaacataattttcatccaccgctatctaacaaatgccctgataattggactgatggaccacgcccaaacaaatctcactggtttgggaaatgtgcagcattgcttaagttaagttcatgacactctctattccctatctctgtgggtgtggggtgtggaaagattactgctataggcccatcccctgagctatcggtgtgaccaatagatgaaacaccatggggtaagtgttagtaagacaacgatctagttcaccacccttaccagtctcctgggtaaaattgagaaatttggtcaattatgtgactcctgaacttactatcattcatacttatttttttatgttttgctcaatttgcttttttaaatcgtaaattcttaaattattaatgaaaatattgaatctataatatgaatcaaaactctgagcattctgtatagtcaaatgttctccctttgtgtagcttgggcctgcttttggttagaaactcactacagaaaaaggtatatgtggttgatttcttctgtaattattctataggaacaggagcagccttatttaaattagtgctattttaagatggagttayaaccctgtggagctgataagtactgcaagatgattttcttgtggagtattttcagttgaccttcagaaggtctctgctatgtctctctattcttaaattcttttacatctagcatgcttttatatattttttcctggtactcattttgactcattttttaggctcaaagaggtcacatctaggatttttctagtggtggaccttcacccttgcagacagcactgaa

SEQ ID NO: 60615 - DNA, 717 bp, Homo sapiens
taccctggagccttcagacggaggatggctctggcaacaccttttgattttacatttctgacttccagaactgggagggcataaaatctgttgtttttktttgtttgtttgtttgttttttttttgagatggagtctcactctgtcgcccaggctggagtgcagtggcacaatctctgctcactgcaacctctgcctcctgggttcaagcgattcccctgcctcagcctcccatgtagctggcactacaagggcccgccaccatgcccagctgattttttttattattatttttagtagagatggggtttcaccgtgttagccaggatggtctcgatctcctgacctcgtgatctggctgcctcggcctcccaaagtgctaggattacaggccttagccactgcgcccggccaaatcctgttgttttaagccactcagtttgtggtactttgttatggcagccccagaaaactaatacagcatctgatgtgtccatgttggctgtactaagacagggccattgagacttgcctggccgtcttctgtggacagctttctagatgcacctaagtcaagtccctgaggcccaccgagccattattctgttctgggtcaccccccatggcctcaccctcactgtcttgcctttcattaaacatgcacttgtgagcgataaaaaaaaaaagaatggaggtattgtacataaatatttgatga

SEQ ID NO: 60616 - DNA, 717 bp, Homo sapiens
taccctggagccttcagacggaggatggctctggcaacaccttttgattttacatttctgacttccagaactgggagggcataaaatctgttgtttttgtttgtttgtttgtttgttttttttttgagatggagtctcactctgtcgcccaggctggagtgcagtggcacaatctctgctcactgcaacctctgcctcctgggttcaagcgattcccctgcctcagcctcccatgtagctggcactacaagggcccgccaccatgcccagctgattttttttattattatttttagtagagatggggtttcaccgtgttagccaggatggtctcgatctcctgacctcgtgatcyggctgcctcggcctcccaaagtgctaggattacaggccttagccactgcgcccggccaaatcctgttgttttaagccactcagtttgtggtactttgttatggcagccccagaaaactaatacagcatctgatgtgtccatgttggctgtactaagacagggccattgagacttgcctggccgtcttctgtggacagctttctagatgcacctaagtcaagtccctgaggcccaccgagccattattctgttctgggtcaccccccatggcctcaccctcactgtcttgcctttcattaaacatgcacttgtgagcgataaaaaaaaaaagaatggaggtattgtacataaatatttgatga

SEQ ID NO: 60617 - DNA, 2706 bp, Homo sapiens
tgcacttaataaaagacaaaaatgagataagaggtcatgttggctgactttgggccagttgccctttgcattaagtcagatttaaggcagtaatttgctagtcattgtatcatgagccatggcccaaacacttgacagactttgaagatttgttattactttgccttatggaagcctaaaaagtcatgatcataaaacaattaacatttctgctgatctggaaaaaatgtcactcgaattgagatggatgttcctttttaaattttttctgttgtgggctgagtgtggttaaggtgagttttttgagatggcactttttagatatcatttcagtttaatattctatattcctcctgtggccagaaatactcagtaactccttaactttaactctgacatattatcagtgtgtcaagatggaaaccagttgctgctgaatctctggctcaagagatcgttaagcagatgctagaaacagaagccaggcttctgagacagacgctgggcagcggatactttaagctactgaatgaacataggatggctgtgttaggtagcttggaggtagtggtgaaggaatagctttttatagtcatgactgttgaggtcacctccatccctgaaattacatgaaaatttatgagcttcctaggcttttgttcttttgatgctcagacaggcttctctactctagattgaagtctcatgcattttccactaacttagaagaacagtatggcataatggaaaaagcattggtttccgatgagctgtgtaatgttaggtagatcacttagcctctctgtgtccttttctcaatggtataatggtataatagaagttgagaagatcaatcgtgctgacgtattttgatgctttgaacatttaaagtgctagacaacactggcttgtaaaataactgattactagcagaaagagaaggtttatgctgacttatttttcaaatgctctatgactcttctacagtgtttggtagactggctctaggctcagctttgtgcctatcttaaaaaaaagtacataatgctatactgattcattcttctcattgcctaggattacattagaaaataagctccatgaaggcaaatatttttgtatgttttattcacagatgtgtctaaagtgcttatgacattatcagacatacaataggtgatcagtgaatatttgtcaaatgacaaaataatttgaagtaaggaggcacaggcatctactgttgctcaccttttgactgtgtgtgtgtgtgtgtgtgtgtgcgtgtgcgcatgcgtaggtgctgaggtgggcatgataataagtatatatcgttacatatattctatctcactttaaatggtaaagttttcatctcttgatttccagtattgggtcaggtagcatctgcttaaaggacaatttcttcctgacattttaattcaagtttcaattcaaatcccactagttctggttgcgcctggatcaacgcattagtacactcagcttaatgataccctaccaagcttcctgaaagtcttacagagatacacaattaccaaaacccacctagggggcctgcacattgaaggaatcactaatgggatttgagagggagtgctgacaacacaatcagtctttaaacgaagagtttctgttggagctaaaatccagtcagagaagcaggaggtgattttatgatttatacaaatccacaagagcatcagtaataatttgaggctaactgaaacatgcaatgtccagtttctattgagtcctggaaagacattgcctggatttatctaggcaagtagacggggtcaaatgggatccatgagcatgtcatcaataatgtttacttatctgttatttaaggaattttaatgaaaaccaaattagatgaagtgaactgtttctaatctgatttccatgcatcaagctaagctcccctctactaaacaaaagcccaggaaatctaacaaaaaccaaataagtagtgatcagtaaactgtaagaaaactgtagtctgcagggtctgtgtcaactgctattttctttggcgctcttgattctcacttgcctcaagacacagacagctgttatatccacaggagaagaagcaactgatggagtgttctctctccttaggttagaaggaataacatctcaagactggatttgtcattgaaaggtttgagtatccctttaatttcgtagaatcattttcttctccacattactaaacccagcattttgtacaagtaaatttggaattattttagcatggcttgaaatcttaaaaytacagactgcacttgtatgatgctctgtcagctgcttcgaaaggaaggctctgtcaactgctattactattaaattttctctctgtttaataatttagcaaagtaacacgttcacagggtaaaaatctgagtagaatagaaagactcataatgaaacatagcagtcctcactcatcctttttctacactgagttttctggagacagtaggtttttctgccattctgttctttcctctcactgtatgattttactttttcttgatcaatcaaattctgttaattttatgctaaggaagagtttagttcatttaaactactctctcctaatatttatgcctggtatttgacttaccctattagttatcattgtactattaatacaataaactgaaacctatgtgtcgt

SEQ ID NO: 60618 - DNA, 722 bp, Homo sapiens
agggttatgtatgattaaggtgagggaagtgaggtattttcctcaggcacaaaatttaaggggaactccaaaaaaattcagtcataaagataactaacattttaatgcaatattttaaaaaaccaaagtcaatgcaaaaacactcaacgatgaacaagatcttaaataaagactagatcagtagtactaatttttcctttgcctcaggctccaatatggcttggcagaacaacacctgaaggttataacatttattctgcaggaaacaggaaaccattggaagttttcctcttttcattttcctataatagctatactattataacattaaatttgttttaattgccaaaaagttttttacttgaaatcttacaaataggactcttgtttgcaagagacaggaaaactagttacaacgggcttggccaataactacaggtaatgtactgacctacacagaattcaggctcagtttgatccagtggcttaagcratacctttagtgatcagtttctctccatcataaaggtattcattcttctactggctttcttcattaaaaaagatatggacagcattcctgagtctctcattctcaatcaaccaagtccagaggaaaagaaattgcatttctttctccaaaacctcagcaaaattatctgattggaatataaattcaaccatgagtctatccctgtgaccaggtgaatgggatgtgatga

SEQ ID NO: 60619 - DNA, 498 bp, Homo sapiens
agctaacagtgcagccttcagtctgtggcagaaggcccaagagactttggcaaaccactggtgtaagtccaagaaaccaaaaaccaaagaacctggattctgatgttcaagggtcggaagcttcgagcatgggaaaaagatgaaggccagaagactcagcaagtcagctccttccaccttcttccacctgctttttctaactgtgctggcagctaattagatggcacccatccagattgagggtgagtctgcctctcccagtccactgattcaaatgttaatctcctttagcaacacactcacagacacacccaggaacaatattttgcatccttcaattcaatcaagttgactcttaatattaaccattacagagtgtaagaagttatgagaactagtggaggaagcaaagaataacaaaactttttatgcacaatatactattatctgttattatattactatgtgytttttgtttgttccaacagttttcataaa

SEQ ID NO: 60620 - DNA, 973 bp, Homo sapiens
aattaagtcaaatggttcccatgttcaaataagtttaaataagtaaagtaaaatcttaaataaataagctggcttcaaagttattgataaaataatattaggaaagtcttgagaattgtcaacatacttttttaaatttattgatcaagtggctttatatttatctctgccagatattgtaacatgttaaaatttggcaaaagagttataaaactataaacacagcccaaacagaatgatcgcagtttgtatgatattgataagtaagacatttaatattagttccatgaaaaaagctaaatctgttttatcaacaaaatgcccatatgtttaagcttcttacttagatatgcacctaatagctactaattaccacatttgtgtaatatctttttttataagtaatcaaaattaatggatagacattggaagattgggtgcatrtaaatgaaatgaatgctagttggtaaaagttttgcttattgacttatttattaatttttgagacaggatttcgctctgtcacacaggctgaagtacagtgtcatgatctcagctcactgcagcctctacctccccagctcaagcgatcctcctgcctcagcccccccaggtagctgggactacaggcccacaccaccatgcccagctaaatttttttttgtattttttgtagagatggggttttgtcatgttgcccaggctggtctcaaactactgaactcaagtgattcacctgcctcggtctaccaaaatgttgtgactacaggcgtgagccactatgttttgtatactttaaaatcttaaaatcattttgtatgcttatttgttgtctgggtcattttcaattaagaaaggttattgtatgtgcaaaatgttccaaaaattgtgaaatgattctaatctataaaatgctaatatcttaaaagtagttcagaatttcttgctttctaagtttatataaagtgtgcaa

SEQ ID NO: 60621 - DNA, 973 bp, Homo sapiens
aattaagtcaaatggttcccatgttcaaataagtttaaataagtaaagtaaaatcttaaataaataagctggcttcaaagttattgataaaataatattaggaaagtcttgagaattgtcaacatacttttttaaatttattgatcaagtggctttatatttatctctgccagatattgtaacatgttaaaatttggcaaaagagttataaaactataaacacagcccaaacagaatgatcgcagtttgtatgatattgataagtaagacatttaatattagttccatgaaaaaagctaaatctgttttatcaacaaaatgcccatatgtttaagcttcttacttagatatgcacctaatagctactaattaccacatttgtgtaatatctttttttataagtaatcaaaattaatggatagacattggaagattgggtgcatataaatgaaatgaatgctagttggtaaaagttttgcttattgayttatttattaatttttgagacaggatttcgctctgtcacacaggctgaagtacagtgtcatgatctcagctcactgcagcctctacctccccagctcaagcgatcctcctgcctcagcccccccaggtagctgggactacaggcccacaccaccatgcccagctaaatttttttttgtattttttgtagagatggggttttgtcatgttgcccaggctggtctcaaactactgaactcaagtgattcacctgcctcggtctaccaaaatgttgtgactacaggcgtgagccactatgttttgtatactttaaaatcttaaaatcattttgtatgcttatttgttgtctgggtcattttcaattaagaaaggttattgtatgtgcaaaatgttccaaaaattgtgaaatgattctaatctataaaatgctaatatcttaaaagtagttcagaatttcttgctttctaagtttatataaagtgtgcaa

SEQ ID NO: 60622 - DNA, 973 bp, Homo sapiens
aattaagtcaaatggttcccatgttcaaataagtttaaataagtaaagtaaaatcttaaataaataagctggcttcaaagttattgataaaataatattaggaaagtcttgagaattgtcaacatacttttttaaatttattgatcaagtggctttatatttatctctgccagatattgtaacatgttaaaatttggcaaaagagttataaaactataaacacagcccaaacagaatgatcgcagtttgtatgatattgataagtaagacatttaatattagttccatgaaaaaagctaaatctgttttatcaacaaaatgcccatatgtttaagcttcttacttagatatgcacctaatagctactaattaccacatttgtgtaatatctttttttataagtaatcaaaattaatggatagacattggaagattgggtgcatataaatgaaatgaatgctagttggtaaaagttttgcttattgacttatttattaatttttgagacaggatttcgctctgtcacacaggctgaagtacagtgtcatgatctcagctcactgcagcctctrcctccccagctcaagcgatcctcctgcctcagcccccccaggtagctgggactacaggcccacaccaccatgcccagctaaatttttttttgtattttttgtagagatggggttttgtcatgttgcccaggctggtctcaaactactgaactcaagtgattcacctgcctcggtctaccaaaatgttgtgactacaggcgtgagccactatgttttgtatactttaaaatcttaaaatcattttgtatgcttatttgttgtctgggtcattttcaattaagaaaggttattgtatgtgcaaaatgttccaaaaattgtgaaatgattctaatctataaaatgctaatatcttaaaagtagttcagaatttcttgctttctaagtttatataaagtgtgcaa

SEQ ID NO: 60623 - DNA, 973 bp, Homo sapiens
aattaagtcaaatggttcccatgttcaaataagtttaaataagtaaagtaaaatcttaaataaataagctggcttcaaagttattgataaaataatattaggaaagtcttgagaattgtcaacatacttttttaaatttattgatcaagtggctttatatttatctctgccagatattgtaacatgttaaaatttggcaaaagagttataaaactataaacacagcccaaacagaatgatcgcagtttgtatgatattgataagtaagacatttaatattagttccatgaaaaaagctaaatctgttttatcaacaaaatgcccatatgtttaagcttcttacttagatatgcacctaatagctactaattaccacatttgtgtaatatctttttttataagtaatcaaaattaatggatagacattggaagattgggtgcatataaatgaaatgaatgctagttggtaaaagttttgcttattgacttatttattaatttttgagacaggatttcgctctgtcacacaggctgaagtacagtgtcatgatctcagctcactgcagcctctacctccccagctcaagcgatcctcctgcctcagcccccccaggtagctgggactacaggcccacaccaccatgcccagctaaatttttttttgtattttttgtagagatggggttttgtmatgttgcccaggctggtctcaaactactgaactcaagtgattcacctgcctcggtctaccaaaatgttgtgactacaggcgtgagccactatgttttgtatactttaaaatcttaaaatcattttgtatgcttatttgttgtctgggtcattttcaattaagaaaggttattgtatgtgcaaaatgttccaaaaattgtgaaatgattctaatctataaaatgctaatatcttaaaagtagttcagaatttcttgctttctaagtttatataaagtgtgcaa

SEQ ID NO: 60624 - DNA, 973 bp, Homo sapiens
aattaagtcaaatggttcccatgttcaaataagtttaaataagtaaagtaaaatcttaaataaataagctggcttcaaagttattgataaaataatattaggaaagtcttgagaattgtcaacatacttttttaaatttattgatcaagtggctttatatttatctctgccagatattgtaacatgttaaaatttggcaaaagagttataaaactataaacacagcccaaacagaatgatcgcagtttgtatgatattgataagtaagacatttaatattagttccatgaaaaaagctaaatctgttttatcaacaaaatgcccatatgtttaagcttcttacttagatatgcacctaatagctactaattaccacatttgtgtaatatctttttttataagtaatcaaaattaatggatagacattggaagattgggtgcatataaatgaaatgaatgctagttggtaaaagttttgcttattgacttatttattaatttttgagacaggatttcgctctgtcacacaggctgaagtacagtgtcatgatctcagctcactgcagcctctacctccccagctcaagcgatcctcctgcctcagcccccccaggtagctgggactacaggcccacaccaccatgcccagctaaatttttttttgtattttttgtagagatggggttttgtcatgttgcccaggctggtctcaaactactgaactcaagtgattcacctgcctcggtctaccaaaatgttgtgactacaggcgtgagccactatgttttgtatactttaaaatcttaaaatcattttgtatgcttatttgttgtctgggtcattttcaattaagaaaggttattgtatgtgcaaaatgttccaaaaaytgtgaaatgattctaatctataaaatgctaatatcttaaaagtagttcagaatttcttgctttctaagtttatataaagtgtgcaa

SEQ ID NO: 60625 - DNA, 1129 bp, Homo sapiens
tgcaaaattaggtcagagacacccatcgagccaaaacatcctgggttaacccaactattttctccacttctgtatccaggttacagattacttacagggaaaatcaagtgggcagactggcaccatcagagtcatggtctttggatatcaatggtccctcaataattagtctgtttctccagtccattctcactccatttccacacagtggctgtttttaatcatctctggtatttctgtggtctctctcatcctatatttcttagaaaaacttttactcatccttcaagtcagctccagcactaacttcactgtgaagtttccctgatgcttcagactcaggaatctctaagattcctcaattataataactgtggaattaaattgtaactttttgctaatttgtttttacattaggctttaaactctgagagtggccaggcacagtggttcatgcctgtaatcccagcagtttgggaggcagaggcaggagggttgcttgatgcctagagttcaagactagcctggacaacatagtgagaatctgtctctacaaaataaaaaattagccaggcatagtggtgcatacctgtagtgttagctattcggaaggcggaagcaggaggattgcttgagcccaggagttcaaaggtgcagtgagttacgattgtgccactgccctccagcctgggtgacacagcaagaccttgttttaaaaaaaawttttttaaattaaaaatccccggtcatctaatggttaggggaaaaaaaagttctgacagtagggctcacgtcctagtcctcatagccccagcagggcttggcagagtgaatacctaaacgtatttgttaagtggaggaacaaataaacctatgaattaatggatgctttgagcatattatttagtcccttaattttcattttccagatgaataaactactgcccaaggagttaggtaacttgcttacagtcacacagccatcgatagagctggaatttgtatttcctgtctgccagcactactgccaggttctgcttcagtccttccttgaagacttctagtgataaggagcagttacggtgaaattcacagaatgctacctgacctctgggtaattcttcccttt

SEQ ID NO: 60626 - DNA, 2198 bp, Homo sapiens
aatttttcttacacagcaaaaccaaaagccccacaatggaaaatcattttctgttcactgattgttaaaaacttttttwaaaaaaagtcctgtgacatcaagtgcttgccaggatgtggcacagtagaaactcttaaacacttggtgggtgtttaaattgctacaaccagtttggaaaacaatttgtcattacccagtaaagttgaagatgtatagatcatgtaatagttttacagaccaaaaatatagaaactctggtacctctgcagaagaagacatacagtaatattcacagtggccatttgtaatataaaaaactgtaaacaatccaggtgtttattgattgatttttctaacatgtgacttatttctggtctttactagctttggggccatttggatcacacgatgttttttcaagattttagaccctttctaagtagcagtccactggaccaagataatagagccaatgaaaggggtcaccagactcacactgacttctggggagcaagacctccacggttgccattgggtcggagatacagatctcgaggaagttctcgtcctgacagatctccagctattgaagggtgagttgttttattttaagttctttttaaggtagtttcaatgaaggacaaattggtataatctaatctttataagggtctcatacttattacctttgtggacaagatggacatatgtagaaaggatgaaagtgaagctaaattgaatgttagtactcacccgatgataaaccagagagtgagaaatgctatgtctctgattaacatttttattaatggctcagattaatttatagatgatatgtgtctcagtccattttgtgcagctatagcagaatacctgagactgggtgatttataaagaacagagattcatttcttatatttctggaggctgggaagtccaaggttgagggatccacatctggcgagggctttcttgctgtgtcattccatgttggaaggcagaagggcaagagagcatgcatgagcaagaaagaaaggtgccaaactcatccttttattaggaactcactcaacaataactaatccacttccaggataaaggcatttaatccactcacaggagattcatctcttaaagtctccacctttcaacactgctccactggggattaagtttccaacacatgaatttttgaggagggcacattcaaactatagcagtatatttatcaaaatttcaaaagggtatcaaatatattaggcattaggattaaatatttcaacagattggaacagtggacttaacatgaaatttaatcaagtatctgctttttgtgaagaaaggaaaaaaatttaataggataaatatgaagtcttgtgactgtaaaaacattcatgtaataaatgtttgttgagtgtcttttgtatgggacactgtactagacactaggaacacaatgatgagtcaaatagatggttttgctcatggatctcatttagttggaataataaacgttaattttaagtgtttaccatatgcagaggactgtgcttcatgctttatctgctttatgttgtttaatttgtgtgaagtaataggtgctattgctgttttcattttataaaataattaactgagtctcagagaaataaagtaacagccattggtggatctaagacttgaatctagggctatatgaatctagtgcgacattgtcttatatggtagctgctagccacatgtagctatatgtttacatttaagttaaccaaaagttaataaaactcaaaattcaaagtacctcaatcccaaatagctatattttgagtgctcattggccacatgtagctaatacttatcatatttgacagaacatattatagaaaatttccattatcttagttctattgaacagtgctgttctagagcctacactccccctttcccccaacacacaccttctaggctttattaacattttactatacttgcgttattacatatctatccattagtgtttctttgttaaacttgtttgcttttggttcctaatatatgcactatcatactaagaaagtttaattttattcataatttattaggggcttttaattaagaatgactaatgattttgtcacatgccctttgcagtcctatcaaaatgaccttagagtttttctcccttaaacagttaatgc

SEQ ID NO: 60627 - DNA, 1075 bp, Homo sapiens
gaaataggggggcagaaaacagcgggacagattcagggtgatctcccctctaggcctgccacccgtggagtttctgttttactcggtaaggacttgggaacctttcctgggcacgagtagtcctctttccatcaatacacatagaaaaggagttggaattgtacgtcgcrtttaatgctaggggtcctttccagctgtcagactgagggagaatatttcaatgtacagaaaaattcagagcattacaaagggctagcaaacaaacagatctgagccactgagggtaaagtgagagagaattgacttccaagccaccaagcctctcttttggacacggaaggggtgtcgtggcccagctgtgcaagctgacagtggttgcagctggcaggcacggggagtggcagcttcacccaggggacaggagcctgcccccttgggaggaggggcgagcaagctgttttggcttgtttggaggaagagggaactccaggctttccctgggagtgaaggagcaggccacttggctcaaggaggctagggctagaaaatggttcttccctgtggagctctgcgcccagtccctgggatcctttcgaaacagcagtggagtgctagaaagaagctgctgggaaaccccagctatgtcagctatatcaggtgttgtcactgtgagcttttagaaaaagttaaggttcttaaaatggttgttttctagtttttagcttttattgaaagcggatgttaactttatttttctaaaccaaattcgcaggataaaattttgtcacttaggttctgttactaccttgaaatgcaagctaagtctttgagttctaggatttattaaattaaattttttgataccttacttttttgttttgtgagatggagttttgctcttgttgcccaggctggagtgcaatggcgcgatctcggctcgctgcaccctccgcctcccaggttcaagcgattctcctgcctcagcctcccaagtagctgggattacagatacctgctatcatgcctggctaattttgtatatttttggtagagatggggtttttcaccgtgttgg

SEQ ID NO: 60628 - DNA, 1815 bp, Homo sapiens
tgcatacacagacatatacacacagctacagacggctggaagccctgccttctgcagcacataaacacaaagagtgatactaagtgtgctacaatgaaaacacaatattcagagtctagaaggatttgatggaggtttaraaaaagtaatgcaatgagctaaaactgagtcccacacttggttaaattttctcttttttaaaatacgagatgcctcatgaatttgcatgtcatcctggtctaagaaccaagataatctttgtactgttctaattttagtatctgggctgtcaaagctaacacttagtattagcatttaaacaaatctcgctgtagggggaagtaaatccaaacttgaacacactttaaacgtttccagtaggtttcctttcaactccatccacttggcaataggaatgtggaagggaaggctgcctatggggttagtaattttagagccttaacttcaaagattctgctggcttaaagatatataaaatgatggccaattcaagagatatttaaaactgatcggtgaagtggtgctgtaaggggaatttatgaattaagtcattatgtataagcacaaggacttgggatatgactttaaaaggaaatataaagtctactgctatctgacctagtcagaaataaaggattccattttagccttcccagatgtgtcagtaatgaccaagagagtactgacttctaatcactggggcaagcagttgggctggtataggacggaacagcccctgctaatgtgagaacccaactcatcaaaggctaaagcagaaggcaacagaggaaagtaccctgctagtgtccaaaaaaaaaaaaaaaaaaaggacatcattatgtccagagagtctagagctctatgttctgaaaccattaataaagtaaacacatgtggacatgaatgtgtatgaaaaccctactaaagtctttcctattgattaccctgtcaccttcacggcaaggcatgaccacaaatctcagcaatacaagctcatcacttctggcaaagggaagagaaatgcattttcagcttttctaaatgaacaaaataattaatgtggctgattcagattgaaaaggaggggaaaaaaaaaagaaaaaaaaaaaaccactgcccaagaatgagtaagagtgctgtggattgagctgcagccaagggctctaggcttgccatgcacactgcctgtgggggagccagatgcagaaggaagtgacgatgcactggggtgggggcaggagcgccaggtacaaatctgtgggatgggaagtagaaagatggacaaggtcggccaccctcccagtggttatggggacagggaaggcaaacggaccaggtgctcagggaactgccttgaaacaaaacctggtcaaccaattcaagggtaaaaatgtggagcacagacacatgtgggcaatatttatggtggagtaagtctgtccccagtagtctctgtgtcccatgggggcaatgactatgaagtcacttcccttttggaagccgacctttgttagaacagaactcataccaaagtctctctggagtcctctataagccaccccctttcctacatggtgcgtgtgtgtccatgaatgtgtgtgaacatgcatgcgcgtgcacacacacgcacgcgcacacatgcacacgcacaaacacgcacacgcgcacacacgcacgcacgcacacacgcacacacaccgcctttcttcctaagtctcagctttaggagccctgactcagaggtgcgcttaccgagtttcaatagccagccttctcggtctggattgaagaaag

SEQ ID NO: 60629 - DNA, 1815 bp, Homo sapiens
tgcatacacagacatatacacacagctacagacggctggaagccctgccttctgcagcacataaacacaaagagtgatactaagtgtgctacaatgaaaacacaatattcagagtctagaaggatttgatggaggtttagaaaaagtaatgcaatgagctaaaactgagtcccacacttggttaaattttctcttttttaaaatacgagatgcctcatgaatttgcatgtcatcctggtctaagaaccaagataatctttgtactgttctaattttagtatctgggctgtcaaagctaacacttagtattagcatttaaacaaatctcgctgtagggggaagtaaatccaaacttgaacacactttaaacgtttccagtaggtttcctttcaactccatccacttggcaataggaatgtggaagggaaggctgcctatggggttagtaattttagagccttaacttcaaagattctgctggcttaaagatatataaaatgatggccaattcaagagatatttaaaactgatcggtgaagtggtrctgtaaggggaatttatgaattaagtcattatgtataagcacaaggacttgggatatgactttaaaaggaaatataaagtctactgctatctgacctagtcagaaataaaggattccattttagccttcccagatgtgtcagtaatgaccaagagagtactgacttctaatcactggggcaagcagttgggctggtataggacggaacagcccctgctaatgtgagaacccaactcatcaaaggctaaagcagaaggcaacagaggaaagtaccctgctagtgtccaaaaaaaaaaaaaaaaaaaggacatcattatgtccagagagtctagagctctatgttctgaaaccattaataaagtaaacacatgtggacatgaatgtgtatgaaaaccctactaaagtctttcctattgattaccctgtcaccttcacggcaaggcatgaccacaaatctcagcaatacaagctcatcacttctggcaaagggaagagaaatgcattttcagcttttctaaatgaacaaaataattaatgtggctgattcagattgaaaaggaggggaaaaaaaaaagaaaaaaaaaaaaccactgcccaagaatgagtaagagtgctgtggattgagctgcagccaagggctctaggcttgccatgcacactgcctgtgggggagccagatgcagaaggaagtgacgatgcactggggtgggggcaggagcgccaggtacaaatctgtgggatgggaagtagaaagatggacaaggtcggccaccctcccagtggttatggggacagggaaggcaaacggaccaggtgctcagggaactgccttgaaacaaaacctggtcaaccaattcaagggtaaaaatgtggagcacagacacatgtgggcaatatttatggtggagtaagtctgtccccagtagtctctgtgtcccatgggggcaatgactatgaagtcacttcccttttggaagccgacctttgttagaacagaactcataccaaagtctctctggagtcctctataagccaccccctttcctacatggtgcgtgtgtgtccatgaatgtgtgtgaacatgcatgcgcgtgcacacacacgcacgcgcacacatgcacacgcacaaacacgcacacgcgcacacacgcacgcacgcacacacgcacacacaccgcctttcttcctaagtctcagctttaggagccctgactcagaggtgcgcttaccgagtttcaatagccagccttctcggtctggattgaagaaag

SEQ ID NO: 60630 - DNA, 715 bp, Homo sapiens
gttcatatgccaaacctcagggacacacaatatacccatgtaacaaatctgcacatggacttcctgtttctaaaaatcaacaaagattgtgagacctgcccagtggccagctggctgtgtatcttctccaccaatgaggctgcattacttcatcctcctctccctgggagggggagcaggggtgargctgttaatggccacagtggctgactcacctcatggcgagaggaacctctctcatctgacttctttcccagccttggtcagatgactccacattgaatctggcatttatttcccgaggcaggaacctagatccagtttgcctcgagtcaggatagaccctttatccaggggctaaccagaaatcacagggcacagtgaaccactcagctctggctggctgtggccagtgagtgaccgcatggcctgagcgggccacctcctcctggaccgatgactcagtctcacgtgtcgagtcgggcaccaggagactcatacagagttggccctgtaattttcttctacattcctcttctccaaaaggaaaaataaacatacaacccttcgttacaaattttaattcccggttttctgtaacccagactcatgcctcgcttttctcggagacagacataagtagaacatcgctgcagatgctcacggtgtgtacacccaaccaagtcttaatcagaccagaggcggtcctctcttc

SEQ ID NO: 60631 - DNA, 689 bp, Homo sapiens
cagaaaatagctataggtctagtggggaaagttatatatctaattttgattttttttttttttgagacggagtcttgctctgttgcccaggctggagtgcaatggcgcgatcttggctctttgtaacttccacctcccgggttcaagcgattctcctgcctcagcctcctgagtagctgggattacaggcatgcaccaccacccccagctaattyttatatttttagtagagacggggtttcaccgtgttggccaggttggtctcgaactcctgacctcaagtgatctgcccaccctggcctcctaaagtgctgggattacaggtgtgagccaccatgcccagctagttttgaattgtttaaggccacccaaacatttaccttatgaagttataggatttggaataaatgttacaggagtaattctactttctcatcctgttcctcacctggaatgtcacataagtctaaacggagaaaaggacccgaagataaaggaacagctagaacaggaagtgcgagcataagaattcaaacccagggagctggcacaatgagtgccccgtgcccaggacaatggaggccacttgtgtctgcttggagccccaggcaagccatccacatttccatggcacaggggtgcagtcgatgagctgcattagtccttcgctgggctgtgtttctattagt

SEQ ID NO: 60632 - DNA, 471 bp, Homo sapiens
ttttgttttgttttgttttgtttttagagacggagtctggctgtgtcgcccaggctggagtgcagtggcgcgatctctgctcactgcaagctccgccacccgagttcacgtcattctactgtctcagcgtcccaagtagctgggactacaggcgcccgccacctcgcccagctcatttttgtatttttagtagagagggcgtttcaccgtgttatccaggatggcctggatctcctgacctcgtgatctgcccgccttggcctcccaaagtgctgggattacagrcgtgagccaccgcgcccggcaggttcaactgtatttttcattgtgcttggttggaggcaagctattcatctggaagagtatataagttatatatgacatattcttagtgagaaataaacatgtattgaatatacacatagcaacacagctggaattggtatagttcggtgttagtgaaaaagaagc

SEQ ID NO: 60633 - DNA, 1306 bp, Homo sapiens
gtggagtcaaaatttctcaaaagaaggggaaaagttaaaaagtgatgtaatttaaatttcactcaaaatttatttcttttagcctattacattatttacttacctagagtataataatgcatgcatattataataattatagctaatgtaaaactgagattattaaaatattagataaatatggatcacttttaagacagaacattaatttaaggaaataaaatatatttgttccttctcaagttgactatgctcaatttattgtttttagcagctgcattctagctattagcaagcacaattgagtttagtgacagcacaaatccagaaggtcatttacataaaatagaagtgagatattctgaaacataaatcccagagtatgcagaaatgaaaaagaaagcttgatgaataattctttctatttaattaagaatgattcaacatctacaaacagaaaaaaaaatcgatctgtcttcaaattatgtcacttgtgaggaataaaccaattytcaaagcataatatagagaagaaacattgcattgtttagagagcatattagctactttgaattccagagaattaaaacaaagaccatgcactgacatgcagctctcacgtaatttcaaatcataatttatctctacacagtcaaactcagaaatgtccccgtccccacagctgataactgacttcatcttcataagcactgtatgtatgtagtttatatactgtgtatataaacacagacacaaaatatctgctcttatttgtatatatcatttattttggagcccacaaataaatgatagacattttgtggatatatacactgggcatatatccacaaacaattttgtaagtcatactataaagccttcagaatgccagtatgcagacattttcctaatgtattctacaattattaaactttaatttgatgaaaagtgatatacaagggaaagaatagaattgtgacatggaaatcagttccttgcaaaaattgaatctggtcactgttgttaaattttgaagtatgatctaaagattaaactcaaaaaatattgtaacatttgttatcttaacatttaatagattcctttttccctactatatttggtttctactcctgccgtaacaacctaagattatgtgacttaaacagtccgaatagtcagaaacactattcgggtctcaccagtttattataatcaaggtgttgccatggctgcattctttttcaaaaaaaattaatttttgtggatacatagtaggtgtatatatttacagggtacatgagatgtt

SEQ ID NO: 60634 - DNA, 1306 bp, Homo sapiens
gtggagtcaaaatttctcaaaagaaggggaaaagttaaaaagtgatgtaatttaaatttcactcaaaatttatttcttttagcctattacattatttacttacctagagtataataatgcatgcatattataataattatagctaatgtaaaactgagattattaaaatattagataaatatggatcacttttaagacagaacattaatttaaggaaataaaatatatttgttccttctcaagttgactatgctcaatttattgtttttagcagctgcattctagctattagcaagcacaattgagtttagtgacagcacaaatccagaaggtcatttacataaaatagaagtgagatattctgaaacataaatcccagagtatgcagaaatgaaaaagaaagcttgatgaataattctttctatttaattaagaatgattcaacatctacaaacagaaaaaaaaatcgatctgtcttcaaattatgtcacttgtgaggaataaaccaattttcaaagcataatatagagaagaaamattgcattgtttagagagcatattagctactttgaattccagagaattaaaacaaagaccatgcactgacatgcagctctcacgtaatttcaaatcataatttatctctacacagtcaaactcagaaatgtccccgtccccacagctgataactgacttcatcttcataagcactgtatgtatgtagtttatatactgtgtatataaacacagacacaaaatatctgctcttatttgtatatatcatttattttggagcccacaaataaatgatagacattttgtggatatatacactgggcatatatccacaaacaattttgtaagtcatactataaagccttcagaatgccagtatgcagacattttcctaatgtattctacaattattaaactttaatttgatgaaaagtgatatacaagggaaagaatagaattgtgacatggaaatcagttccttgcaaaaattgaatctggtcactgttgttaaattttgaagtatgatctaaagattaaactcaaaaaatattgtaacatttgttatcttaacatttaatagattcctttttccctactatatttggtttctactcctgccgtaacaacctaagattatgtgacttaaacagtccgaatagtcagaaacactattcgggtctcaccagtttattataatcaaggtgttgccatggctgcattctttttcaaaaaaaattaatttttgtggatacatagtaggtgtatatatttacagggtacatgagatgtt

SEQ ID NO: 60635 - DNA, 1335 bp, Homo sapiens
tggtaaatacctgccaatggctcccaatggctttgattacttgaatcatcattcttctatttgaytttgtctttcctggcagtttgcacatacagaacattcaggtgctgacgcgctgcgtttcatacatgtgatagctaacgttcactggaaggagctactgggaatgccatcagaatagtttgcatttagctccttcacaactcaaccttgattttctagtggacaaatatatcaaattagaaattgtagatgtatgcaatgagaagaggacaggagaaatcgaggataagtacggaagtgtttttgtgattcttccaccaactcctggagacagatagtttctttcatgtgacagtggaagccagatgacagactcagctggagctgacagcccttcctccctggaaagccccagaacctctttcagtagaaaacaaccacaatatttccagcaaattccaaagaaaatcctgccacttctttggagttgaccaaaaatgtcacattctatctataaaaccaaaggctttcttccaataaatagttccaagaggaaagggagccttttattcttgctgatctgctctgtcttcttgtttggcttgcttataaatgtaggcttaactgcaggcaccacaatttattaattcatttaactaaaaaccaactatttgttaggtactgtattggtccaacaatcaaaaaacattaacaaacatatttatagggattactatttgccaagcattattccaagtgactaaaccatgctaacttgtgcagtcctcataagaaccccaagaagaaggtactgtcactatgcctgttttacagatggggaaactgaggttcagagcaattaattcatttggccaagtaataagagccaggattctaaccaaggctctggcttggagttgttgctcaagattacttcaccatgctgtctccccttgcagccagtgcctgcttacaaagaagttctagattcatggggaagacaacgaagaagcaagaaacaacaaatcggattgaattgttttgtacactgctgtatccccagcacctaaaacagtacccaagtgcataagcagggactgcataattatttgtggaatgttgttgcaataaatactatgaagtaaactgattggatgagatgagagactgtcacgggaacctacttaattcatatgcagtggtgagggagggcgtctctgacagatgacatttaagctaagacctaaaggatgaaaacaagggaaccatgaaaagagtgtggaagagcattcaggcagagggaccagtatggtaagaggccctgaggtcagg

SEQ ID NO: 60636 - DNA, 1335 bp, Homo sapiens
tggtaaatacctgccaatggctcccaatggctttgattacttgaatcatcattcttctatttgactttgtctttcctggcagtttgcacatacagaacattcaggtgctgacgcgctgcgtttcatacatgtgatagctaacgttcactggaaggagctactgggaatgccatcagaatagtttgcatttagctccttcacaactcaaccttgattttctagtggacaaatatatcaaattagaaattgtagatgtatgcaatgagaagaggacaggagaaatcgaggataagtacggaagtgtttttgtgattcttccaccaactcctggagacagatagtttctttcatgtgacagtggaagccagatgacagactcagctggagctgacagcccttcctccctggaaagccccagaacctctttcagtagaaaacaaccacaatatttccagcaaattccaaagaaaatcctgccacttctttggagttgaccaaaaatgtcacattctatctataaaaccaaaggctttcttccaataaatagttccaagaggaaagggagccttttattcttgctgatctgctctgtcttcttgtttggcttgcttataaatgtaggcttaactgcaggcaccacaatttattaattcatttaactaaaaaccaactatttgttaggtactgtattggtccaacaatcaaaaaacattaacaaacatatttatagggattactatttgccaagcattattccaagtgactaaaccatgctaacttgtgcagtcctcataagaaccccaagaagaaggtactgtcactatgcctgttttacagatggggaaactgaggttcagagcaattaattcatttggccaagtaataagagccaggattctaaccaaggctctggcttggagttgttgctcaagattacttcaccatgctgtctccccttgcagccagtgcctgcttacaaagaagttctagattcatggggaagacaacgaagaagcaagaaacaacaaatcggattgaattgttttgtacactgctgtatccccagcacctaaaacagtacccaagtgcataagcagggactgcataattatttgtggaatgttgttgcaataaatactatgaagtaaactgattggatgagatgagagactgtcacgggaacctacttaattcatatgcagtggtgagggagggcstctctgacagatgacatttaagctaagacctaaaggatgaaaacaagggaaccatgaaaagagtgtggaagagcattcaggcagagggaccagtatggtaagaggccctgaggtcagg

SEQ ID NO: 60637 - DNA, 653 bp, Homo sapiens
agcctaccgcagagcaggacagaacactcccacatccctggccctggcctgagcagagatgtccagacacttccccaggcacccgcaacccaacactcctccctgtcctttcaacacggtttggctgggagtatagggaggctcccagcaaagtcaccatgactggcacgagtaaccttacctgcatgttccaggacagcactaaccccttcaacaaatgcagtttgttgtatttttcaaaggagaacaaattttcctggtggtggagattgcatttttcatgtgcgtttttgctggtatagaaataatacatataggttgcaaaagaaacttggatgaaatagaaatatacgaagaaggaagtatcatcactcctgtacagsgttgaatagtgctcccccatgatttatgtccatccagaacctgtgaaagtaacctgtgaatggaaataggattattgcagatgtatcaaattaacatgaaccctgaatccagtattactggcgttcttacgagaagaggaaaatttggacacaggcacacaaggcagaatgccaggtgatgacagaggcaaagaatggaatactgcagctacaaaccaaggagcaccagggattgccgcaaaccaccaaaagctaggaagaagcaaggaa

SEQ ID NO: 60638 - DNA, 1024 bp, Homo sapiens
tgccaaatattttagtattagaagtcatctcaagaccttaactccttttaaatcttccttatgcattttaattttgttgtgaatataagaataccttagctgtattttaaatattatactaaatgctctcaacttaagtaaatttgtttcttatttgaaaatcttgccattttcactctctcaatgggtagaaataattctgtgagttgactattttaacgtcataaacagaatgctaattattattgaattcatccttaagcaagctattccagtatggtaagactattgaagcttatccacatcacaattctattgcttatgtaggtttagtcaaataatggcaaagacgctctaaacctgtgtcctagtcacagtaagccaggttatcttcagagtaggctcagcattatggtttccttgtgtattaggtcaaatgggcaactcttttcttaccatgttcattttaaaagcccaccattctatacaaatttacttccagcatttccgtgactgaaggtttaaaacaatccaaccttgaaaacagccattagtgttaagtggtctctcagttcaacaaacaagatgtaccaacccataaatgtctaaaatcggagtgatgttgaccagtcatttgttctgtttcctggtaagttaactaccaatgttctgtgttttaaaatctaggacaaataataatgatcttaattttgagttctacccgggatcattttgcacaaataaaatttagctttcttagctattagcacaaaactcttctaccacattctattcatcttaataaataaagttggtcagaatctaagcaactaaaaaaattacataaaaagcaaaggtttaktttgctaccaaaaccaatgaaagatatagatgttacagtctttctgtgggaaatggataaaatacaaaagcaaaacaaatagaaccaggaactggtaatgaccttgctagaatggaaagtcatgtcagtattatctaaattgatatacaagcacagaaaagg

SEQ ID NO: 60639 - DNA, 1550 bp, Homo sapiens
agttccttccagtggaagatttttcactcatcactgtcttcagcgccatccctgggtggaatgtggcataatagcagttcattttcagcttgtacccacrtaccaagacaacccacctttgaaccaacctcaggctttttttctgtactaccagatctaaataaaatctgtttggggtccttttttcttttattctggtaggtatggaaaagaatgctttctcagatcagcgggcatatactacataataagaatttgtgttaatgcggtctggtaaatatatcacaactggcatagcaactgcagttggggctacagttggttaaactccagtagtcctttgttacgttttgatctatagaatttttgcaggaactacactggtgaagtaagtgacggaaatgatggggatcatcacccctgcatgttggcctttcccactgtattagttcactctcgcattgttttaaagaaatatctgagactgagtaatttataaagaaatgaattttaattggctcaaggttctgaaggatgtacaggaagcatgaggctggcatctgctcagcttctagggaggcctcaggaaacttgcaattatgttggaaggtaaagagtgacgaggcatgtcacatggccagagcaggaaaaaaagccgggggaggtgctaaaagtgaaggtgaaggtagaccagctgagactggatccatgattagctttttcccctccccaccaccctttttgcttcacttttaaacaaccagatctcatgagacctctctcaccatcacgaggacaacaccaatgagatagtgctaaaccattcatgagaaatctgcccccattatcaaatcacctcccaccaggcccccctccaacattgggaattacatttcaacatgagatttaggtagggatacacatcaaaactatgtcacccatgataaatgcgattactctataggttatggcaccaatacgggaattctgccaatggttaagggtatttatgctgattatatgttcagaaaccagaaaaataacagctgggtagaaatatgaaatggacctgaacaagggctctattgattatcacagaattacctgagactgggtaatttataaagaaaagaagttgaattgatgttacagttccacaggctatatggaaagcatggctgggaggcctcagaaaaattacaatcatggcagaaggcaaaggggaaacaagcacatcttaccacggcagagcaggagagagagaaccaagagggaagtgctacacacttttaaacaaccatatctcatgagaactcactcactatcatgggaacagcaagggggaaatccacctccatcatccaatcacctcccacaaagtccctcccccaatattgggaattacaattcaacatgaaatttgggtacagagccaaaccatatcacagagtaacatatgttcttactacagtgggggccatagtagttccttgggccttctggtttcaatgtcaaagtaaatgctgtattcaacagatttctaaagatct

SEQ ID NO: 60640 - DNA, 547 bp, Homo sapiens
aaataggttaatcttttacctatgattgcatttgtactatgtcactttaccctctggttagcagattgawttaggagaagatgttacttttttaaagttctttactttgcggcccagtgaaaacttcaatagagaccaacaaaacttccttttagattggcctgagttcacaggccaagaaacaaaggggtgttacattttaaatgttatgtctccccaaaatatgttaaaagggctctactatcatgaatgggattagtgttcttataaaagaaactccagagagtcaccttgccccttccaccacgtgaggacacagcaagaaggaactatctagaaaccagaaagccggcatgagacaccaaatctgcaagtgtcttgatcttggacgttctagtctccagaactatgaaaaataaatttccattggttataagccacccagttgatggtatgttgttatagcaacctgaatgaaaaaaagacaagaggtaaagtgatacctttaattcagaaacatctgaatcccagttcagatctcaatata

SEQ ID NO: 60641 - DNA, 547 bp, Homo sapiens
aaataggttaatcttttacctatgattgcatttgtactatgtcactttaccctctggttagcagattgaattaggagaagatgttacttttttaaagttctttactttgcggcccagtgaawacttcaatagagaccaacaaaacttccttttagattggcctgagttcacaggccaagaaacaaaggggtgttacattttaaatgttatgtctccccaaaatatgttaaaagggctctactatcatgaatgggattagtgttcttataaaagaaactccagagagtcaccttgccccttccaccacgtgaggacacagcaagaaggaactatctagaaaccagaaagccggcatgagacaccaaatctgcaagtgtcttgatcttggacgttctagtctccagaactatgaaaaataaatttccattggttataagccacccagttgatggtatgttgttatagcaacctgaatgaaaaaaagacaagaggtaaagtgatacctttaattcagaaacatctgaatcccagttcagatctcaatata

SEQ ID NO: 60642 - DNA, 736 bp, Homo sapiens
tctgatcactgcccragttccttcaataatactgtctctgtattttgtgccaggcttgggtcacaggaatatctgtagctggttcacgttgctgacgcatagcagagtaattctgagtcctagcccatcgtcatggtattgcttgagaatagggctcagggtccccaactataggatacaaggattatttgttctatttcaggaaaatctctctcatgcaatcttaatcttaacccaccactaacatccagattagactctttcccccttagaatttattgttattggtgtgtttaatattctggaaaaaaacctcacaaattaggtagctttactccgtcaaggtcatatgacacaagaagtaaagaaactttaatttcttgagtatatagaacctgagtagaaaacaaaacaaaacaaaatcataagttgaaaattaatgtagctcattaataaacatttctaacttaaaatataaatatacggtgttcaaaaatcattgtttttgttgttaatattattttcccttgcatttttattcaaagtcaagaaaagtttcttatctttacaattttaggcataattgtgacttcctactgttactggttgtgtgtgtagaagggagaatatgaagaatattttccttcgtacttctaatttttcagtttgggaatttgcttatctatcttaggtagaaaaatatatttaaaaatggctacattcacacattgaacca

SEQ ID NO: 60643 - DNA, 736 bp, Homo sapiens
tctgatcactgcccaagttccttcaataatactgtctctgtattttgtgccaggcttgggtcacaggaatatctgtagctggttcacgttgctgacgcatagcagagtaattctgagtcctagcccatcgtcatggtattgcttgagaatagggctcagggtccccaactataggatacaaggattatttgttctatttcaggaaaatctctctcatgcaatcttaatcttaacccaccactaacatccagattagactctttcccccttagaatttattgttattggtgtgtttaatattctggaaaaaaacctcacaaattaggtagctttactccgtcaaggtcatatgacacaagaagtaaagaaactttaatttcttgagtatatagaacctgagtagaaaacaaaacaaaacaaaatcataagttgaaaattaatgtagctcattaataaacatttytaacttaaaatataaatatacggtgttcaaaaatcattgtttttgttgttaatattattttcccttgcatttttattcaaagtcaagaaaagtttcttatctttacaattttaggcataattgtgacttcctactgttactggttgtgtgtgtagaagggagaatatgaagaatattttccttcgtacttctaatttttcagtttgggaatttgcttatctatcttaggtagaaaaatatatttaaaaatggctacattcacacattgaacca

SEQ ID NO: 60644 - DNA, 779 bp, Homo sapiens
ccaaactaacagggtaaaacatttcactgttaaaaagtttttaaagacttgtacacttcctcatgtttcttcaaatttatttttgccgacttttagtcatgattatataaggactttgttatgtaaatttatttatatttatatatatagattaaagaataatgaagaagtttaagcaatttatatatttaagttttggcatatcatcagcaaataatgtgattatccatttttaaactatcatagaacaaacatacagaaatatctttaaaatagatgaatagcctaattaaatattgttaattgaattcccatacaactgttactcaggtcaagaaatagaatattgcattataatttggcttttgaaatgtagtcatcaaaattattatataaaaatacaattatataaaaatacaaaaaaattatataaaaatataatagttgtgtgtatttcaaaacacaactattataatgcttgctttaatttctaagcaatctttgaaatatttcagctaatatattcttcgaagaaagagctttcacaagtccttgttctctctgtagaaaacctgaaaacttgatttaaataatttaaaaaccgtcttgctttgtctrttaaaaacatctaggcacccatcgtagacaatgttagtattaccaggataaccatttattgtaatattgcaggtcaaaatcaatgatacctcacattagtttttcattgtgatgggaagttattaatgagtagctgctaaagtgccaacctgataataagt

SEQ ID NO: 60645 - DNA, 533 bp, Homo sapiens
gctctcctggtgatttttatagagtttttttcatcgttaatccatttatgaataaatgctgtcagttttgataactctttcttattgtctataggtaaracagaaaacctttagcattgtataaaagtcttccttattttttactgtgacctctttctttcttttgatctctaatatttagtcgcatgggaacaccaactgttaactgaatttccatttttccatgcctttgcaaatgctcttctgtctggagggcctttcctgccacaggccttgcactttagatttaattaaaagcttttgctgaaaaagaggtcaaacctgtaatgatctacctcaaaggtgttgttgtctgaaatttcttggattacttccctctaaaaaaaaagcaggattattaatcctgacatctctggtctgccaaagcactttgttcatatttgttaaagctgtgatttctcacattaaatatctttattgtcttactcagtttgccacttagaatgtaacgcagtcagtatagaaacaaacca

SEQ ID NO: 60646 - DNA, 1002 bp, Homo sapiens
gtgtctttatagctgaatgatttataatcctttgagtatctatccagtaatggtatatacccagtaatacacccagtaattgctgggtcaaacggtatttctggttctagacctttgagggatctccacactgtctcccacaatgattgaactagtttatactctgaccaacagtgtaaaaacattcctatttctccacatcctctccagcatctgttgtttcctgactttttaacgatcaccattctaactggcgtgagatggtatctcattgtggttttgatttgcatttctctaaagaccagtgatgatgagctttttttcatgtttgttggccacataaatgtcttcttttgacaagtgtctgttcatatcctttgcccactttttgatgggattgtttgttttaaaagtggacatttcccttctttaagtcttctaagaatcttccagattctgatgttacacattggatctcatttttttcttcagtcctcactactgagttcattgtgaaaatgtatacttttttgcctgttatgggtaggctttgtgtccccacccaaattttatcttgaatcataatccccatcatccccacgtgtccagggagagaccaggtgggaggtgattggatcatgggggtggtgttccccatgctgttctcatgatagtgagtgagttctcatgaaatctaatggttttataagtgtctgacagttcctcctctcacccatgctctccctcgcctgccaccatgtaagatgtgtttattccccttccgctatggttgtgagtttcctgaggcctccccagccatgtggaactgtgaatccgtttaatacttcttttctttagaaattacccagtctcggtcattgcaaagaaatgagcaagaaaccatggcaggcatrtgcccaatggtacaggcaaaaccaatatggcaggcaaaaaagtagagacacaggaaagaaagttgcacaacgtactctagttattgat

SEQ ID NO: 60647 - DNA, 782 bp, Homo sapiens
taaaatgggaaatgatccttcattatccaggtgagctcaaagtcatcacacatttccttataagagggaggcaggaagtcagagtcaaatatggagaattgatgmcagaaaaagagctcggagttgtcttgcagcaatccaagaaatgcgggtggcttctaggatcttgacgaggcaaggggttttttgttttgttttgttttgttttgtgttttttcctagagcttccacagggagtgcagtcctcctgataccttgatttcagccaggtgagatccatgtcagatttctgacctccagaactgaaacatgataaattgacattattggaagccactgagtttgtggcagtttttacagaagccctagctgactcacacagacttaactctagaatatcttcgttgagatcagttttgtctatggtgcatcctttaaggatgacaagagatgacttctgcatgccttggtacctatgagtgttatgactcctgaaataatacaaagaaaagaacacacacacacaccaaaaaatgtaactgtctttaagccacgtagtcatgtctagccatatagtcatgtcatgcatgactagccatatagttatgtgactctatttggctaggacaatgtagaactgaattactaggcaaggaaaaaataaatggcaaagtgtaagaaaatggaagggtccttgcaggattcactgtgggttggaagctttgtacaaggagatactctctcctctcctgaagagaatgaatggccaggcatcttcagga

SEQ ID NO: 60648 - DNA, 782 bp, Homo sapiens
taaaatgggaaatgatccttcattatccaggtgagctcaaagtcatcacacatttccttataagagggaggcaggaagtcagagtcaaatatggagaattgatgacagaaaaagagctcggagttgtcttgcagcaatccaagaaatgcgggtggcttctaggatcttgacgaggcaaggggttttttgttttgttttgttttsttttgtgttttttcctagagcttccacagggagtgcagtcctcctgataccttgatttcagccaggtgagatccatgtcagatttctgacctccagaactgaaacatgataaattgacattattggaagccactgagtttgtggcagtttttacagaagccctagctgactcacacagacttaactctagaatatcttcgttgagatcagttttgtctatggtgcatcctttaaggatgacaagagatgacttctgcatgccttggtacctatgagtgttatgactcctgaaataatacaaagaaaagaacacacacacacaccaaaaaatgtaactgtctttaagccacgtagtcatgtctagccatatagtcatgtcatgcatgactagccatatagttatgtgactctatttggctaggacaatgtagaactgaattactaggcaaggaaaaaataaatggcaaagtgtaagaaaatggaagggtccttgcaggattcactgtgggttggaagctttgtacaaggagatactctctcctctcctgaagagaatgaatggccaggcatcttcagga

SEQ ID NO: 60649 - DNA, 782 bp, Homo sapiens
taaaatgggaaatgatccttcattatccaggtgagctcaaagtcatcacacatttccttataagagggaggcaggaagtcagagtcaaatatggagaattgatgacagaaaaagagctcggagttgtcttgcagcaatccaagaaatgcgggtggcttctaggatcttgacgaggcaaggggttttttgttttgttttgttttgttttgtgttttttcctagagcttccacagggagtgcagtcctcctgataccttgatttcagccaggtgagatccatgtcagatttctgacctccagaactgaaacatgataaattgacattattggaagccactgagtttgtggcagtttttacagaagccctagctgactcacacagacttaactctagaatatcttcgttgagatcagttttgtctatggtgcatcctttaaggatgacaagagatgacttctgcatkccttggtacctatgagtgttatgactcctgaaataatacaaagaaaagaacacacacacacaccaaaaaatgtaactgtctttaagccacgtagtcatgtctagccatatagtcatgtcatgcatgactagccatatagttatgtgactctatttggctaggacaatgtagaactgaattactaggcaaggaaaaaataaatggcaaagtgtaagaaaatggaagggtccttgcaggattcactgtgggttggaagctttgtacaaggagatactctctcctctcctgaagagaatgaatggccaggcatcttcagga

SEQ ID NO: 60650 - DNA, 1712 bp, Homo sapiens
gtttgctgcagccatcaactcatcatttacattaggtatttctcctaatgctatccctcccccagccccctatcccccgacaggccttggtgtgcgaagttccccgccccgtgtccatgtgttctcattgttcaattcccacctatgagtgagaacatgcggtgtttggttttctgtccttgtgatagtttgcttttaaatgcattgtacaagtgattcttaagcaacctataatttgagaattgctgctttcccaattaaattggttccaatgccactttcagttttacattctaaggggactttggagattcagtgacgattttgcgatattattcccagatctcttggctaattgcttgctatgttttcatagagggactcacgaaacatgaatttgaatgctcacaacacccccacaggaaagatcagttattagaaatgcatcactgatttgcctgaatatatttctaaagggaacacaaaggcaggaaaagaaacaatttaaatcctataccaatttgtacatgctgaacaacttatatttcttaatcagactcaaagycactcattattatataggtccagcgttctatcaagaactgtcttcatttcccagggctgcaataacaatgtaacacaaactgagtgggattaaaaactgaaattaaaaaaaaaagatgctcaaaacattctgaagaccaaaagtcagaaatcaaggtgtctcagggctgcactcaacattggaggccatgggggaggatccttcctgcctctcccagctcctgggagcttcaggtgtcctgggcttatggtcgcattcctccagtctctggctccatctccacatggccttctcctctgtgtctatgtctcctcttctgtctcttagaagtaccctggtcattggatttagggccaccttaatccaggatgatagcatattaatttgattatgtctgcaaaaattctatttccaaatgtggccacttttataggtccagagtgggtatatatgtatgtatgtatgtatgtatatgtacatatatatttgtggaggggaccatttgacccagtagaatgaccttcagtgtaaaaatataaccaaacatttgcataattttagacaagtttgaaaataatgaatgagtacttattttacagaggtaaacattttaggaaaaacatattcttataggctgacagtgtagctttatgacaaaattagtcaggagcttgtgcctatgtgcacttgtgaatgtggtctttgcacattggatcggggtattggtggatagccatggttcgtttccttttgccaggaggatacatttcctagcactctacaaagctgctctgagtgtaccattgacctttccataaatctgttattcttctcacattcctctccacagactcttttttccctccaatggtatttgtagaaggaagacacagaaatctattacatcttctttactttaaccttttagttatgtagtttttgtcctcctctgtagtgagataccattcctactctaagtgcagatcacggaagaccttcatggccaaatcatttacttgaattttattattacacaaccagttcagttgaccttttgtaattctgctaatcaacatagatgcttgaggtgaaacttaagaatacagtgaaatcttcctgtttatggaatattttatttgcatatgtt

SEQ ID NO: 60651 - DNA, 1712 bp, Homo sapiens
gtttgctgcagccatcaactcatcatttacattaggtatttctcctaatgctatccctcccccagccccctatcccccgacaggccttggtgtgcgaagttccccgccccgtgtccatgtgttctcattgttcaattcccacctatgagtgagaacatgcggtgtttggttttctgtccttgtgatagtttgcttttaaatgcattgtacaagtgattcttaagcaacctataatttgagaattgctgctttcccaattaaattggttccaatgccactttcagttttacattctaaggggactttggagattcagtgacgattttgcgatattattcccagatctcttggctaattgcttgctatgttttcatagagggactcacgaaacatgaatttgaatgctcacaacacccccacaggaaagatcagttattagaaatgcatcactgatttgcctgaatatatttctaaagggaacacaaaggcaggaaaagaaacaatttaaatcctataccaatttgtacatgctgaacaacttatatttcttaatcagactcaaagccactcattattatataggtccagcgttctatcaagaactgtcttcatttcccagggctgcaataacaatgtamcacaaactgagtgggattaaaaactgaaattaaaaaaaaaagatgctcaaaacattctgaagaccaaaagtcagaaatcaaggtgtctcagggctgcactcaacattggaggccatgggggaggatccttcctgcctctcccagctcctgggagcttcaggtgtcctgggcttatggtcgcattcctccagtctctggctccatctccacatggccttctcctctgtgtctatgtctcctcttctgtctcttagaagtaccctggtcattggatttagggccaccttaatccaggatgatagcatattaatttgattatgtctgcaaaaattctatttccaaatgtggccacttttataggtccagagtgggtatatatgtatgtatgtatgtatgtatatgtacatatatatttgtggaggggaccatttgacccagtagaatgaccttcagtgtaaaaatataaccaaacatttgcataattttagacaagtttgaaaataatgaatgagtacttattttacagaggtaaacattttaggaaaaacatattcttataggctgacagtgtagctttatgacaaaattagtcaggagcttgtgcctatgtgcacttgtgaatgtggtctttgcacattggatcggggtattggtggatagccatggttcgtttccttttgccaggaggatacatttcctagcactctacaaagctgctctgagtgtaccattgacctttccataaatctgttattcttctcacattcctctccacagactcttttttccctccaatggtatttgtagaaggaagacacagaaatctattacatcttctttactttaaccttttagttatgtagtttttgtcctcctctgtagtgagataccattcctactctaagtgcagatcacggaagaccttcatggccaaatcatttacttgaattttattattacacaaccagttcagttgaccttttgtaattctgctaatcaacatagatgcttgaggtgaaacttaagaatacagtgaaatcttcctgtttatggaatattttatttgcatatgtt

SEQ ID NO: 60652 - DNA, 582 bp, Homo sapiens
catatatgacatttgtcctaaaagtgtttaatgtttttgtgtaccttcacagggttcagtatactcctaatacctttcagtgaccttgacacaaaaggtagaggaagaagagagagaggaaggttagaattggatgctaatgacaggaaacagaaatatttacacttggtaactggcatcaagactcttttgcagaataatagaagcaagaaagtcatgagaggggccaggtatgtagaataaccattcttcttgacccgatagggagtgtaaaatagatttatttaaaatattgttttaacctaatccataagaaatcacattgtatttctcattgatgaacaatttttaacacatattgccagttgtattagagttcagcattatgacaattaygtctagataaaaattcacaaagccttaatgtcccagacagagtgttactaattgtcttcattctaaagcaatttacaggagtatgttctagcttaagaacaaagctacagttgcaaaaataacaacaacaagaacaatgaaaagattaagatagaataagagccttgaaaaataattctctggatt

SEQ ID NO: 60653 - DNA, 1508 bp, Homo sapiens
gtccattattacggatagacagaaaatgcctgcaatctacaatatttttctgtgtcagggctaattgcatggactccaaatatttcactaggaaatcatataccagttctagaatataatttctgcagatgtgcttaactcttaatttggtaaaaaaccctgttgtttctataaaattaatataaaaatggaacaaattcaataggaagaggaatatatacaactttagaatgaaaaaggaattatatatttataccttcctgtggaaatacatcatgatgtagtgggtggctatattaaatttcatggcttctttctctctctctctctctctctctctctmtatatatatatatatatatatatatatacacacacacatattaatatatactcatacatgcacatatattcattgatttatatacacaaatttatttgctatttatatccatagctatatttatatatctatatatatctatagataccccagtgctataatacatgtgtataaatctatcatcctattatctatctattcatattatctatctatctgtctacctacatatctagtatttcacaaataagggaaaagggtttgggttcagatactcacctcatcagctcgacatcaatagggagttggtctctatgcatttagtctccaaatctcattttttatcttcaatactgtcttggatccagatccatcaatctcattaatctattcctagtactaggtacctttacaataccagtacctgttgaggaataacacattgtttaatacacatgttgttagagtcccaaagaaaaaggagagaaaaaatttttaaaatggcataaaaaactgagaacacaaatatttgaaaagagacaagtaagttacgtcatacaaatattgatgtccctgaagaaaagaacaaataacaaaaattacacttttggttatgtccaaattggcttgatgtccagtttcttcctgttcaccatgtactaaaagcactaataacaaaacaacagccttaaatcaaaaattgattttgtttagaaggggaaagcatgataacccacgattacgtagagaacgctgagtaagtaccacttcattgcaagcacagtgctaatttgaaagaaggagacattttaaaatagttctataaaatcgcttaagtgattttgcccacttctaatacatttcataatggtgtctgagaacataaatacgcatccaattatgataaattcctggatgctttcttcacaaaactaaagttccctaatcacacccacttgaaatggaaaatcaacgtgttgtgagatgccacttattcaacttcccttttcaaaggacccatagtccactgaatttttgtcaaaatctaaattgccaggaaaatgtatggaactattatcatgggtcagatttccctgagaagatatcgcagtagactttacctatctatgtagcttttgtttaactagagtcatgactcgttctt

SEQ ID NO: 60654 - DNA, 587 bp, Homo sapiens
ccacatgcagagaaagccagccccttctgaattaattatgtgactcagacactagaggatgatgagtttatttcctttattatgattaatactttttttcccaaagagtttttcaattctgagatttaagttttatatattgtaaatatcaagatatcctttatgaaacaatattctttccaaaagacagcataaattttggagtaaaactgatgactatgtttcctttttctagactttaaatatctccttttacttagggctgattttaaaatcatgtggatttaaaaatttatgtggaagtgttttgtgacattgaaaataagagtctgtgaagaaaagctgatgctgccattacgatctctttgtatctggaataattaacttttgtttattayaaaaaccttttttaaaaataggcaataaattaattgtgcagttcatcttggatttaggagaagttgattctatggttttttttttctttctttttgtagagacagagtctttctctgtcactggactgcagtggtgcaatcatagctcactgcagcccctaactcctgggctcaagcaatcctcctgcc

SEQ ID NO: 60655 - DNA, 613 bp, Homo sapiens
aagcagaaagaataattatacgtgatgttatatgcactcattgttcttgattagaatggaatgggcagtgagtaacgtatacaggaatgattatatgtgtgaaaaagataatctagattccaaaaataaaaatcacacttgtacagtacaaccatggggctgctcacacattgttcaagatcataaaacaatcttaggmcattgataaagagaaaacaatcttgtgttgaaaaaaactatgaagaaccaactctgactcacgtaggactttttgctagaaatttagaggaattgtaagaaataaaatatttattgtaaaggcatagtacatatttttccatgttataagtagctgaaaatgtatagctatttaggtatctgacttctttttctagaaccagttcaagagatgttgatgttttagaattataggaaacgacacagatttagattctaaatttaaattttactaagaatctaataaagaagattaccattagaatccaggagttctcattgtactcctaggtctgatttttgaaagtcaaaagctctctggcctgaaagaaaaactggagcttcccagttttaaattccatgatcagttgtttga

SEQ ID NO: 60656 - DNA, 655 bp, Homo sapiens
caggagtcaattcttggatgaataatcaataataggacaaggttgcatggctggtttgaccattttgtgaactaacatgccaaaaacaaacaaataggccccctaatttgtattgcacatattctatacaaggtagaaggtgagaatgaaaataacaaatgaacaagatgttccataaggatagacaaagtctggtactaatccagtatttcccccttatccaaatgtgatggactgaaagaatccaggatcaaaatcaagcttcatctcctaacagaccctgatcatgtaccagatgggaatatttaaaatatacccagaaaagcaacctctcaatgacagygaattttagcacaggaaggctgatgctgacgttcctatactttcattttctgtgattcgatgagctactttgacattactcctggttaatgacagttatcaagatgctttgattctctttctcactctggatcattttactttccatcagtgacttgcaattctatcagtgacaaatcaattttcttcacaaactatcaaggtcaactttcacaaacactgtagtcacagccacaaaacatctgttaagacagatcacagttgagggagcaattaatttattcccatctcatggcttgactggcccccagtg

SEQ ID NO: 60657 - DNA, 620 bp, Homo sapiens
aagagtcattcaagatctcatccacttaaagaggttggcatcagctcaatggaaaacctagacctgcattgcaagaggaaatactctaccctcagaggctcagtccatatcagggacccccagaaatgccaggctggtggacaaacaaactgtatctcagaacataccctggtgctggagttctgaatgactccatggcatctgattctcaagaagcactgggctaggtggaaagaagtaaatagatgggctgggatcattaggaaactagaggcaactaagtgaaggtgtctcctcttggcagtttattccaggatcaagcttcaatgacttcatattcttgratgaaggggctgtgtcatgtcagaagggctagcttagtgagcttcagccagggcgagccccagtgcctttgctgactcagtgtcccaaagctgccttgacaggagacggacctgagaggcagaatgctggattaaaccacctgcaaccgtgctcaaatccttcccccatctttcttctccactgccctcactacccaatgaatttgccactcagttgttccttcccatgccctatgccctttccactggaggctggacagctatactccacctact

SEQ ID NO: 60658 - DNA, 697 bp, Homo sapiens
ggcctgagaacctcatggtgaggtgtgaaaacccgtgcagagcacagcatgtcctgtgacatgaatatcaaggaatgtccccaggcaacccgtgcctgctcagccgctgtaattgagacagaccccacctcttgcgacagagcctttctgggtctaaaagaagcaggaacaacaaagaagcaaacaactggggctcgagtctacccgcagggacgcccgcagacaccaggtggcgcccgagtctggccgaacgctgagctcccctcggtctgatttctgaggggacacagcgtccaccgactgtcaaatagagtgggtggaggtgatggccagccaaagagaggtgtcctagctatggttgggtggcctgtgggggagatgctacgtgagggtgccctatccaaacactgagcaccgaggggtgatcctgatgtccaccacagtgacccggggaggagttgtgagctcatggtcccagggtcctgccatgcaggcaccagggacagaagacggaagtgggggttccttcagttcctccaagagagccgttttccattccccggcagaggccacctcggcccctccgcagctctgtgcttggcctgggtggaccccgaccagtggakgtggttgagcaggaggagtccttagaccccagcttctggtcacaggggaaaggagtctcccgcgttgggga

SEQ ID NO: 60659 - DNA, 1138 bp, Homo sapiens
gggaggggtggacatttgaaaaaaatttgagattggtcaatgaggagggagcgtattgggtagaaaaccgctcatgtctgctacacttaagtttgctgagcctcattttccttatctgcaacatggagtaagaatagtatctgctataaggcacatgatgctagctattatttcagttgtcattattattaagctcctggatagtatcatgagaagcagttgattaaggagaattgctccaaaacttgctttttgaaatctttgagtaccacatacatatatgtaggaatggatggcaaatctcaccaaagtttatacagtcaaattggcagaatagcctctcttctatagatctcctcctctattgataatatctccgatcacatattgataataccttttattttttgacttcatgtcttggatgagttgaagctggattggtcgtggcttatataagtccgagaaagggattcgggacaaagttttgttttgcttttgtcacaaaaacattctggattacacatatatgagctgagctgactgcagggtgctcaatgcagagaaagttcgtattatttaaataaatgattttatactcatttattttttgactgtgccatgtactacagtaggtcctttacatatacatgtttttctaatcctaccaacaaaaatgtattggtgcgttcttctcattcattcaacatatatttgattgccagtaatctcattttacagacaataaaatggaggtttacagaggttgaygcacatggttacagtgatatagctggtaagtggccacgttgggatttgtgcttaggtcagcctgacttcactccatgcaaagtcttcatgccttcgtttcctgagagcttcctcagtgttcaatttcaccaggcttcaccattaagaatggaggtgggcgggatcagtgacagggtgttggctcacactgaggggtgaagccagatcccaggatggtctgttgttagatggccccctctggtcaccgtacttccctggaatttgggtttgttcctcttggctcctgcaggtggcaggtttgtaccagtcagtgcttgccttctccttgccaagagactaaagtggggagaatgactttgttggcaaa

SEQ ID NO: 60660 - DNA, 1145 bp, Homo sapiens
tgcatgcaaatgagacatttcttctttttaataagcagattaattaactttctgccccaatcatggcttgggtatctccaagtcactagccaacaggggatagagtattgctaattctgcaatttacactcttaaaaatactcagacacagaaaagtgtattgctgtcttgatcagtccttcttcataattgcatgaaatatttgctgagtccaccccaaacttccagcagcgcagcctaacacactaatgtcgcttcccaggatgagattagggtaggtattacactaaggctgcttggaacttgcgctaggagaccccaaggcaggcgagaatgcttggtttcaggtttcattacaaatccgaaagctggaccaaatttgctgcaaggtttgtcaaaacacacaaccttctaaagacaggatttcaaacaattttggcatgatttacgttttggtatggcagccactgcaaaacctaatggttccttatgtttaaactctcaaactaaagacattctgaaagtttagtgtctgcctgagtttgtgttaatgtgaccatttcagtgcaagaatgaaagtaacacctaggcaggcctgtgcaggccaatagtaacaaaaaaaaatgaaacagttcaaaaatccatttaggaagggaatccctctctgaataaggttctggtttgctctcatttgtttctgcagaccattgccaattataattggaaatatttcttgccattaatagtgaaagactctcatttcagaactatctgaaacttgataatgctgatccatatccctgattctcatccccgttatttcaggagtctccgaactggtccccctgcccacagattcacagtcctcttctaacttgtggtctgtccttattcaaatgagaatgtggatttcagataagtgaaagcgatcatgtcccatgttttccccctcagtgtttccctgctgccagaaggaaaacgtgcaagttccttaggaacayggcatacagggctcggtaagacccgcacttctgtgctgtctctttctccctctgtcacatacacacacacactcacacacactcattcatttactcatttgtgtgttcattcatttatttatttgctatacttgatcttcctaa

SEQ ID NO: 60661 - DNA, 1488 bp, Homo sapiens
tttgtgggtcccggaagatgccactgaccaggctgtacgtgaccatcctgctcatagcgctggtcttcctcctctgtggcctgccctttggcattcggtttttcctattttcatggaaccacgtggatttggaagtcttatattgtcacgttcatctagtttccattttcctttcctctcttaacggccaaccccaacatttacttcttcgtgggctcctttaggcagtgtcaaaataggcagaacctgaagctggttctccagagggctctgcaggacacgactgaggtgratgaaggtggacgatggcttcctgaggaaaccctggagctgtcaggaagcagatttgggcagtgaggaagagcctctgtcctgtcagatgggactttgagagcaacactgccctgccatccttgacaattgcatgtgtttttcttagcgttgcacctcaggaatgtctcagtggttcctcagggtcttcaaatggatttttatctatcctgacggttgcagttgtcaaccatagaaagcattagtctgataatacaatgtttagattctccttgatattgccaatctatttttcctgttatcttacattgaatctttcttgctgaacactttttctgcaattacctggtattgaaaggaattcctgtccaaaaccttaaaactcttctttatacttttttcctacctgattatatcaaaagggaggattccttattaatctctcagactatgttcccctgaaaatcatgttcccttcaatgactggaggcattaccacagttggaagctcgattctgaataaatgagttctgctatctctatgttccattgtattttcagatatagagcaaaataatgtacttagagacaaactctctcttcataaaaacagtctagaaaattggttttatgaaaagttctctgctgtaattgtccacagcatggtgacacgtggccttggtttctagtaaaaacaaccatggccccttccctttaagactttgagaactggtaagtttttatttagctcttcctggactaatagaccagtgaggagctaataaatatgccccaccagttccatttaggccactgaaaacctcaatattggtttcaaagtggaaattatcttgaaagccatttattatttacttacagatactttcaattgtagaattcttcattcttccaggttttgtacaaattgttctgggtgtaactttcaggtagttttacagctgttaacaagagaagcaaaactgaacgtatctgacctttccatgctaatgtcaattatagtatctggataataacttacagttggtatagaattctaatacatgttgtgacatagatgaacccggaaacattgtgctaagggaaataagccagaccaaacaacaatattgtaagttcaaattttatgaggtatcgaaactaggaaatttgtgaatacagaaagtaaattagaaggat

SEQ ID NO: 60662 - DNA, 1488 bp, Homo sapiens
tttgtgggtcccggaagatgccactgaccaggctgtacgtgaccatcctgctcatagcgctggtcttcctcctctgtggcctgccctttggcattcggtttttcctattttcatggaaccacgtggatttggaagtcttatattgtcacgttcatctagtttccattttcctttcctctcttaacggccaaccccaacatttacttcttcgtgggctcctttaggcagtgtcaaaataggcagaacctgaagctggttctccagagggctctgcaggacacgactgaggtgaatgaaggtggacgatggcttcctgaggaaaccctggagctgtcrggaagcagatttgggcagtgaggaagagcctctgtcctgtcagatgggactttgagagcaacactgccctgccatccttgacaattgcatgtgtttttcttagcgttgcacctcaggaatgtctcagtggttcctcagggtcttcaaatggatttttatctatcctgacggttgcagttgtcaaccatagaaagcattagtctgataatacaatgtttagattctccttgatattgccaatctatttttcctgttatcttacattgaatctttcttgctgaacactttttctgcaattacctggtattgaaaggaattcctgtccaaaaccttaaaactcttctttatacttttttcctacctgattatatcaaaagggaggattccttattaatctctcagactatgttcccctgaaaatcatgttcccttcaatgactggaggcattaccacagttggaagctcgattctgaataaatgagttctgctatctctatgttccattgtattttcagatatagagcaaaataatgtacttagagacaaactctctcttcataaaaacagtctagaaaattggttttatgaaaagttctctgctgtaattgtccacagcatggtgacacgtggccttggtttctagtaaaaacaaccatggccccttccctttaagactttgagaactggtaagtttttatttagctcttcctggactaatagaccagtgaggagctaataaatatgccccaccagttccatttaggccactgaaaacctcaatattggtttcaaagtggaaattatcttgaaagccatttattatttacttacagatactttcaattgtagaattcttcattcttccaggttttgtacaaattgttctgggtgtaactttcaggtagttttacagctgttaacaagagaagcaaaactgaacgtatctgacctttccatgctaatgtcaattatagtatctggataataacttacagttggtatagaattctaatacatgttgtgacatagatgaacccggaaacattgtgctaagggaaataagccagaccaaacaacaatattgtaagttcaaattttatgaggtatcgaaactaggaaatttgtgaatacagaaagtaaattagaaggat

SEQ ID NO: 60663 - DNA, 1488 bp, Homo sapiens
tttgtgggtcccggaagatgccactgaccaggctgtacgtgaccatcctgctcatagcgctggtcttcctcctctgtggcctgccctttggcattcggtttttcctattttcatggaaccacgtggatttggaagtcttatattgtcacgttcatctagtttccattttcctttcctctcttaacggccaaccccaacatttacttcttcgtgggctcctttaggcagtgtcaaaataggcagaacctgaagctggttctccagagggctctgcaggacacgactgaggtgaatgaaggtggacgatggcttcctgaggaaaccctggagctgtcaggaagcagatttgggcagtgaggaagagcctctgtcctgtcagatgggactttgagagcaacactgccctgccatccttgacaattgcatgtgtttttcttagcgttgcacctcaggaatgtctcagtggttcctcagggtcttcaaatggatttttatctatcctgacggttgcagttgtcaaccatagaaagcattagtctgataatacaatgtttagattctccttgatattgccaatctatttttcctgttatcttacattgaatctttcttgctgaacactttttctgcaattacctggtattgaaaggaattcctgtccaaaaccttaaaactcttctttatacttttttcctacctgattatatcaaaagggaggattccttattaatctctcagactatgttcccctgaaaatcatgttcccttcaatgactggaggcattaccacagttggaagctcgattctgaataaatgagttctgctatctctatgttccattgtattttcagatatagagcaaaataatgtacttagagacaaactctctcttcataaaaacagtctagaaaattggttttatgaaaagttctctgctgtaattgtccacagcatggtgacacgtggccttggtttctagtaaaaacaaccatggccccttccctttaagactttgagaactggtaagtttttatttagctcttcctggactaatagaccagtgaggagctaataaatatgccccaccagttccatttaggccactgaaaacctcaatattggtttcaaagtggaaattatcttgaaagccatttattatttacttacagatactttcaattgtagaattcttcattcttccaggttttgtacaaattgttctgggtgtaactttcaggtagttttacagctgttaacaagagaagcaaaactgaacgtatctgacctttccatgctaatgtcaattatagtatctggataataacttacrgttggtatagaattctaatacatgttgtgacatagatgaacccggaaacattgtgctaagggaaataagccagaccaaacaacaatattgtaagttcaaattttatgaggtatcgaaactaggaaatttgtgaatacagaaagtaaattagaaggat

SEQ ID NO: 60664 - DNA, 1488 bp, Homo sapiens
tttgtgggtcccggaagatgccactgaccaggctgtacgtgaccatcctgctcatagcgctggtcttcctcctctgtggcctgccctttggcattcggtttttcctattttcatggaaccacgtggatttggaagtcttatattgtcacgttcatctagtttccattttcctttcctctcttaacggccaaccccaacatttacttcttcgtgggctcctttaggcagtgtcaaaataggcagaacctgaagctggttctccagagggctctgcaggacacgactgaggtgaatgaaggtggacgatggcttcctgaggaaaccctggagctgtcaggaagcagatttgggcagtgaggaagagcctctgtcctgtcagatgggactttgagagcaacactgccctgccatccttgacaattgcatgtgtttttcttagcgttgcacctcaggaatgtctcagtggttcctcagggtcttcaaatggatttttatctatcctgacggttgcagttgtcaaccatagaaagcattagtctgataatacaatgtttagattctccttgatattgccaatctatttttcctgttatcttacattgaatctttcttgctgaacactttttctgcaattacctggtattgaaaggaattcctgtccaaaaccttaaaactcttctttatacttttttcctacctgattatatcaaaagggaggattccttattaatctctcagactatgttcccctgaaaatcatgttcccttcaatgactggaggcattaccacagttggaagctcgattctgaataaatgagttctgctatctctatgttccattgtattttcagatatagagcaaaataatgtacttagagacaaactctctcttcataaaaacagtctagaaaattggttttatgaaaagttctctgctgtaattgtccacagcatggtgacacgtggccttggtttctagtaaaaacaaccatggccccttccctttaagactttgagaactggtaagtttttatttagctcttcctggactaatagaccagtgaggagctaataaatatgccccaccagttccatttaggccactgaaaacctcaatattggtttcaaagtggaaattatcttgaaagccatttattatttacttacagatactttcaattgtagaattcttcattcttccaggttttgtacaaattgttctgggtgtaactttcaggtagttttacagctgttaacaagagaagcaaaactgaacgtatctgacctttccatgctaatgtcaattatagtatctggataataacttacagttggtatagaattctaatacrtgttgtgacatagatgaacccggaaacattgtgctaagggaaataagccagaccaaacaacaatattgtaagttcaaattttatgaggtatcgaaactaggaaatttgtgaatacagaaagtaaattagaaggat

SEQ ID NO: 60665 - DNA, 702 bp, Homo sapiens
attgtcaagggtggcagggcagtgttgctctcaaagtcccatctgactgacagggtagaggctcttcctcactgcctgaatctgcttcccgacagctccagggtttcctgaggaagscaccatccaccttcatccacctcaggcgtgtcctgcagatccctctggagaaccagcttcaggttctgccaattttgatgctgcctaacgaaacccatgaagaagtaaatgatggggttggcactgctgttaagagacgacaggaaaatggaaggcagatgaacatgagaatataagacttcccagtccatgtggatcctggaaaacagggcccactgaatgccaatgggcaggccgcagaggaggaagaccagcactgtgagcagatggtcatgtacagcctggtcagcggcatcttctgggatccacagaggatcctgaccactaggaccaggctggacacacagagaaccacaaataaaaaaatcagccacgtaactgtgatgaatctgatgtttgacaccaaacagaatcagcatcactaaacagggagtcacagaacatccactccaggatgctctacagcagggacagggcccagagcaggacacacacgaccgttgacaggtgtgtggggtggcggcagcgttaccagatgggccacaggattgacaggcagcgcttggtgctcatggcactcagaat

SEQ ID NO: 60666 - DNA, 702 bp, Homo sapiens
attgtcaagggtggcagggcagtgttgctctcaaagtcccatctgactgacagggtagaggctcttcctcactgcctgaatctgcttcccgacagctccagggtttcctgaggaaggcaccatccaccttcatccacctcaggcgtgtcctgcagatccctctggagaaccagcttcaggttctgccaattttgatgctgcctaacgaaacccatgaagaagtaaatgatggggttggcactgctgttaagagacgacaggaaaatggaaggcagatgaacatgagaatataagacttcccagtccatgtggatcctggaaaacagggcccactgaatgccaatgggcaggccgcagaggaggaagaccagcactgtgagcagatggtcatgtacagcctggtcagyggcatcttctgggatccacagaggatcctgaccactaggaccaggctggacacacagagaaccacaaataaaaaaatcagccacgtaactgtgatgaatctgatgtttgacaccaaacagaatcagcatcactaaacagggagtcacagaacatccactccaggatgctctacagcagggacagggcccagagcaggacacacacgaccgttgacaggtgtgtggggtggcggcagcgttaccagatgggccacaggattgacaggcagcgcttggtgctcatggcactcagaat

SEQ ID NO: 60667 - DNA, 862 bp, Homo sapiens
atccttccactgcaattgaaacatcccatcttattcttgtttacaacaccatccaagcccccattcccctctatccacagactgatttgtcctctytcctttagaaaaaaaaatttttccaaagagttttctgcactcatgtcttcattttttcatccttcctcatatcttctcatatctctatctccctctcttagctagatcattaaatttatgttttttgcttgaaaatttatttgtgacatagtaataaagtcaaagctttcaaaaacaatctttaaatgcatgcgctgaaaactgtcattcccatttgaggtcctcaggcatctttgccttgttaacaaagacatatcctgttatacttattaatacgtttatattaattcacaaatatttaataataaaacaatatatattttttgtcatacaatatatacattggcatgcatactttttaaaagagctaacaaattctggagggccttttatatcaggtttgttgctctttctgtgcagctacagagtattctactgcacagatagacaataatttatacagtattgatggccattttggctgtcaccagtcttttactgtaaataacactgcattcattaacttagtacatagatcttttgaacatgcacaaatatatctctaagataaattcctagatgaggaattacagagagaaaaggatgatactttatacctgcttacatatgttgaaaatagccttcactggaagttgtatccatctgcatcctcagcagaaatgagtgaggagggtacctgatcccactccatccccacatgataatctatcaaactttatggccttttacattttggtaagtaaaa

SEQ ID NO: 60668 - DNA, 1086 bp, Homo sapiens
aaaaatccttttttactaggaaatggtaaccatcatcagaacctttatcaagccaaacgctttgctgctggagggtcttgcttgatattgatggytgctgaagtggctgctgaaggtaagacaggctgtgccaatatcttaaaacaagacaacagtgaagtttgccacgtcgattgactcatccttttatgaaagattttaatgtagcatgcaatgctgtttgatagcattttatacacagtagaacttcttttaaaatggaagtcagttctctcaaaccttgccactgtttttatcaagcaagttgaataagatggaatgtgatgggagaggcttatatatattggatatgggacagaggccaagaatcatctcaggtagggtttgtgtctccaatatctctggctgctgatttgtccatagtcctcatacaagaaataacaagtctgtccagcatcttcataagcctggattgaccaccagctttgactccagctcctgtaggcatctcctgaattaagcaacacagaagagtcctctgaagtcactgaatcccagaaaggccctccacctttagcacaagggaagtcttcacctctggacaaaagagaaaaagataagggtaagtaccaagaactgtcctcttccatagtcagttatggcttttgctataagatcgtttctgtgtttccacctaggtgctacaagcaggggatcatgagcttgtttcaggaaaagacaagagacatgatgtttccttctggaaactgagtgctgccaactcagactgtgttgagcttcaactgggatcccggcttctgatttgtctccccatatcacctcctttattccaatcactgaacctatcctcatggagagaatgcttcctctgacattcatttaaggagttagaggacatgcaggcattgcttcgcagaggtgaaatgctgtagaagcaggttttgttgttttgcttacttttctaaatttttcttccttgcctgcctggaaaggttcaaggaagaaacagaccgtcccaactgaaatgattgaggagtgtttcatgagggaagtatttataaagat

SEQ ID NO: 60669 - DNA, 1086 bp, Homo sapiens
aaaaatccttttttactaggaaatggtaaccatcatcagaacctttatcaagccaaacgctttgctgctggagggtcttgcttgatattgatggctgctgaagtggctgctgaaggtaagacaggctgtgccaatatcttaaaacaagacaacagtgaagtttgccacgtcgattgactcatccttttatgaaagattttaatgtagcatgcaatgctgtttgatagcattttatacacagtagaacttcttttaaaatggaagtcagttctctcaaaccttgccactgtttttatcaagcaagttgaataagatggaatgtgatgggagaggcttatatatattggatatgggacagaggccaagaatcatctcaggtagggtttgtgtctccaatatctctggcygctgatttgtccatagtcctcatacaagaaataacaagtctgtccagcatcttcataagcctggattgaccaccagctttgactccagctcctgtaggcatctcctgaattaagcaacacagaagagtcctctgaagtcactgaatcccagaaaggccctccacctttagcacaagggaagtcttcacctctggacaaaagagaaaaagataagggtaagtaccaagaactgtcctcttccatagtcagttatggcttttgctataagatcgtttctgtgtttccacctaggtgctacaagcaggggatcatgagcttgtttcaggaaaagacaagagacatgatgtttccttctggaaactgagtgctgccaactcagactgtgttgagcttcaactgggatcccggcttctgatttgtctccccatatcacctcctttattccaatcactgaacctatcctcatggagagaatgcttcctctgacattcatttaaggagttagaggacatgcaggcattgcttcgcagaggtgaaatgctgtagaagcaggttttgttgttttgcttacttttctaaatttttcttccttgcctgcctggaaaggttcaaggaagaaacagaccgtcccaactgaaatgattgaggagtgtttcatgagggaagtatttataaagat

SEQ ID NO: 60670 - DNA, 1086 bp, Homo sapiens
aaaaatccttttttactaggaaatggtaaccatcatcagaacctttatcaagccaaacgctttgctgctggagggtcttgcttgatattgatggctgctgaagtggctgctgaaggtaagacaggctgtgccaatatcttaaaacaagacaacagtgaagtttgccacgtcgattgactcatccttttatgaaagattttaatgtagcatgcaatgctgtttgatagcattttatacacagtagaacttcttttaaaatggaagtcagttctctcaaaccttgccactgtttttatcaagcaagttgaataagatggaatgtgatgggagaggcttatatatattggatatgggacagaggccaagaatcatctcaggtagggtttgtgtctccaatatctctggctgctgatttgtccatagtcctcatacaagaaataacaagtctgtccagcatcttcataagcctggattgaccaccagctttgactccagctcctgtaggcatctcctgaattaagcaacacagaagagtcctctgaagtcactgaatcccagaaaggccctccacctttagcacaagggaagtcttcacctctggacaaaagagaaaaagataagggtaagtaccaagaactgtcctcttccatagtcagttatggcttttgctataagatcgtttctgtgtttccacctaggtgctacaagcaggggatcatgagcttgtttcaggaaaagacaagagacatgatgtttccttctggaaactgagtgctgccaactcagactgtgttgagcttcaactgggatcccggcttctgatttgtctccccatatcacctcctttattccaatcactgaacctrtcctcatggagagaatgcttcctctgacattcatttaaggagttagaggacatgcaggcattgcttcgcagaggtgaaatgctgtagaagcaggttttgttgttttgcttacttttctaaatttttcttccttgcctgcctggaaaggttcaaggaagaaacagaccgtcccaactgaaatgattgaggagtgtttcatgagggaagtatttataaagat

SEQ ID NO: 60671 - DNA, 1086 bp, Homo sapiens
aaaaatccttttttactaggaaatggtaaccatcatcagaacctttatcaagccaaacgctttgctgctggagggtcttgcttgatattgatggctgctgaagtggctgctgaaggtaagacaggctgtgccaatatcttaaaacaagacaacagtgaagtttgccacgtcgattgactcatccttttatgaaagattttaatgtagcatgcaatgctgtttgatagcattttatacacagtagaacttcttttaaaatggaagtcagttctctcaaaccttgccactgtttttatcaagcaagttgaataagatggaatgtgatgggagaggcttatatatattggatatgggacagaggccaagaatcatctcaggtagggtttgtgtctccaatatctctggctgctgatttgtccatagtcctcatacaagaaataacaagtctgtccagcatcttcataagcctggattgaccaccagctttgactccagctcctgtaggcatctcctgaattaagcaacacagaagagtcctctgaagtcactgaatcccagaaaggccctccacctttagcacaagggaagtcttcacctctggacaaaagagaaaaagataagggtaagtaccaagaactgtcctcttccatagtcagttatggcttttgctataagatcgtttctgtgtttccacctaggtgctacaagcaggggatcatgagcttgtttcaggaaaagacaagagacatgatgtttccttctggaaactgagtgctgccaactcagactgtgttgagcttcaactgggatcccggcttctgatttgtctccccatatcacctcctttattccaatcactgaacctatcctcatggagagaatgcttcctctgacattcatttaaggagttaraggacatgcaggcattgcttcgcagaggtgaaatgctgtagaagcaggttttgttgttttgcttacttttctaaatttttcttccttgcctgcctggaaaggttcaaggaagaaacagaccgtcccaactgaaatgattgaggagtgtttcatgagggaagtatttataaagat

SEQ ID NO: 60672 - DNA, 1424 bp, Homo sapiens
tcccaggaaatccaggtcttcggccactggatttgggggagtctggccctccgttggggtctcccccggcactgagctgaggctttcggaggaagcccgagcaattcccagtttgccttggctcatccccttttccccagtcctctagatctcttttttttaaaactgagtgccttctctttcttttcggacctgtcagcggccctgaaggccagaggcaggctctggaatggggaagcggtcccttcggcgtcccgggcagggccaacttgccaggcaacccattccagttacctgcaaggcaggggacgcagtcaagtccccgcgtccacttaaccggaagcggccagccctggcgcgcacaccacatgttcgaacccgcatctcacacccagggagaacttcgctgttattatacggacaaagctgtaacccaaaaccaggcgtgccagtgctaggtgatggtttagtgcatatagaaacgtgtttttaatcatgcaaaagaggaacacaaaagagtcgggcaggagaccagcgcatcccacgcaaatgggagcagacgcggtggaaaacaaccagaatgagaagatgcaggatcagagtcagccatgacttccgcctgggtttttgcctccttcgagacttttaagatgaacagcagtctctctccttttcgtgccacgaaagggtccaagcccccatcaggcatctgcatgcccaggtttgtgaccaggtgccctgagcacctctgattttctcttctaaaccgcccgagcctgtcagcgcagggtgctctgataaaacctgattcccctagtcgccccgtttccgcccttgggttggtgtgacagaaaagactgggagcccctgggactttcccctggaatggggagagcaaaaccccaaacaaaacccatccccatgttttttggtattaggctctgaaactgcacagattataggatttgtcttggacagaattaacattacatgtgaaactgtagtgctctggtgtattgagacacgttgtataggattgcttggaccatctctttcaaactgcctgttaatagtatcatgagaccttcaatgataatgtgttggsggggggggttgttttttacctgatggaaacaaaatctaggcactatttggaaaaggtagtttttctgatggcagcagatggaaggaaacggaaccaaatgagaaactagaggaagtttctgtatactgaagtggctgtaaaggagggagcagacgtgcgtttgaaaggccttctactaagcagcagtccttacaaccaagggaggccccccaatgctaaagagaaacagccagacttcctctcttgcaagcagtgtgttttatgtttaaaaaccaacctgctgtcaactgcaaacaaacagtaagcaaattcaaataaa

SEQ ID NO: 60673 - DNA, 880 bp, Homo sapiens
gtttgaaacctgtccggtccctgctttctatgccaggcaaaaaagttgggctgggggtcgcactctccggctcgggcccccaggtcccatcacttcccagcctccgggctcgcagcccggggctcgggcggcgccagcccaggtagctccaggcctcgcagtgtcggtcgtttggtggcgtttgttctaacacagaaactgtttccaacgggggcctccctcgttcgctctcttccacgatatcttgtcgacctcacactcgcatcctcgaggcccgatgtggtcccagctacttctcctaaatgggccctgagattagattccggggttcgtgttccctgcagtctgtcgtgggcttctcaattccaaaaaaccccaggaacctaccagaagccggggtctctcactcggggatcatttatttatatgtgtaaggatatttataagggcgtagggaatagagaagacactgagttttagaaaatagtttgttcttggacttgtgtatctttctctctctgttttccctacatgcccacatcgcactcccaggcctccctcctttaccctttctggccgtcagcgtgctctggccctgtctgagacggcatagtggtgtttttgagtttcagtctgacttgctttctgcctgtcatccacacacttattgctggggttgaatgtgataacccaktcactccctaacccgccattctccagcatttacttaaatatttttatcttccatcttacattgcatgggtttcctttcttcccttccctaaaaacaacaacaacaaaaaaaaaaaaaaaaaaaaagagaggaaaggaaatttcggagtaaaggaagcaggggaaaagagggtaagagaagaactcc

SEQ ID NO: 60674 - DNA, 2383 bp, Homo sapiens
ttattgagtttctgcactatgtatcaggccttattctagacattggagatataaataaattattcttcctttgataatctgttgaaagctatggaccttgtccccagcaaaaaggaaaaaaaaaaaaccaggcattttatatacaatttcagggagctcaggacatccctaggttccatagaccccaagttaaaatttttttcattgagtctctaaggcctacattttacaatatgaaggtttgagcttaggttgcatggtcaaatcttggtttttagttgttcttttttttcccccattagcactttgttgcatttttattgtgattttggtcctccatttttggagaataaatatttggaacttagttaatactgcaagtggctagaataaatgctgaacagcagctcgtaactgagaggcaaggcagacgtggagctgaggacagaaacagatgagaagttttgatgactaatctcagcctggtcctgcagaatttcaaagagtcaatctatcttttaggctaagtattcttggtaaagtcgatggttccatggagggaagggaggtttgtgttggagctggacagtataagatcacaatgccagggctcacagcaaagacggatttcctctggtgcttttgactaccaggcacaatcatagctggacaggtcagggattcattgagaaggaaagaccagtccacttctggccctgttgggttggtagactggctgcttccatgtagcacagcaaggggctttatagcaggcagttctgttgagatctttagtgaaggagaaattgggaggctgaaaggctcaaaacagacatggataggtctgtgtgcaaaggtttcaccccagttctgagtctttctgagcatttttcttccctgctttcagcatcttcagaattcttacttgcaatgaggaaggccagaactttttcatttagggcaaaggggcatttactgattttagaactgatcagctactaaaaaaactggactttaggtggggagttagatgctcttatttagcactcccaggtgaacagccagtggaagtcactgctaggagaggaccctggaagtgaagtgatccatctttgaaagagccaggtaggaatctgaacttgtaaagtctttgtgttagattgtgggaggacaggatgaagtgtgtgaatttctgcttaagcaagaaagcagcaagttgttgctgctgaggctaaagtataggaaaatccatctaaatataaactttttatcttctcgatttcttcatctgtaaaatggggataatgataacacccttcaccataaggctttggtgaggattaaatgagattatgcatgtgtaaagagcctagtcagtgttcaaaaaatgttagctattattattattagctattattmttattattattattattattatagtgttctctttcctgtctgacacacatagcaatgtcatacaaggcttaaatcatagcataagcagctataggaccagagctattcctagagtgacagataaaagataatcttttctggaagcatctgtccatttgttccatggcctgccagtgcccaggattaccctctgggagcaaatcagaagggttgatagaaaaatctttttctctactttatgtgtccctacatgaagattatctctttcttgtttcattctccttttaattccttgctttcacgtcccttttaaaatcaattgaatttaattacaattgtttttgcaaatcactctttttgcctttattattattattattattattttgatggggagaaaaagcaattcacctaggatacttttattttcagcatatatccagtcctaaattttcaatgtttaggcaatttccaccaaggaaaaaaataaggaaaaatagaagggcaagaatatgtaacactatttgctatcgtaaataatgttttctttttccttttcctgcatatttaatcttcattctttccttcttctgactttacttttaacatcttataaatctttttgtctcctcctaaaacacccctgcctcaaaatctttgttctcctccttttgatccactgaacttgtcctatcaggcatttctttttaagccttggctgcaaactgcagggctgattataggaagaatgtgatatggtccctacattttctgggtaatgccaggagaaaacaccagggccaccaattgtcccctgaacctgttgaacacatctgaggccattccaaagagaaggaaaaaatatttttgtttttgtttattatttatttattttattcagttttcatagaaattggagccttccccatgtacctttctacatttccactttcccacatttaaa

SEQ ID NO: 60675 - DNA, 682 bp, Homo sapiens
aaaaaatcagagctgggtcttctgaacaaagacttccgtgataacaaatgaactttctaccaggaaaagagtatatcctgagggggaggtggggatagtttatggctaccaaaaaactagaaagaatgaataagacctactatttgatagcacaatagggtgactgtagtcaataataacttaattttatatttttaaataactcaaagaatgtaataggattgtttgtaactcaaaggataaatgttttaggggatgaataccccattcttcatgatgtgcttatttcacattgtatgcctgtatcaaaacgtccatctyatgaagcccattaataaatatacctactatgtacccacaaaataaaaataataataataaatcttttttaaatgagtacatctgaaggggaacatgatgatgatgcttgacaggaaaatttttcacctgatcaacataactaaaaactgaaatttgagagaaagcagaaaggatgaatacctgtcttccatgataattggatattgttgaaaacaagcctggcatccctgaaaaatagaagcagcagcaataacgatatttctgtggtcttagtgtggggctggacacctttactttctcctctggatcttcgggccatctactgactggtctgccccaggccctggaggctgatctttat

SEQ ID NO: 60676 - DNA, 3571 bp, Homo sapiens
tcctcttgaaatgtgcttagaagggaaaatatcaaaagccaaccagccacagaatcctggagaaggccagtgagtcactgcagtggctgaggccttgctgagcattgcacaaaggcaaggctggggaatctctgcccttggggattccctcttgagggggagaccactatgtgaaggcacgtgggtgggggaagagacccaacagtgctgatgggaagccggcagctggggtggagagatcgtgatggtggagcccacagcacttattattattattaagggaaaggatcacagggatggacagaaaactatgcaagggactgcacagaggtcatccggaggccctgacctgtgctttagtctccccagcccctccatgggacacagtaacctgtccagggaggggtcagggctcacctgtgtttctcaaagagtgggcgtagaccgagcagctcctgagatgacgttgtgtgackcaccccatgacagcccctaaataacattaaatcacccactaaaaatagttcattctttttaaattctctttcagacctttcaaataaaagagaaatgatcaactcggtgcctgcatgtttctaatatctcactaacatttgctcatttattttttatttttatttttgggacagggtctcacttgtcatccaggctggagtgcagtgacatagtcttggctcactgcagccacaacctcctgagttcaagccatcctttcacctcagcctcccaagtagccgggaccacaggcatgcaccaccatgcccagctaatttttttgtagagatggggtttcaccatcttgccctggttgatctcgaacttacgggctcaagcaactggcctgcctttgcctccgaaagtgctaggattacaggtgtaagctaccatgcctggatcatttcttttttaaatgaagagagtgggtcttggaatcagggtcagccgcagcaatgctattgccctagaatttaataacactgttttgtgagtgtattttatgtgtgaagtgagtgtattttatgcataagttggtcttccattactggtagtgatataaagtttccatcttacatactttttttttaacacctttttcagtgagtcagtgtaaaggaaaatatgagttacataacagtgggtgggatatatatatatggcaaaaatggggatggtggtccatgaaatgaccaaggcaggtgaaaactgagctagaagaatggtctggtctatgtcagctcagctggtctatgactcagtgcttcagaatatgagaaatgccattgagatcagcctgaaagtcttctgactttgagtcagccatggaccccaggttgagggatggcttccccaatgcctggacttccctccttgttgctgtcacctcactgcactgtaatgggcaatttacttgtctctctcaccagacatggaaccagatagctatcttgttttcttatgtccccagcacccagcatagtgcctggcacaaagaatcctcggtaattatttaccgagtgtaacaaatgaatgaatgaatgggtgtcttccaggttattgcccctaatacactgcatagttaccctgaatatgcttattcattcactgtaatgcttactaagcagctactttgtgccagatgccctgcccttaatggctttattttcagtcaacaatccaattattttgcacagcgatagtcaagataatgtcagtggtggggagacctgaggttggatcctgcctctgacactcaatatctggggtgccttggaccatttaccttcttgagtaagcgtgtcctcgtgtgtaaagtgattttataatattaacttgtaggatggtcctgtgtcacttcagtgaatgctgttgcatgaatgagagtgtcagagtgagtgaatgcatgaaggaatgaatgacagacaatggcccagatcaggtaggacacagcctggctcctctcccacggccaggaaatccaggacaggtacaagaaatcctaagccttgagctctgtttaaccaggcaaaaatggagcaaactggtgaaaaaggagaaagctaggataattctctcctacagcggaccctgaggctgtggctgcacccgagccggagctcttgagcaggtgagccatgaaacagactagctgttccctggactgctgaacgtcccactgctgtgagtacccctccttttcagggatgtggactatgtgatgttggcatggtgaccagttagccagtccccccacacccgtcctctgcatcctgaggtgacaaagaggccctgaggagtagaatgagcccctgacagctccccaggctcacaaatggtagggagagccgggtccaagaatggaggagcctggcactaaactctcctcatgtgaacaatggagctgttgccctggcaaccaagcaggcctctccctgggcctcaaggccgagtctgggaagaggtgtcctaagaaagggaggtgggaacggaggggggcgtgcctgttctcataactgtctgcccagcatgcaagggcagcaggaggcccctttccagggaagacgatcagagtctctgttggcccattctccagagccactgggggagaccggggtgtggacacctcactgcagcatctgatgaggacttcccctcatgcctacccctcctccctggcctcctgagggctagttcaggggcaggagctgtgagatgacgacatggggactgacgggaggcatgacaggtctaaccctggggttgtcccggaaactctgcaatgtgtgtggatcctgtaggtgcaggtggggcatgtagagctgggggtggccagagtagggctgcattctccaagcctgagggcagacccttgctctgagaggccccaggggttttgttaaagtgccagcttctggagcaagacagtcccggcttcagctcttgactccatcactctggctgcatgacctggggaagtcatttcattcctcggggtctcagtttccttggctgtaaagcaggaataataccagtcatagtatggtggcgttgaatgaagaggacagcccctgtcaacacagtgttgggtaggatagctcagtgtgcattcacttcctctcctcagcctccccagatctctcatttctccctctaggcacctgtggctcgtaaccgtggagagattgccctggccccagtttgcacataaactgcccagctaccccatcaacacaaactcccttcattctccctgatagtctccccagtttcttgttaacctcctgaggaagatggcctctgagggccccgggcaggacgtgaaggcactgggcgggacatacccagatcgtggtgctggagtttgtctttgagaagtggtagttacaggtgtcctttgcctgtcagaattttctcattttcccctttgaacctgggttgcttttgccataaactaaaaaaaaaaaaaagaaagaaagaaaagaaacagttaagaggggttgcagtacaccttgaaaaaggcctgggtgctcagaggcattggggctgaccgttc

SEQ ID NO: 60677 - DNA, 1107 bp, Homo sapiens
  misc_feature (1)...(1107): n = A,T,C or G
aaggtaagaatctctgtttggaatgagcacacaaactagatttaaggcgctcaagaacaagtatggttttcttagtttctgcccacacacccccacaatgagcccagcccagggctatgacctaacagattctccagaaatagtacgtgaactacttgtatgatcttcttctctctgagattattactttgtgggcaagatccctgtggccakctcctccccagggccccctctcagcttggcagtgcagcctgcacgtagcgtggcttctcagaatggctacatttcaacctcaataaggttcttgcttgggaagagtcaggaaagagccttgcagttccaattcaactcagggggtcaggccaggaatgatctttccttttggcacagaagggccaggccagagcagcttcagagtctttggtgcctcttcgttcaggcaccatgtgcccctccccgccagcctgtctgagagcagccacaannnnnnnnnnnnnnnnnnnnnnnnnnnnnnnnnnnnnnnnnnnnnnnnnnnnnnnnnnnnnnnnnnnnnnnnnnnnnnnnnnnnnnnnnnnnnnnnnnnnactacaaagggacagcatgggggagtctttttggggtgatgaaagttttgtatcttgattgttgtgatggttgcatgatagaactgtacaccagaatgaatttcatagtatgttaattttaaaaagtcaagtgactgggctgggcatggtggctcacgcctgtaatcccagcactttgggaggctgaggtgcgtggatcacctgaggtcaggagttcaaaaccagcctggccaacatggtgaaaccccgtctctactaaaaatacaaaaaattagccaggtgtggtggcacatgcctgtaatcccagctacttgggaggctgaggcaggagaactgcttgaacctgggaggcagaggttgcagtgagctgaaattgcaccattgcactccagcctgggcaacaagagtgaaactgcgtcttaaaaaaaaagtcaagcaactgttgaaggtttcaggaaaaaattgtggtgaggtggggaagcagggaaccacacttagatactagttaatttcgatggatccc

SEQ ID NO: 60678 - DNA, 1107 bp, Homo sapiens
  misc_feature (1)...(1107): n = A,T,C or G
aaggtaagaatctctgtttggaatgagcacacaaactagatttaaggcgctcaagaacaagtatggttttcttagtttctgcccacacacccccacaatgagcccagcccagggctatgacctaacagattctccagaaatagtacgtgaactacttgtatgatcttcttctctctgagattattactttgtgggcaagatccctgtggccatctcctccccagggccccctctcagcttggcagtgcagcctgcacgtagcgtggcttctcagaatggctacatttcaacctcaataaggttcttgcttgggaagagtcaggaaagagccttgcagttccaattcaactcagggggtcaggccaggaatgatctttccttttggcacasaagggccaggccagagcagcttcagagtctttggtgcctcttcgttcaggcaccatgtgcccctccccgccagcctgtctgagagcagccacaannnnnnnnnnnnnnnnnnnnnnnnnnnnnnnnnnnnnnnnnnnnnnnnnnnnnnnnnnnnnnnnnnnnnnnnnnnnnnnnnnnnnnnnnnnnnnnnnnnnactacaaagggacagcatgggggagtctttttggggtgatgaaagttttgtatcttgattgttgtgatggttgcatgatagaactgtacaccagaatgaatttcatagtatgttaattttaaaaagtcaagtgactgggctgggcatggtggctcacgcctgtaatcccagcactttgggaggctgaggtgcgtggatcacctgaggtcaggagttcaaaaccagcctggccaacatggtgaaaccccgtctctactaaaaatacaaaaaattagccaggtgtggtggcacatgcctgtaatcccagctacttgggaggctgaggcaggagaactgcttgaacctgggaggcagaggttgcagtgagctgaaattgcaccattgcactccagcctgggcaacaagagtgaaactgcgtcttaaaaaaaaagtcaagcaactgttgaaggtttcaggaaaaaattgtggtgaggtggggaagcagggaaccacacttagatactagttaatttcgatggatccc

SEQ ID NO: 60679 - DNA, 891 bp, Homo sapiens
cctcccctcctttcttcctcccgcagaaggtggaatctcccgtcgttgtggggtcmggcagtcaatgacgggttcgccccttgttgttccccctagcattctgcagaatgggtagagagttgggggcgggggggtgggctgcagagttgaaagtgcacctgaggcgaatgggccattaaacacccaatactgagacggtttcggggaggatgcggagggaggagcttcacctagttgagcattcagaactttgggtgggaaagggggtgttgagacattctcaattttctagaaataggatgactagtgtggagtttgggtttattttatgttcatctttgtcatttttcgtctggatcttctggcttgggtcccgttgggagaggtcgctctcttaaacctctctttcccaatacatcgcgctaccccctcacttgggctggaatgaggagggggtcctgaaccgctttttttggcaacaacaatattttaacatgttccagtctaggttttgttgaataattagaaatggaaatatttttttctccctcccccttctgaaaaaaaagggggaaatgtgagctctcttctgattggtgggtgacgattttagtccgcaccaatgagctggcggcctcgtctgtatttatttagtgctctgggggagtttttctctttacgcagcgcctgtagtcacggctggaaccttggctgggggactctgagggataagaggggattcggggggaatccgaactgtacctgttcagagatccgcgaccttgcagccggggctggcggaactctgatagggagatagagggataggacaggcaggcggggaggctccgggtgctggggcgacaggaaaggggtggaggctgggctccg

SEQ ID NO: 60680 - DNA, 734 bp, Homo sapiens
taataaaacaagagaagtcctgagaggtagtcctgtttggtagctttccaaatgtactgcctggagcttcctcaagggagtaggtgggtgtgggaggaggccccactatctacttccacggagttcatgtttgacaacttctacacatcccacttcctttcagagagaacgccgaggctcaaaggggaacagacttgtccaggatcataaaaggaactggttgcagcttagcattcccttggttacaaaacaccagagcaccagggaaaggaaaacccagatagaattgtgcagaggccagtgtgccagcaggcaacaatccaacccaggcagtggctgcgtcggcctcctggcctccctggagtscgtgccccacttcctgtggctgagggcctgcctcgcctggcagcactaacgcagatttggaattcaagcagccattccagctgctgttataaggctgcctccctccctgtccgagagcaatttcacttcaaaggccctccaagtccttgaaagcagggtttttttcccttttttttaaagcatgttggggagaaacagatgatgccctctatttgagatcaatacagtaattatgttggacaagctcttagggctaacttgagggggaattcacagcctcatgaatgacaagcgtgaaagctcatggaatgagaaggaccagcctgccacccgtgttttgcttgtgggatgcagcccattccgcagta

SEQ ID NO: 60681 - DNA, 1957 bp, Homo sapiens
tgcatttagaaacatttatagcaactttaatgtatcatgacatccagtggctggtcatttattctaggaatttgtttttattgtattttacaatagtttttgtcctcaactgattgaaaattttaaaaaatctaatttcttaactacagggtgtttaagaagcacagatttagacaatgggtatttattaataacaaatctcatatagtaagaaatcaaggaagaaatagttgctgggttgggattcaataatgttcaacagtggtagggctcccagttgatgtttctcaggttcccttggtcttccagcttagctacaatatgccgtcagcagttacaagcctcatgcttccacatgaaaatactcaactggagaaggaagaggacagatgcagaacagcctcttctctctcacagctctctttttgtctggagagaaagactgtccatatctagaagactgttcatacttctttccatatctaattgaccagaattgggtccctgtcttcccctggatcaatccctgtaaaatggtcatggcttagtccagtgtgatctatcctctggggggacacctagctgcatgaccagagtcagggatctctcagcaagaaggactggagaatggctgttctgcaaatttctccaaagacctaaaattatcagaaattgacatcaccactgacaatatttcaataagtgggaaggtataaaaatagctcaagttttatgcaatacctgttatgttaggtattgtgcataactcttcatattttgtaaagcttccctccacacagtcagtattatccctcttttatagatagggaaaaggagacatcagttaagtgtttcacccaaggtcacattgctggccgataaacagagctgagattccaacctaacaccatgaatgtctatacccaggttctctctactgctacaaaggctatttttgtatggttctggttgggtagcttgtatatgcataatactacaaatctgggaatgcctgaccagggatactagcttgagaaaagggctctctaaataggcaacataaactctcttaacatttctaagtacagttattgcatttctggtacgtgggactttttcctttagctcactaaaatgtgaccctctctgttgctgtctgaaatacatcttcctgtacaacatctgtccctgtcattgctgttccagatgtcacaggaccctgctgttgtcttgagtttggatgtaatgtgcgggagatgtattctttgtaattctggaatctagaagaacattgctcaataaaacccmtgtgcatggtggataagtattgcttgcaactttactaatactttatggccatgctatatatcaatagcactgtgccttagctaggctttcctgggctatgaaaaaacatttttaaccccagagagtgccaaacaaccaactttcaaacacttctttgcaacacagctctttgataagctgaaaattgcccagtttatggaattctttcttgatcttatacttcctcatattccaattccctagaaaattgcttttgagaaagagtagacagtatatctctggagtcgcccattattttttttactccactgctgagctaggtatacaatcctgattatctttgactatgttcctttctgtgggtgctagtctattctagctaatacagggtgcatagcaaattttaaaaggctatgaaaataagcttggggacacttgtcttcagtgttcaaatacgtagattttattatcacatttctgaaaatgtattacttattaaactatgtggatccaccttaaggtatgtttttcctttcacagtcctatattgttaatgatactcaattgtgagttactttaggtcagcaactttgacttgtgtggcatttgataatgctcattaatgttgctgacattgtctttggatgga

SEQ ID NO: 60682 - DNA, 1957 bp, Homo sapiens
tgcatttagaaacatttatagcaactttaatgtatcatgacatccagtggctggtcatttattctaggaatttgtttttattgtattttacaatagtttttgtcctcaactgattgaaaattttaaaaaatctaatttcttaactacagggtgtttaagaagcacagatttagacaatgggtatttattaataacaaatctcatatagtaagaaatcaaggaagaaatagttgctgggttgggattcaataatgttcaacagtggtagggctcccagttgatgtttctcaggttcccttggtcttccagcttagctacaatatgccgtcagcagttacaagcctcatgcttccacatgaaaatactcaactggagaaggaagaggacagatgcagaacagcctcttctctctcacagctctctttttgtctggagagaaagactgtccatatctagaagactgttcatacttctttccatatctaattgaccagaattgggtccctgtcttcccctggatcaatccctgtaaaatggtcatggcttagtccagtgtgatctatcctctggggggacacctagctgcatgaccagagtcagggatctctcagcaagaaggactggagaatggctgttctgcaaatttctccaaagacctaaaattatcagaaattgacatcaccactgacaatatttcaataagtgggaaggtataaaaatagctcaagttttatgcaatacctgttatgttaggtattgtgcataactcttcatattttgtaaagcttccctccacacagtcagtattatccctcttttatagatagggaaaaggagacatcagttaagtgtttcacccaaggtcacattgctggccgataaacagagctgagattccaacctaacaccatgaatgtctatacccaggttctctctactgctacaaaggctatttttgtatggttctggttgggtagcttgtatatgcataatactacaaatctgggaatgcctgaccagggatactagcttgagaaaagggctctctaaataggcaacataaactctcttaacatttctaagtacagttattgcatttctggtacgtgggactttttcctttagctcactaaaatgtgaccctctctgttgctgtctgaaatacatcttcctgtacaacatctgtccctgtcattgctgttccagatgtcacaggaccctgctgttgtcttgagtttggatgtaatgtgcgggagatgtattctttgtaattctggaatctagaagaacattgctcaataaaacccctgtgcatggtggataagtattgcttgcaactttactaatactttatggccatgctatatatcaatagcactgtgccttagctaggctttcctgggctatgaaaaaacatttttaaccccagagagtgccaaacaaccaactttcaaacacttctttgcaacacagctctttgataagctgaaaattgcccagtttatggaattctttcttgatcttatacttcctcatattccaattccctagaaaattgcttttgagaaagagtagacagtatatctctggagtcgcccattattttttttactccactgctgagctaggtatacaatcctgattatctttgactatgttcctttctgtgggtgctagtctattctagctaatacagggtgcatagcaaattttaaaaggctatgaaaataagcttggggacacttgtcttcagtgttcaaawacgtagattttattatcacatttctgaaaatgtattacttattaaactatgtggatccaccttaaggtatgtttttcctttcacagtcctatattgttaatgatactcaattgtgagttactttaggtcagcaactttgacttgtgtggcatttgataatgctcattaatgttgctgacattgtctttggatgga

SEQ ID NO: 60683 - DNA, 500 bp, Homo sapiens
atgttctgaaataatataaggattaagtcatttgggtgggaaaaaacacatgccatccatttaatatttgagtacctactcctgtgataagcattaattgtctgtagcatggtatcaagaaaatctgtctgtgaactgagtttagggctgctttttaaaaaaatctcatatcttgcattttctgaactgtttttggtgtcggttttggcatggatgatgttcatcagatgccggatcagatagcacaaatattcaagaattcrtaacccataattccatgtccatctattggtctgatcattttttgaggattctttttaagaacaagattattttcatttttaatgtcatgagcacattaatggtaacttaataatattagtacaattagatgtccatatgcgacaaaaaaaacctaacctaataacatcttagagaataatcaactcaaaatgtgtcatcgatgtaaaatataaaactataaaacttttagaagaaaa

SEQ ID NO: 60684 - DNA, 857 bp, Homo sapiens
atccgtatatgtgttgtcgccattatcaccctccctctcaacccacttgttttcttttagctgatgtttgttgcatcactcctgggctttaagatactcaagaggggacagtcaagtctccccactcagaaccaagtaggttaaagaaagaatatagaggtcaaaacaataccaccaaaatagaaacatcacagggtcgctcctatcccacctcatatcagctggagcccaggccctgacattaccctactaccccacatacttattccaaactaagaagggctcaaagtctggagtttggtgcatcacaccaagccttcatttactccaccgagttttccatctgcactttcccccattaaccaggcagcactgcttctatgtgatctaggcttgttccccaagccctttccctcctcttcccaagtggagccattctcactctctgcctcattcacgttgctccaaaatgtctgtgccttctacagttagctagcctgataagccaatccatgcaaatataccaaaaggcttagagtagaatctcctttctcttcccaaataaactatacatagttccttcaagactaaacatatctaaaacyaaaaagaaatagtacaaatatataaaatgccccctgccttattttgtaagtaatttatcatgaaaaccttcccccatcaattcattttctgtagcatcctttttaatgtttcaaaattcacttatacttccctgtcttcccactgttgagcatataggttttctccagttgttggacatgatgaacattttacacctaactctgtacacacaaagcatgatttctatattataaggaacacagccttggtaa

SEQ ID NO: 60685 - DNA, 611 bp, Homo sapiens
tggatcatctttgagtaataaaaatggagaaawgcgtgactgacttatttaccatgactagataagtagtaaataaatattaggttggtgcaaaagtaattgaggtttttgctattacttttaatttttgctattacttttaacctgaattacttttgcaccaacttaatacctacaaaataaatgtaatcagtggactaaattcttccaaatgtggtagcccttgaggaaaataccaaaagcattttagggagaggcctgctaggacacttatgggtcagacggaagctccggcagtgggcacctgcagccgctgacatctcagtaagaagtgcaggcaaggatcaaaaccctgggtcgagggacgtgcctgctggcgtggaaagtgcaggctctgagactagtgagatttggttacgatgtaccaagctggagtgacccatggtgttgttcacgggctcttgtccttactggaagcttatctgtgtttgtacccacttcccttctttctgtctagacttgagaagagggtgctaagttagcatgctcagttagatggcctagaggcatgtagctgaactgcagaggtgtacaagtattctgtccccagc

SEQ ID NO: 60686 - DNA, 611 bp, Homo sapiens
tggatcatctttgagtaataaaaatggagaaaagcgtgactgacttatttaccatgactagataagtagtaaataaatattaggttggtgcaaaagtaattgaggtttttgctattacttttaatttttgctattacttttaacctgaattacttttgcaccaacttaatacctacaaaataaatgtaatcagtggactaaattcttccaaatgtggtagcccttgaggaaaataccaaaagcattttagggagaggcctgctaggacacttatgggtcagacggaagctccggcagtgggcacctgcagccgctgacatctcagtaagaagtgcaggcaaggatcaaaaccctgggtcgagggacgtgcctgctggcgtggaaagtgcaggctctgagactagtgagayttggttacgatgtaccaagctggagtgacccatggtgttgttcacgggctcttgtccttactggaagcttatctgtgtttgtacccacttcccttctttctgtctagacttgagaagagggtgctaagttagcatgctcagttagatggcctagaggcatgtagctgaactgcagaggtgtacaagtattctgtccccagc

SEQ ID NO: 60687 - DNA, 594 bp, Homo sapiens
ttttagtagagacagagtttcaccatgttggccaggctggtcttgaactcmtgacctcaggtgatctgcccgcctcagcctcccaaagtgctgggattacaggtgtgagccaccgtgcccagccctgaaaatttgaaatgcagtacaagaacttgtatttggaagatgtggaaaggagagttattgtacctaagtaatatttgcaggcaaatgagatgtagcccacagggtaaagaaaagtggtttgtgtgaatatacaggggctgtgatcataggccccagaggggcaggtaattgcctgcaggcttctatgagacatggagagagagaagaagcattctctgtacaaaacaatttttattcatttgtatttattaaatggaaaaacaaatcccatagtgtccctattctgtggaggaatttaattattatgttaaaataaagttatatattttccccctgaaaaaaaaaaaagaacaaaagaacaaagtggcagcagcaactacagcaaccaaagaaagctgagcacattctcctacttactgcctaccccagatggaaaagcaggggaaaagtcatgccttttaaagagga

SEQ ID NO: 60688 - DNA, 1272 bp, Homo sapiens
gcatccttccttcatcctattttttattgtataattcagagattttgtgcagctttaaaattttccatttccagaagcatgtctttgttttcctatagaaacttttttctgcagttgctgattatattgtgttagtgcactctatctttgtaaaagtaaactctttagcagttgcattgtttttcaaggtcagcaaaattatagacattgattggtgctggtttcagtgttaaacacttttagttgttgagaatgagagcggaaatagttttctcatttttcagatagataaacactatcatacatctcatactaaaccattaaatgtctcactggcatccttggtttcattctggcttgatcacttaattatgtaggtagcatttacaagactgcaaagaaatggtttacagagaataaaatggtctatttaatcccagtgaagtattgtactaaatgaatcttttttaacaaaataaacccagctaatttaacaatattaaatcagcagccaatatctttagcacatcaaggaagaattttgggtaatatttgatgtttattacttaagaagaaagacaagaattcatgtgcctgccccttttcttaggtctgtaggcttccactgtttagaaggagtataacaattctaataaaataacatattcaaagtgacaatgcaatttacacaggacattctctctttttctttttttttttttttttttgagacggagtctcgctctgtcgcccaggccggactgcggactgcagtggcgcaatctcggctcactgcaagctccgcctcccgggttcacgccattctcctgcctcagcctcccgagtagctgggactacaggcgcccgccaccgcgcccrgctaattttttttttgtatttttagtagagacggggtttcaccttgttagccaggatggtctcgatctcctgacctcatgatccacccgcctcggcctcccaaagtgctgggattacaggcgtgagccaccgcgcccggccaggacattctctcatgccatgacacttcctatttagcattccattccccaactaatacttcctattccttaattttgttttgtgcattcttcctaaatttgcaggatggtttaaagtcaaagaatacttcccattttgtacattatggttgtatatattttttgcatatgcacatacattattagtagtattataatcacattgtatataatcaaattataagatattctgcttttttgtatagaattatcc

SEQ ID NO: 60689 - DNA, 1091 bp, Homo sapiens
ctgtatatcttctttggtgaggtgtttgttcacatcttttgtccattttgtaattaatttgttttcttatttttgagttttaagatttcttagtacattatagatatagctccttcatcagatatttgtgttacaaatacaaacttccagtctgtggtttctcttcgaggacctcacaataaaaattgtgtttttaatctatgctaaatgctacccaaatatatgttggaagacactgaacctggggatgggcaggtgaaagagaaaacaaaataggactctaaaggcaaaccacttgccctgtattattttgtgtcagtattcatgcaaaaatgttacatattagataaaaagaattggaattcaggaagttacrtaatgagcagattttcaaaatactgtatacatcaagctacattattgttagatgtaggcaaacacataggtaagaaagatacatatagaaaatggcatcatttactggaaattgtatggattcaagaagctctttcttctaaagagttatatgatctcaagatttctattaactgatacatttttataacattatgaatcttataggacttttatgaaatctaacaagaaaattcatataaagtaaacagaatttttttgaaaacagaaggtgttatatatatatgaacagattatatatataaacagatctatgtttttcaaatcaggtttctgtgtctttcttcatccccatcaccctgctcaaacattaaaattattcctgtgctttctctttctaaatttaaatcgttgtaatacacttaatagtaataagtatactaataggcaaactgttttaatgggtttgggccttgatccccaaagacacaatcttgaatgccatgaccctggatgctgaaatcccaaaagataaaaattcctacagtttaaaatcctggaaatcaaagtcctggacgatcaaaatcccaaaaatataattctgaaaaaagtatttaaaaattctataaaatgtttatttatatgtttaaatagatttacttcagaaacattaaaaatatgaaagaatacttcatggaccactttacataataaat

SEQ ID NO: 60690 - DNA, 1082 bp, Homo sapiens
atatgcctaaacacatagaagtgcttacatgtggtgtgtgtgaatgtttggatatgtatgtgcatgagcatatacatgcttttaaagcagcttcaattttactatagaggaagtaatgctatagttaaaaaataaagacatataagttagccagaattcacatacaaattaacatctacataagatattggtgatacatgtaacaataaaattttctgccctttactgttcttacttggtgaaaaagtaattgaaattattgagctcagcatcttcattggagaaaagcaatattattatgaatcatgcaggcttcctgtaaaatttagatactatctctatctatgtatctgtctaatctatctatccacttatctatctatctattcctctctcaggacagatttggaatacaataattgttttttaatgatgactcaagactctgttcaatattaatttcttatcctagtttcttcaagagaaattgttgatgtgccttggtgcttgtacagcctattcatcaatgcactaatattgtactttgaattttttgtgtgtctgttattggtagactcaggtatttgaagtaataaactgtgtatttcactttattattcttgacaycaggaaacagctagcttctaacaccattcatcaatatttctttaaatatttgtcttagaatttgaacaaaaatagttttaacttaagaattggaaaatgatatggcaatcaatattagttcaatttttcttttcagggctaggtaggccttgatccaaatgcttaacataaatgcttattttgcattaaggatctgatgtcagtgctttgagcagattaattagtaagatttaaggcattcaatggattggtattaggcatattttgctctatactgaattagactaatttataaagtgtagttcacaaatgccctccataaataacatataccatttactatgcaattagactgccacgctttttattaaaaatgtttgtcatgtacaatgttttaaaatcttttttatcaattcataataatttacatattcatggagtacacgtggtatttt

SEQ ID NO: 60691 - DNA, 1082 bp, Homo sapiens
atatgcctaaacacatagaagtgcttacatgtggtgtgtgtgaatgtttggatatgtatgtgcatgagcatatacatgcttttaaagcagcttcaattttactatagaggaagtaatgctatagttaaaaaataaagacatataagttagccagaattcacatacaaattaacatctacataagatattggtgatacatgtaacaataaaattttctgccctttactgttcttacttggtgaaaaagtaattgaaattattgagctcagcatcttcattggagaaaagcaatattattatgaatcatgcaggcttcctgtaaaatttagatactatctctatctatgtatctgtctaatctatctatccacttatctatctatctattcctctctcaggacagatttggaatacaataattgttttttaatgatgactcaagactctgttcaatattaatttcttatcctagtttcttcaagagaaattgttgatgtgccttggtgcttgtacagcctattcatcaatgcactaatattgtactttgaattttttgtgtgtctgttattggtagactcaggtatttgaagtaataaactgtgtatttcactttattattcttgacatcaggaaacagctagcttmtaacaccattcatcaatatttctttaaatatttgtcttagaatttgaacaaaaatagttttaacttaagaattggaaaatgatatggcaatcaatattagttcaatttttcttttcagggctaggtaggccttgatccaaatgcttaacataaatgcttattttgcattaaggatctgatgtcagtgctttgagcagattaattagtaagatttaaggcattcaatggattggtattaggcatattttgctctatactgaattagactaatttataaagtgtagttcacaaatgccctccataaataacatataccatttactatgcaattagactgccacgctttttattaaaaatgtttgtcatgtacaatgttttaaaatcttttttatcaattcataataatttacatattcatggagtacacgtggtatttt

SEQ ID NO: 60692 - DNA, 1082 bp, Homo sapiens
atatgcctaaacacatagaagtgcttacatgtggtgtgtgtgaatgtttggatatgtatgtgcatgagcatatacatgcttttaaagcagcttcaattttactatagaggaagtaatgctatagttaaaaaataaagacatataagttagccagaattcacatacaaattaacatctacataagatattggtgatacatgtaacaataaaattttctgccctttactgttcttacttggtgaaaaagtaattgaaattattgagctcagcatcttcattggagaaaagcaatattattatgaatcatgcaggcttcctgtaaaatttagatactatctctatctatgtatctgtctaatctatctatccacttatctatctatctattcctctctcaggacagatttggaatacaataattgttttttaatgatgactcaagactctgttcaatattaatttcttatcctagtttcttcaagagaaattgttgatgtgccttggtgcttgtacagcctattcatcaatgcactaatattgtactttgaattttttgtgtgtctgttattggtagactcaggtatttgaagtaataaactgtgtatttcactttattattcttgacatcaggaaacagctagcttctaacaccattcatcratatttctttaaatatttgtcttagaatttgaacaaaaatagttttaacttaagaattggaaaatgatatggcaatcaatattagttcaatttttcttttcagggctaggtaggccttgatccaaatgcttaacataaatgcttattttgcattaaggatctgatgtcagtgctttgagcagattaattagtaagatttaaggcattcaatggattggtattaggcatattttgctctatactgaattagactaatttataaagtgtagttcacaaatgccctccataaataacatataccatttactatgcaattagactgccacgctttttattaaaaatgtttgtcatgtacaatgttttaaaatcttttttatcaattcataataatttacatattcatggagtacacgtggtatttt

SEQ ID NO: 60693 - DNA, 1082 bp, Homo sapiens
atatgcctaaacacatagaagtgcttacatgtggtgtgtgtgaatgtttggatatgtatgtgcatgagcatatacatgcttttaaagcagcttcaattttactatagaggaagtaatgctatagttaaaaaataaagacatataagttagccagaattcacatacaaattaacatctacataagatattggtgatacatgtaacaataaaattttctgccctttactgttcttacttggtgaaaaagtaattgaaattattgagctcagcatcttcattggagaaaagcaatattattatgaatcatgcaggcttcctgtaaaatttagatactatctctatctatgtatctgtctaatctatctatccacttatctatctatctattcctctctcaggacagatttggaatacaataattgttttttaatgatgactcaagactctgttcaatattaatttcttatcctagtttcttcaagagaaattgttgatgtgccttggtgcttgtacagcctattcatcaatgcactaatattgtactttgaattttttgtgtgtctgttattggtagactcaggtatttgaagtaataaactgtgtatttcactttattattcttgacatcaggaaacagctagcttctaacaccattcatcaatatttctttaaatatttgtcttagaatttgaacaaaaatagttttaacttaagaattggaaaatgatatggcaatcaatattagttcaatttttcttttcagggctaggtaggccttgatccaaatgcttaacataaatgcttattttgcattaaggatctgatgtcagtgctttgagcagattaattagtaagatttaaggcattcaatggattggtattaggcatattttgctctatactgmattagactaatttataaagtgtagttcacaaatgccctccataaataacatataccatttactatgcaattagactgccacgctttttattaaaaatgtttgtcatgtacaatgttttaaaatcttttttatcaattcataataatttacatattcatggagtacacgtggtatttt

SEQ ID NO: 60694 - DNA, 1003 bp, Homo sapiens
caaaacatgttacttcagggaggtaggtgaattaaatcctaccatgttcccgtatgagaaccagttaaaaaccataataaaaatagtaatatttatttgcgtctacacttctgatcaccaactatttagtccaatctcctttacattttcgagatacacacagcatatcctcaagaaatgcaaaaccccttctaatcatgacatcgagctcaaactccagactctctgaatgatataagatatgcctatttaacctagcaacctatgaactaaaagacattatctgctttcctagagcccattacctayccccaagcatttggggagaaaacaataattttaaggcttataaagtattttttttagtcgaggctgatagatattttgaatttaagacttaaactctgcttttatatttattgtctgtcagcttcacaagctttcatataaactcttctctcctgaaatgtattgctgtaagcatcaaatttttattggctaccacaggtggtattaacaacttttttctagatcagcaatttcatcaggcctatgctgtactttataagttactatacacaacactttacaaattaccacagcatgacctggattttcatctttccagcttctgatgtttttctcactactcacaaatgaacaattaagccatctctacatcatgtaaatatgtcttccagcaccacctcattcctagcatcaagttatatactagtcactctactatcctgcttagtacataacttggtgctaggaatgaggtggtgctgtagtatcatttgtgcttgactaacaaaccccgaagtcccagaatctggaaataatagtgattggttgatgatgctacatttctaccaatagttcagtctgtttccgttaccaaaatctgtgatataattgatagtaaacctattacctagaaggcttttggcatttaaagtagaggggggaaaatattctgaattctccctgactgaaatct

SEQ ID NO: 60695 - DNA, 1003 bp, Homo sapiens
caaaacatgttacttcagggaggtaggtgaattaaatcctaccatgttcccgtatgagaaccagttaaaaaccataataaaaatagtaatatttatttgcgtctacacttctgatcaccaactatttagtccaatctcctttacattttcgagatacacacagcatatcctcaagaaatgcaaaaccccttctaatcatgacatcgagctcaaactccagactctctgaatgatataagatatgcctatttaacctagcaacctatgaactaaaagacattatctgctttcctagagcccattacctatccccaagcatttggggagaaaacaataattttaaggcttataaagtattttttttagtcgaggctgatagatattttgaatttaagacttaaactctgcttttatatttattgtctgtcagcttcacaagctttcatataaactcttctctcctgaaatgtattgctgtaagcatcaaatttttattggctaccacaggtggtattaacaacttttttctagatcagcaatttcatcaggcctatgctgtactttataagttactatacacaacactttacaaattaccacagcatgacctggattttcatctttccagcttctgatgtttttctcactactcacmaatgaacaattaagccatctctacatcatgtaaatatgtcttccagcaccacctcattcctagcatcaagttatatactagtcactctactatcctgcttagtacataacttggtgctaggaatgaggtggtgctgtagtatcatttgtgcttgactaacaaaccccgaagtcccagaatctggaaataatagtgattggttgatgatgctacatttctaccaatagttcagtctgtttccgttaccaaaatctgtgatataattgatagtaaacctattacctagaaggcttttggcatttaaagtagaggggggaaaatattctgaattctccctgactgaaatct

SEQ ID NO: 60696 - DNA, 1003 bp, Homo sapiens
caaaacatgttacttcagggaggtaggtgaattaaatcctaccatgttcccgtatgagaaccagttaaaaaccataataaaaatagtaatatttatttgcgtctacacttctgatcaccaactatttagtccaatctcctttacattttcgagatacacacagcatatcctcaagaaatgcaaaaccccttctaatcatgacatcgagctcaaactccagactctctgaatgatataagatatgcctatttaacctagcaacctatgaactaaaagacattatctgctttcctagagcccattacctatccccaagcatttggggagaaaacaataattttaaggcttataaagtattttttttagtcgaggctgatagatattttgaatttaagacttaaactctgcttttatatttattgtctgtcagcttcacaagctttcatataaactcttctctcctgaaatgtattgctgtaagcatcaaatttttattggctaccacaggtggtattaacaacttttttctagatcagcaatttcatcaggcctatgctgtactttataagttactatacacaacactttacaaattaccacagcatgacctggattttcatctttccagcttctgatgtttttctcactactcacaaatgaacaattaagccatctctacatcatgtaaatatgtcttccagcaccacctcattcctagcatcaagttatatactagtcactctactatcctgcttagtacataacttggtsctaggaatgaggtggtgctgtagtatcatttgtgcttgactaacaaaccccgaagtcccagaatctggaaataatagtgattggttgatgatgctacatttctaccaatagttcagtctgtttccgttaccaaaatctgtgatataattgatagtaaacctattacctagaaggcttttggcatttaaagtagaggggggaaaatattctgaattctccctgactgaaatct

SEQ ID NO: 60697 - DNA, 1003 bp, Homo sapiens
caaaacatgttacttcagggaggtaggtgaattaaatcctaccatgttcccgtatgagaaccagttaaaaaccataataaaaatagtaatatttatttgcgtctacacttctgatcaccaactatttagtccaatctcctttacattttcgagatacacacagcatatcctcaagaaatgcaaaaccccttctaatcatgacatcgagctcaaactccagactctctgaatgatataagatatgcctatttaacctagcaacctatgaactaaaagacattatctgctttcctagagcccattacctatccccaagcatttggggagaaaacaataattttaaggcttataaagtattttttttagtcgaggctgatagatattttgaatttaagacttaaactctgcttttatatttattgtctgtcagcttcacaagctttcatataaactcttctctcctgaaatgtattgctgtaagcatcaaatttttattggctaccacaggtggtattaacaacttttttctagatcagcaatttcatcaggcctatgctgtactttataagttactatacacaacactttacaaattaccacagcatgacctggattttcatctttccagcttctgatgtttttctcactactcacaaatgaacaattaagccatctctacatcatgtaaatatgtcttccagcaccacctcattcctagcatcaagttatatactagtcactctactatcctgcttagtacataacttggtgctaggaatgaggtggtgctgtagtatcatttgtgcttgactaacaaaccccgaagtcccagaatctggaaataatagtgattggttgatgatgctacatttctaccaatagttcagtctgtttcygttaccaaaatctgtgatataattgatagtaaacctattacctagaaggcttttggcatttaaagtagaggggggaaaatattctgaattctccctgactgaaatct

SEQ ID NO: 60698 - DNA, 787 bp, Homo sapiens
aaactgggaatgatcttagatatatactcccccccacccccaatttaactataaaacatcaaatataaacttaccacctactgctgatattctcttgaggtctgcagtgagatgaagaagtgcctctggaatctgatgggcttaccgcctccaaatgggacatagaggaatgagatggggagaattttttgtgaggggaagatggagttcgggctgaggatccctgcacaccatgggcaccagtgtcggaaacggagttactgctgccttgcccagctcctgcagacttgcttttgctctgtgcagagtcacctcccccaccagcagaattttccttagcttcttgtttccgttttcggtactccagcagggatacctagaaaggaaaaaacaaacaaacaaaaaacggtactctatctggatatcattagtggatcacyagcaacagggaaagaaggaaagatggtaccttagtaaaccactagccaagccacgcaaacaaagcagacaccaaccctgataactttttttggggagtatgaaagagatctgagcacagctacatatttaaggcagctggaaattggtaagaggaagataataaactaggaggcaagtctctaaagaatgtttgccaattagaccaccatctttttttctgccttcagaaaaacttgtgaggttaccattacacagtaacagaagcatgctatcacagttatttgcaacaatggaagtacctagagaagggagaattggaagcttgtatagtttaaaaagcctccca

SEQ ID NO: 60699 - DNA, 1148 bp, Homo sapiens
gtgaagaaagcttatagtacagtactgaacactgagcagattttcaccgagtcccggttcaactaaatttcaatgctatgtttggagatttacagataatgctccagtgtataaaatgaaatattaattatcaatgcaaagcacactgtttcattatcagtcagactggtttttctaagaagtctggagaccaaatgccctatacacattgtgtttagaagaggagtttagagagaacaaggtgaaacactactgagagccttgttggccacttataaatgtttttaaaataccaactgaggaactaaaaaatgcaaaatgcttcttaaaaactatgattcaatttagaaactctagggatatcataaaatgttctgtcaaatacctgaactcctcttcttttcagaagttgcagaataataatgataaaaataaaaataaatagcataagaatctgagtacaactatacagatacaactttaatttgtcctatactggtaagtttttaacttacaaggccaggcccttacctctttagtgagatatgaaacagtgagcctattagaaatatacattgttctaaataatcccatggagggttttcttatctatctgattaacttatactctgagggattttcagaattttattacaattttgttgaataatgaaaatgttcttaggttctgcattaggtaagtcctttctaaccaatattrggagatattagaagaagaccaatattagaagaagaactcttcttcactgctataaagccaaattctattctagctaaaacattccatttcattttattttgcctcataaaaagctgtattttaaaaaatagaatcttgatatgtgaacagcacacaataaagcaatgacttaaacagtttttaaagatcctatttaaatagtcttgttatgataatcctgtgtatgcagcctaaactcttcctaaagactaaccatgacacatagataaaagtgcttgagtagagcctgtataaatgagattaaggatagtcagatacacttggagaatataacagggacttgtgttaaatggaatttctatctgttgcccgtagaaatttaaggatgtgctatagatacaagtataaaagcagaaccaagttaaaa

SEQ ID NO: 60700 - DNA, 846 bp, Homo sapiens
accttctctcacactggagtctgaaggccccaggggtctaagaaagtattcatagaggtcttcctcattttctatgaaaatgttaaatttttccttttgttctgacagtaaaaacattattgaatgaaagcatacacatctgcatctttggggacaccatcccataactgcatgtggccacacaggttcaggggctaatgaccgtccgcaccctggggcttcagggactaaagcagccagaccccaccgacagagtgttctcaagccttgttactcagagcgcagtcgttgaaccagcacattcacaaacctagagcctgttagaaatgtggcattccaggtcacccagacctgaacaaaaaccctgcaatgtaaggagccgcctaggtgagtcaggcatgctaatgtttgtgaagtgccggcctagatggctggcctcccctctcctgcattattgttcattgaaatggctttggatttcccacctgatttttcagttctaattactgtgttactttcttttatctgttagtcccattgaaggctcgatcatcaatagtgtttattaattcatccatatactagactcaaagatgaggctagtagttggggtccccrtgccttggggatggagtgctatgccctgaagacaatgaggatgcccagagattcgcccctggcctcctgccctccttctttgtggacccacacaagtgaggttttattacttggtgccagccacatttcccaccctcctgaccaaaggccccaggctggccagccttggggacagtgagcacccagaatggggatcttagcatgtgtagctacatgatgctatagaat

SEQ ID NO: 60701 - DNA, 846 bp, Homo sapiens
accttctctcacactggagtctgaaggccccaggggtctaagaaagtattcatagaggtcttcctcattttctatgaaaatgttaaatttttccttttgttctgacagtaaaaacattattgaatgaaagcatacacatctgcatctttggggacaccatcccataactgcatgtggccacacaggttcaggggctaatgaccgtccgcaccctggggcttcagggactaaagcagccagaccccaccgacagagtgttctcaagccttgttactcagagcgcagtcgttgaaccagcacattcacaaacctagagcctgttagaaatgtggcattccaggtcacccagacctgaacaaaaaccctgcaatgtaaggagccgcctaggtgagtcaggcatgctaatgtttgtgaagtgccggcctagatggctggcctcccctctcctgcattattgttcattgaaatggctttggatttcccacctgatttttcagttctaattactgtgttactttcttttatctgttagtcccattgaaggctcgatcatcaatagtgtttattaattcatccatatactagactcaaagatgaggctagtagttggggtccccgtgccttggggatggagtgctatgccctgaagacaatgaggatgcccagagattcgcccctggcctcctgccctccttctttgtgracccacacaagtgaggttttattacttggtgccagccacatttcccaccctcctgaccaaaggccccaggctggccagccttggggacagtgagcacccagaatggggatcttagcatgtgtagctacatgatgctatagaat

SEQ ID NO: 60702 - DNA, 940 bp, Homo sapiens
caaccacagaaataacaaacagagcaacatgtcttttaagagcgacagcagaatggaaggcgggargaatgaggaccacggtgccctcagccttctcactcctcattgtccccagtggcctcttgctactctggttctggggccatcccacctcccagggctgcctctctcctaggccctggcctctgcccttcctgggggagcattttgcaaataaaccacagggctttctgaagtctgtccaggtggtgagatgggagagtgtggaagggatggaaaaggaggaggtgggtagacgggaaacagctcacaggcagcaaggcagttggggtcgtactttgggtgggattccacagacaagcttgggaattcctttctggcttatatattaactacagaagcttctggaattttataaggtgaaatggagaggagacagactggagggtgaaattctgatagacttgaggctttgagatgtggtcctggggtggagcaagacaagaaaagtactggagattggggtttgaggagtctatgcaattatttttatttttaaaaatctttgtggctacatagcaggtgtatatatttatgtggtaagtgagatatttcgatacagacatacaatgtataatcacaggcatacaatgtagacaggcataaagtgtatagtcacatataataataacatcatggtaaatggggtaaccatcacctcaagcactcatcatttctttgtgttacattagagttatattccctctgttatgctaaaatgtaccacaggctgggcacagtggttcatgcctataatcccagtattttgggaggctgaggcagacagattgcctgagctgaggagttcgaaaccaccctgggcaacatggtgaaaccctgtctctacaaaaatacaaaaaaaaattagccaggcatggtg

SEQ ID NO: 60703 - DNA, 940 bp, Homo sapiens
caaccacagaaataacaaacagagcaacatgtcttttaagagcgacagcagaatggaaggcgggaagaatgaggaccacggtgccctcagccttctcactcctcattgtccccagtggcctcttgctactctggttctggggccatcccacctcccagggctgcctctctcctaggccctggcctctgcccttcctgggggagcattttgcaaataaaccacagggctttctgaagtctgtccaggtggtgagatgggagagtgtggaagggatggaaaaggaggaggtgggtagacgggaaacagctcacaggcagcaaggcagttggggtcgtactttgggtggrattccacagacaagcttgggaattcctttctggcttatatattaactacagaagcttctggaattttataaggtgaaatggagaggagacagactggagggtgaaattctgatagacttgaggctttgagatgtggtcctggggtggagcaagacaagaaaagtactggagattggggtttgaggagtctatgcaattatttttatttttaaaaatctttgtggctacatagcaggtgtatatatttatgtggtaagtgagatatttcgatacagacatacaatgtataatcacaggcatacaatgtagacaggcataaagtgtatagtcacatataataataacatcatggtaaatggggtaaccatcacctcaagcactcatcatttctttgtgttacattagagttatattccctctgttatgctaaaatgtaccacaggctgggcacagtggttcatgcctataatcccagtattttgggaggctgaggcagacagattgcctgagctgaggagttcgaaaccaccctgggcaacatggtgaaaccctgtctctacaaaaatacaaaaaaaaattagccaggcatggtg

SEQ ID NO: 60704 - DNA, 940 bp, Homo sapiens
caaccacagaaataacaaacagagcaacatgtcttttaagagcgacagcagaatggaaggcgggaagaatgaggaccacggtgccctcagccttctcactcctcattgtccccagtggcctcttgctactctggttctggggccatcccacctcccagggctgcctctctcctaggccctggcctctgcccttcctgggggagcattttgcaaataaaccacagggctttctgaagtctgtccaggtggtgagatgggagagtgtggaagggatggaaaaggaggaggtgggtagacgggaaacagctcacaggcagcaaggcagttggggtcgtactttgggtgggaytccacagacaagcttgggaattcctttctggcttatatattaactacagaagcttctggaattttataaggtgaaatggagaggagacagactggagggtgaaattctgatagacttgaggctttgagatgtggtcctggggtggagcaagacaagaaaagtactggagattggggtttgaggagtctatgcaattatttttatttttaaaaatctttgtggctacatagcaggtgtatatatttatgtggtaagtgagatatttcgatacagacatacaatgtataatcacaggcatacaatgtagacaggcataaagtgtatagtcacatataataataacatcatggtaaatggggtaaccatcacctcaagcactcatcatttctttgtgttacattagagttatattccctctgttatgctaaaatgtaccacaggctgggcacagtggttcatgcctataatcccagtattttgggaggctgaggcagacagattgcctgagctgaggagttcgaaaccaccctgggcaacatggtgaaaccctgtctctacaaaaatacaaaaaaaaattagccaggcatggtg

SEQ ID NO: 60705 - DNA, 940 bp, Homo sapiens
caaccacagaaataacaaacagagcaacatgtcttttaagagcgacagcagaatggaaggcgggaagaatgaggaccacggtgccctcagccttctcactcctcattgtccccagtggcctcttgctactctggttctggggccatcccacctcccagggctgcctctctcctaggccctggcctctgcccttcctgggggagcattttgcaaataaaccacagggctttctgaagtctgtccaggtggtgagatgggagagtgtggaagggatggaaaaggaggaggtgggtagacgggaaacagctcacaggcagcaaggcagttggggtcgtactttgggtgggattccacagacaagcttgggaattcctttctggcttatatattaactacagaagcttctggaattttataaggtgaaatggagaggagacagactggagggtgaaattctgatagacttgaggctttgagatgtggtcctggggtggagcaagacaagaaaagtactggagattggggtttgaggagtctatgcaattatttttatttttaaaaatctttgtggctacatagcaggtgtatatatttawgtggtaagtgagatatttcgatacagacatacaatgtataatcacaggcatacaatgtagacaggcataaagtgtatagtcacatataataataacatcatggtaaatggggtaaccatcacctcaagcactcatcatttctttgtgttacattagagttatattccctctgttatgctaaaatgtaccacaggctgggcacagtggttcatgcctataatcccagtattttgggaggctgaggcagacagattgcctgagctgaggagttcgaaaccaccctgggcaacatggtgaaaccctgtctctacaaaaatacaaaaaaaaattagccaggcatggtg

SEQ ID NO: 60706 - DNA, 940 bp, Homo sapiens
caaccacagaaataacaaacagagcaacatgtcttttaagagcgacagcagaatggaaggcgggaagaatgaggaccacggtgccctcagccttctcactcctcattgtccccagtggcctcttgctactctggttctggggccatcccacctcccagggctgcctctctcctaggccctggcctctgcccttcctgggggagcattttgcaaataaaccacagggctttctgaagtctgtccaggtggtgagatgggagagtgtggaagggatggaaaaggaggaggtgggtagacgggaaacagctcacaggcagcaaggcagttggggtcgtactttgggtgggattccacagacaagcttgggaattcctttctggcttatatattaactacagaagcttctggaattttataaggtgaaatggagaggagacagactggagggtgaaattctgatagacttgaggctttgagatgtggtcctggggtggagcaagacaagaaaagtactggagattggggtttgaggagtctatgcaattatttttatttttaaaaatctttgtggctacatagcaggtgtatatatttatgtggtaagtgagatatttcgatacagacatacaatgtataatcacagrcatacaatgtagacaggcataaagtgtatagtcacatataataataacatcatggtaaatggggtaaccatcacctcaagcactcatcatttctttgtgttacattagagttatattccctctgttatgctaaaatgtaccacaggctgggcacagtggttcatgcctataatcccagtattttgggaggctgaggcagacagattgcctgagctgaggagttcgaaaccaccctgggcaacatggtgaaaccctgtctctacaaaaatacaaaaaaaaattagccaggcatggtg

SEQ ID NO: 60707 - DNA, 543 bp, Homo sapiens
ccctgtgagggcctgcaagatcagtggacactgttggttgtctcttcccagcttgggtgggggtgcagcctgggggcggggaggaagtgtctgccccgggggattctgggtgacttttcgctttctcagtgttttcaggaagtgtgtgtgttggccacggctgcaggaggtgggggagacacaaagcaggaagcctccgggagaccagagctgggtgcagacatacacacacacatacacacagacacacagagtcacacacactcacacacactctctctctctctccctctgtctttctctctctctctctctctctgtcctttcctcctggacagatccacagttatacacagaaacaaacacacacgcacgtagagaagtgattcacaaacacttaaagacataaatcacaggkgcaaagccatacctgggctcaaaaacctccaagagaacgcagcctcagacccacccaggggccaggggccaggctgtttgcgagaccagcccaggcgggacccaggcttgcacgggcaggtacac

SEQ ID NO: 60708 - DNA, 2544 bp, Homo sapiens
  misc_feature (1)...(2544): n = A,T,C or G
ggcagagacacaaccaaaaaagaaaattttaggcaacttctactcactgctgcaggctggtaaagggttccttcctgctggagcccaaaggcactcgccccagctcctgcaccccctcacctgcatgctccccctctcgaaagctgtttgagtgtggcttaaagagtaaatgagccatacccctgttccatgtcccagaaggggtggagggaactctcctgtctcaccagtgcattgggaggctaaggcagcaggatcacttgagcacaggagtttggagaccagcctgggcaacatagcaagaccccatctctacaaaaaatgaaaaattagtcaggcatggtggtgtgcctgtagttgtagctatttgggaggctgaggtgggaggatcacttgagcccaggagtttgaagcttgcagtgagctatgatcatgccactgcattccagcctggaagacagaggaagacactgtttccagaaaaataaaaaataaatttaaaagtatcacagtagggataaacagtccctgctatgcaacagcaatgaaggttcaatggacaagctttgtgcacatttggaattatattttcagatagttcctaggtttgtaactaatcagtgaaatctatatacctttcaatattgatggtattttcaaatgggccttcaaaaagattgtatcaatttaaacacccatcaagaaattatgcctttaatcaacactacatattaacaaatgtttggatcctgatgacatctccttagatacttaattaccatttacattgctgttcctgtatcttgttatatcaacaactctgctcgattttctattcggttgctgatcttttccttaaatatagtttaggagatatttatgtatttataaaattagccctttggctaatatatagccacagatactataactagtttttaaatctgtctcttggttttgtttgtggttttcttgctttggatattcaaatttaataatgccttcctgtaagacttatagattgtgtgtcttaatttaaaagactatgcccaycactgaaaccaaccaaccaactgccaaattttctactaatgatgatggtgatggtggcgatgatgatgatgattttaagccccaacatctagcatttattttattctaaagaatgagatagattcaagttttctttattatttttctatttccaacttcctatcttgttatatcaattcatgtattgaataaactattttcctcactggttgaaaaactgatctttattacattctaggtaatgtaataggtacaaatgccttaggtcttttagtgtttcttgatctctattttaatctattaatctgtacgttttgtcctctgctaagatcaaactcttttaacttctttagcattatatttataatgagttgggttttcctcattactctactatttaagaattatctcagctattttcccaaattatttttaataaaatgatggtgacattacagattcatttataagcattagacatttaaacatattcgacctttccattcaagaatatgtctttccttaatgtaagtcatgannnnnnnnnnnnnnnnnnnnnnnnnnnnnnnnnnnnnnnnnnnnnnnnnnnnnnnnnnnnnnnnnnnnnnnnnnnnnnnnnnnnnnnnnnnnnnnnnnnnaaaagctacaaaaaaaccttagcctggcacagtggtgcactcctgaagtcccagctactcaggaggctaaattgggagaatcacttgagcctacgagttcaaggctgctgcagtgagccatcatcacagcactgcactacagcctgggtgacaaagtgagactctgtctcaaaaaaataaaaaaataaaaataataaaaataggaataaatacattattagctcctatgttttgctcacagctttaatacccccctgaagttcccctaatttatgcctcctgtattgcacatggtaggcactctactaagaacaaattgaagcttccaaattaacaaaatatattgaataaaaaagaaaaatacctcaaatgttatatctcaaggacaaaaagtatttcttttagtgagaaaatcgtctcaaatataaaaataaaaagagaataccttaacatccaaaaactcagtcgttaaaataaaagaaaatgagaatatcaatgaagaaagaatccgtttgctggcaatttggctccatatgtgatttggcagctgtattagtttcctactcccctgtaatatttaccacaaaattagcagctgaaaacatccatttattatctcacagttcctgtgaattacgtgaccaggcagggcttacctgggtctcacaggctgcaatgcagctgttggtcaggggcacatcctcattcgaggctcaacccagggtggagttggggactggaaggttgatccacttctaggccacctcaggttgtttgcagaattcatctcattgtgggccgggcgcggtggctcacgcctgtaatcccagcactctgggagaccgaggcgagt

SEQ ID NO: 60709 - DNA, 1124 bp, Homo sapiens
attcaatgtacagaacaaaagcaactctggaaattttaccttgttaatttgaatgaactacatgtacaaaacgtgtttcacaatttaattaatcaagtcattttgcccagatagcacaatgcagtcaataccagcagctggggtgtgcatttatagaaaaggtaataatttgggrtacctgtggcatgttgccagaaataagttcacagtctgaagttgctgttcacaaactgaattcctattatcaccctaatgtcactccttcagatatttatattaaaaaataaagtggtaagaggatgtactcactgatgtccttgaagaaaaaaaaatcaatttttttatagctccaagttttgcagcatgaccttaagctgtttttttcattttgttttgtggggtttttttgtagtatggtaatattaattgaattgaaggtactgatctcagtaaacagtctaccacttcagggtggaatcacagattttcttatccccatgggttcagcagtcctttaatgccctgaaaaagtaaaaattttagcatggcagggattttacttattttggaacagaggacctttgatgggcactagggaacatccaaaggaaggccacagacacataaagtcacacaccttcccttgcacaccatttcaaatacgcttgcttagagaattgatatgagcctgagtttctcagtctgaacaattgtgttttcctttagaaaatagctaattaccacaagaagctggaaaacaaactaagttccaaaatgaatatccagtaataaagatgcaatttcatttttcagactttccatgaagtgagatgctcatttacctgacatttgtagacagggctggtttcacgggtatgtgacctctgctgtcacacaggaccagtgtttggtttaatgttctgctgtcacaatctcagaattcttaataaatttttaatcagggatcttgaactttcattctacaccgggccacacaaattttgtagccagtcctgtttgtagatatttctattgttaaaacatcttataattgtaaatgaatctgaggcactataaactctaaaattccttgtgaatctcttaggaatgatcaaagttgccat

SEQ ID NO: 60710 - DNA, 1124 bp, Homo sapiens
attcaatgtacagaacaaaagcaactctggaaattttaccttgttaatttgaatgaactacatgtacaaaacgtgtttcacaatttaattaatcaagtcattttgcccagatagcacaatgcagtcaataccagcagctggggtgtgcatttatagaaaaggtaataatttgggatacctgtggcatgttgccagaaataagttcacagtctgaagttgctgttcacaaactgaattcctattatcaccctaatgtcactccttcagatatttatattaaaaaataaagtggtaagaggatgtactcactgatgtccttgaagaaaaaaaaatcaatttttttatagctccaagttttgcagcatgaccttaagctgtttttttcattttgttttgtggggtttttttgtagtatggtaatattaattgaattgaaggtactgatctcagtaaacagtctaccacttcagggtggaatcacagattttcttatccccatgggttcagcagtcctttaatgccctgaaaaagtaaaaattttagcatggcagggattttacttattttggaacagaggacctttgatgggcactagggaacatccaaaggaaggccacagacacataaagtcacacaccttcccttgcacaccattkcaaatacgcttgcttagagaattgatatgagcctgagtttctcagtctgaacaattgtgttttcctttagaaaatagctaattaccacaagaagctggaaaacaaactaagttccaaaatgaatatccagtaataaagatgcaatttcatttttcagactttccatgaagtgagatgctcatttacctgacatttgtagacagggctggtttcacgggtatgtgacctctgctgtcacacaggaccagtgtttggtttaatgttctgctgtcacaatctcagaattcttaataaatttttaatcagggatcttgaactttcattctacaccgggccacacaaattttgtagccagtcctgtttgtagatatttctattgttaaaacatcttataattgtaaatgaatctgaggcactataaactctaaaattccttgtgaatctcttaggaatgatcaaagttgccat

SEQ ID NO: 60711 - DNA, 1124 bp, Homo sapiens
attcaatgtacagaacaaaagcaactctggaaattttaccttgttaatttgaatgaactacatgtacaaaacgtgtttcacaatttaattaatcaagtcattttgcccagatagcacaatgcagtcaataccagcagctggggtgtgcatttatagaaaaggtaataatttgggatacctgtggcatgttgccagaaataagttcacagtctgaagttgctgttcacaaactgaattcctattatcaccctaatgtcactccttcagatatttatattaaaaaataaagtggtaagaggatgtactcactgatgtccttgaagaaaaaaaaatcaatttttttatagctccaagttttgcagcatgaccttaagctgtttttttcattttgttttgtggggtttttttgtagtatggtaatattaattgaattgaaggtactgatctcagtaaacagtctaccacttcagggtggaatcacagattttcttatccccatgggttcagcagtcctttaatgccctgaaaaagtaaaaattttagcatggcagggattttacttattttggaacagaggacctttgatgggcactagggaacatccaaaggaaggccacagacacataaagtcacacaccttcccttgcacaccatttcaaatacgcttgcttagagaattgatatgagcctgagtttctcagtctgaacaattgtgttttcctttagaaaatagctaattaccacaagaagctggaaaacaaactaagttccaaaatgaatatccagtaataaagatgcaatttcatttttcagactttccatgaagtgagatgctcatttacctgacatttgtagacagggctggtttcacgggtatgtgacctctgctgtcacacaggaccagtgtttggtttaatgttctgctgtcacaatctcagaattcttaataaatttttaatcagggatcttgaacttycattctacaccgggccacacaaattttgtagccagtcctgtttgtagatatttctattgttaaaacatcttataattgtaaatgaatctgaggcactataaactctaaaattccttgtgaatctcttaggaatgatcaaagttgccat

SEQ ID NO: 60712 - DNA, 667 bp, Homo sapiens
acagactgtcatattctgtcttagcataagatatctggtaattcccaaggcagtttagttcagtgagtttaaaaaattacatgtcttcttattagaaattgttgccagaacacataatgaatatgataccaatttccactatatggaaatttatattttttcaaaagatattacattactaaagaaagaaaggcagaatataaatggcagatattcatcactgaatttgtttttgagaccacttatagtaattatgttacataagcccaaagagtttatatatgcttggatagattatatttgtcattttaagcattgttttaaccaaggatacaaatttatgaagtgtttacasgttcaaaaataatttcctataaaaataacatgaataggtcaaatgatttgactttaccttcaaaacttatccagaatctcaccttcactactttaaccttggtccaagccactgtcatctcagaactgagttactgtactagcttcccatttagttgatttcttcggaacaggctaggctttagcagcagttaactctgaactctccaaacctcagtggcttaacaccaaaatattatgcatcttcttcacaaatgtctactttatgtttgcatgggtaaggatactagaggagcttcttattgtcactcag

SEQ ID NO: 60713 - DNA, 2033 bp, Homo sapiens
tctctctgagtcatagtttctgcatctattaaataggggtgataatagtgcctacatagatagggtgtctgaggatacaaagagataatagttaatgttttctccttttttatttatgtatttattttgagacggagtctcactctgtcacccaggctggagtgtggtggcgcaatctcggctcgctgcaacctctgcctcccaggttcaagtgattctcctgcctcagcctcctgagtagctgggactacaggcacccgccaccactcctggctaatttttgtattttaatttttaaatttctattatttttattcttttttgagacgtaatcttgctctgttgcccaggctgagtgcagtggcgtgatcttggcttactgcaacctctgcctcccaggttcaagtgatcctcctgcctcagcctcctgagtagctgatatcacacctggctattttttttttttttttttttttttggatttttagtagagatggggtttcaccatgttggccaggctggtctcgaactcctatcctcaagtgatccacctgcctcggcctcccaaagtgctgggattacagacatgagccactgtgcccagccaatagttaacgttttctatgttattacaatgcaccatagactaggtaagtgcccaggaaatggatccttttaccaccactattactaattatcatcacgtaagcagtcatttttctattgagcatccgtagtgtctggtggatgtgctgcttaaggcactttgtgttgaaagaccaggtaaaaggtacggacacgtggactggtcytgtctcccatgggagtcgatgactgtcattggctccttttcggaatgctgcaaaagcaggattcagtttgtcggaacacggcacatgaaagatgcatccagaagcactgaggccccagaacttggtggtgagtcaacaccactagggcgggatgaggaggacggtctggttcatcacagggagagagctgcagggctgtcatcccgatgttagaatagatctggggaatcacagagtcttcatttcagcttcgttttgcagagctcatttacttgagctagttcggccaacgggagaccaatatatccatccatcatatgacagaaaatttcagagtttggggctaaggttcttaagttccttctatccatggacgcttcagtggcacaaaagcacaaaagtggcacagatgcacttctgcctcccacccttgcccctacatacctgccccattgctgtaaatactgtgtgggggtcaaaggcatgaatttggagctagaaaaaccagggtttgtgacccacctctgctgcctattagcctcagattcctcatctgtaaagtgggaacaattctggtttctgccttaaagatggaaaccaataaatcacatgggataatttaaatggaagtgcattagaggggataattcatctatagcatgtggtactgttgactattatttttagagtcactttagattacacatcaagataattgaaccatttcaggctagatatgcaaacataatcatggccaagaggacagcctcattactataaaaaggaaacatattatcagcggtctcggaaacttttcttaacaatcattaaaataagatggcacatattttctaacccccatcaacattatactcttttactttttttttcctccctccctctttctctcctttgcctcctctcatcttttcttttctttccttcatgccaaccattcatttgcctactcatacatagctctccccaggacagggcagtcagcgtggagcttgcattgggattacaggggtggataagatagacagcatccctgccctcaagcttacaacctagggtggaggtagttggagattaatattagtgataaaaacaatgagtagaacaaaagcgaaaatacagggtgctaacgagaccttgcataagggacataacatggtctgggtggtggtggtcagggaaggcttcctggaggaagagtca

SEQ ID NO: 60714 - DNA, 2033 bp, Homo sapiens
tctctctgagtcatagtttctgcatctattaaataggggtgataatagtgcctacatagatagggtgtctgaggatacaaagagataatagttaatgttttctccttttttatttatgtatttattttgagacggagtctcactctgtcacccaggctggagtgtggtggcgcaatctcggctcgctgcaacctctgcctcccaggttcaagtgattctcctgcctcagcctcctgagtagctgggactacaggcacccgccaccactcctggctaatttttgtattttaatttttaaatttctattatttttattcttttttgagacgtaatcttgctctgttgcccaggctgagtgcagtggcgtgatcttggcttactgcaacctctgcctcccaggttcaagtgatcctcctgcctcagcctcctgagtagctgatatcacacctggctattttttttttttttttttttttttggatttttagtagagatggggtttcaccatgttggccaggctggtctcgaactcctatcctcaagtgatccacctgcctcggcctcccaaagtgctgggattacagacatgagccactgtgcccagccaatagttaacgttttctatgttattacaatgcaccatagactaggtaagtgcccaggaaatggatccttttaccaccactattactaattatcatcacgtaagcagtcatttttctattgagcatccgtagtgtctggtggatgtgctgcttaaggcactttgtgttgaaagaccaggtaaaaggtacggacacgtggactggtcctgtctcccatgggagtcgatgactgtcattggctccttttcggaatgctgcaaaagcaggattcagtttgtcggaacacggcacatgaaagatgcatccagaagcactgaggccccagaacttggtggtgagtcracaccactagggcgggatgaggaggacggtctggttcatcacagggagagagctgcagggctgtcatcccgatgttagaatagatctggggaatcacagagtcttcatttcagcttcgttttgcagagctcatttacttgagctagttcggccaacgggagaccaatatatccatccatcatatgacagaaaatttcagagtttggggctaaggttcttaagttccttctatccatggacgcttcagtggcacaaaagcacaaaagtggcacagatgcacttctgcctcccacccttgcccctacatacctgccccattgctgtaaatactgtgtgggggtcaaaggcatgaatttggagctagaaaaaccagggtttgtgacccacctctgctgcctattagcctcagattcctcatctgtaaagtgggaacaattctggtttctgccttaaagatggaaaccaataaatcacatgggataatttaaatggaagtgcattagaggggataattcatctatagcatgtggtactgttgactattatttttagagtcactttagattacacatcaagataattgaaccatttcaggctagatatgcaaacataatcatggccaagaggacagcctcattactataaaaaggaaacatattatcagcggtctcggaaacttttcttaacaatcattaaaataagatggcacatattttctaacccccatcaacattatactcttttactttttttttcctccctccctctttctctcctttgcctcctctcatcttttcttttctttccttcatgccaaccattcatttgcctactcatacatagctctccccaggacagggcagtcagcgtggagcttgcattgggattacaggggtggataagatagacagcatccctgccctcaagcttacaacctagggtggaggtagttggagattaatattagtgataaaaacaatgagtagaacaaaagcgaaaatacagggtgctaacgagaccttgcataagggacataacatggtctgggtggtggtggtcagggaaggcttcctggaggaagagtca

SEQ ID NO: 60715 - DNA, 703 bp, Homo sapiens
ctccatacatgtttgatgaatgaacactgaaccacactacaggtttcaaagcctcatttgactctctagtctaggggggactagaaaggtcttttggcaagacagcaacaataataactaatgtttgttgagtatttctgtgtgcccgtgaatgttctaagcaccctacagcagtgcggtttcttttaactcagaaaatcgttgctggccccaggtagcctccatccatcagtgctgacatggcactacgcaacaggaaacagtctaccccagtaattctcaacaggatractttgtgccccgggagactcttggcaatgcctggagacatttttggttgtcacaactgagggagaagtggagaccagggatgctactcaataccctacagtgcgcatggctgcccccaccacaaagaattatctggaccattatgtcagcagtgcagaggtggggagaccctacatgacatgcattatctcctattttaccctctcagtggccccgtgatgtaggatcacagaagaggaaactgagggtcagacaagttaggcaaatgcccaatggagccaggacgtgatcgctggatgatcgggtgtcaaatcccgtactcttgacccctgctctgcggaagccaactgggagatgagggcagaggggctgccttgggcagggacaggggggctgctctgttggagggcct

SEQ ID NO: 60716 - DNA, 703 bp, Homo sapiens
ctccatacatgtttgatgaatgaacactgaaccacactacaggtttcaaagcctcatttgactctctagtctaggggggactagaaaggtcttttggcaagacagcaacaataataactaatgtttgttgagtatttctgtgtgcccgtgaatgttctaagcaccctacagcagtgcggtttcttttaactcagaaaatcgttgctggccccaggtagcctccatccatcagtgctgacatggcactacgcaacaggaaacagtctaccccagtaattctcaacaggataactttgtgccccgggagactcttggcaatgcctggagacatttttggttgtcacaactgagggagaagtggagaccagggatgctactcaataccctacagtgcgcatggctgcccccaccacaaagaattatctggaccattatgtcagcagtgcagaggtggggagaccctacatgacatgcattatctcctattytaccctctcagtggccccgtgatgtaggatcacagaagaggaaactgagggtcagacaagttaggcaaatgcccaatggagccaggacgtgatcgctggatgatcgggtgtcaaatcccgtactcttgacccctgctctgcggaagccaactgggagatgagggcagaggggctgccttgggcagggacaggggggctgctctgttggagggcct

SEQ ID NO: 60717 - DNA, 764 bp, Homo sapiens
gcaaaattgtgagtcaatttaatctcttttctgtataaattacccagcctcaggtattactttatagcaatgcaagaatgaactaatacagtgttgcagaatagttgatatagtgattgatatgattttcaaccataaatataattagtaccagataataaaatctgtaagaaaaaagtgttaatatgatttaaagagaaaattaaggcatacgattgtcaattgttaataaagagctttttattttttaaataataattggtgtcaaattactatggtatttatattttattggatacatttaaaacaatgatgtcaatatatatttaatttgttcatagatttgctgctgtagttacatgatgtagtgtgtataaagtgaatagcacagaaccttaacacctattaaatactcaaatatgttagttattatttttaaaatgtaaactaactatatatagttaattttagaataatgtgaaatgtaaaaaagacatttaagtatcatctaataatatcacaaaataaacagtactgttttcccttagtcraacatattataaaaaaacatgtagaccaacctttttcacaccagggatcccagttgtccccaacctttttggaaccagggctcagtttcatggaagacagtttttccatggatggtgaggggtggggatggttttgaaatgaaactcttccacctcagatcatcaggcattagattctcataaggagcacacaacctagattcctcaaatgca

SEQ ID NO: 60718 - DNA, 739 bp, Homo sapiens
catgagtgtttcctagacctaataacagtctccagttatgctggataaattttcyggatgtaggaaatgggaagaataaaggtataagataagatgttagaaatggatgttagggatttattacacctctagtctgagcacaggaaagcatttgcaaaaatatttgaccagaatgcactttaaaaaacaaaatatgtagatagcatatcttcaagatatagaagttactgggcaaatgaatttatgtagatagccaaattatcatttaacagttgtatttattcaggggtgggaaaataaaaaataaataattggttcatctggttttactttaccttgcaatagaaaaccaccttttaaaagctattttctattaaaggaaaaaataataaagtgttcaaatacaaaagggaacattttaattttaaaatatatttttaaatattgtacatatctatgaaaaaggtaaaaaatttgtctatatcaacagagttttgcataattttatgtgacatccacattcaattggaaatactttctgccatatggagaattggaatgcagacagaaacaatgaatattaacctttatttttttttctaaaacaggaattttaaggtgagccatttctgagctagcagtttaggtcaagttttgttgaagagaacttaggggatttctggaatatatctattctcatagttatatttatagctgtgcctctccctatgtctatatt

SEQ ID NO: 60719 - DNA, 1087 bp, Homo sapiens
tgctcttatgaaaacttctttccttttacactatctagttttagtttctgaccctttcttacttcttgagacaggtgcttagattactggctttcatccttccttcctttttaacatctgtttttagtactatactttctaagaaggctgtagctgcctctcacaagttttgatatgtagtattttcattatcattcagttcagaatattctctaatttcctgtgtgatttcttctttcttatcatatttagatatgtattgcttaatttccaaacatatgataattggctcactttctttgtggttatttcttcctagcttagtacgactatggtcggagaacatactttatatcattttaatacattgaaatgtattcatctttgctttatggccaaaagtcgtcaattttgggaaattctcacttgcatttaaaaagaatgtctagtcttcagcattgagttttgtataatatctctcaattcagtcaagtttgttaaacatgttgctgtaaacatctacattcttaatgatttttggtctgcttgttctttctgttacccagagatgtgttgaggtcagccaccatgatggtggatttattggtttcttagacctgccaatgttctgacagagttcgtattgttacgttttccaggcgagttgaagcttttatcataaaatgctcctcttcagtttaggttggcatgctatatttttttctcagacttttaactttttcatatccttatatttgagatatgccttgttttagcagcatgcagttgggtttggtctttgtattgagtctgaaaatttttgtattttaattgggatrtttgtttcatttttctataatgcaatttctgatatatttgggattaaatacaccacctttctatttttttctatttgtacctattcatctctctttttccctttcttcttgccttccactagattgattttgttatgattattccattttctcctcctttggcttgggaaagttatacattctattactattctttgtagttataaattatttttatgaattcttttactattctttcagtggttctc

SEQ ID NO: 60720 - DNA, 946 bp, Homo sapiens
gcatacactggaatcacattgttatgaaagggagagtccctaaaagaaaagaatgcagggtatgcaaatataagatggccactgcagccttttggtatatagagtccttcacagacatgattgcagccatgaatttaaaaagaattttggtgatgttcattgcatgtattttatgtctacacatccatgatcgtaacagcttttattttagtgattaaatgtatttcaacaaacaacttttgagtacattggtgttgcttgtcaggcaatataaaaataaatatgtctatctcctgtggaatttccaaacttgttggaagtagtaagggcaggaaagttaaaggtgtaaacaattttcaaagaaaataaaccatgagagatatgcaaagtatcgtgattgttctaaaggaatggggctatcttaggtcgtaaaaggcttccccatacrgatggtagccagagcagacatgggaaaccatagaagcttggtgatttactgagttggattggattataggagagtggtctgagagttggagaagatgaagatgaggtagatgccaactgtgttgtagatgaccctaatgctggcctgaggactttgtgcctccttcggtgggcagtgaaaaccactgattcaacaacaacaacaacaacaacaacaacagcaacaacaacagccacaacaacagccacaacaacagccacagccacagtgaatggcatggctaagaagcagtctgagcagtgtttctgttgttgtttttaaataagaaaattatctggcaccagtgtgtaggccgaattggacctgggagttgaagcagggagaccagttagagattatagaattgtcttgtgaatgaggtaaagattttttgaaatagaatgtaatgaagtgaaaatgtaaggtttcaggtgaacgtagttggggctttgtgatgca

SEQ ID NO: 60721 - DNA, 1402 bp, Homo sapiens
ttgcaaaaatcttctttattgtttcctcctctctctttcttgtatctttccttccttcctttattccccattttctcttaaaagcatttttgctgtatgcccaataatgaccacctaaatatttctacttcctaattcctagaactgtgaatgttgccatatatggcaaaagggtctttatagatgtgactaaataaagatgcttgagatggggagataatcctcgattgtaccgatgggcccattataatcaaaacagtccttataagaagcaggcagagggagtcaaagtcataggaataggtggtatgatgctggaaacagggactggggtgaagtgctttgaagatggaggaaggtggccacaagccaaggaacacaggcaaccactagaagatgagaaaggcaaggaaatggattctgtcctaggagcctccagaaggaatcagctttgctgacacmttcgccggtgaaatggattttagacttctgatctccagagcaatacgcaaatgaatttgtgttatattaaaccactaaggttgtacaaatttgttacaggagtagtattaacttcatatgactttcaaaaagaaaactaagtctaggccaggctcaatggctcatgcttgtaatcccagcactttgggaggccaagtcagatgaatcacttgaggtcaggagtttgagactagcctggccaacatgtggaaaccccatctctactaaaaatacaaaaattagctgggtgtggtggagggtgcctgtagccccagctacttgggaggctgaggcaggagaatcacttgaacccaggaggcagaggggcgaaggttgaagtgagccgagatctcatcatcgcactccagcttgggcaagagagcaagactccatattaaaaaaaaaaaaagtctaatcaagaaaatcaagaaactggtattattacacatattgtttagaaaacaaaactattaaatagagactaaacattgagcactgagtgaaaaatttcctgccaagcagaaagttcaactgggcacagagtctaggtcagctgttaggtggagttcagtggagaaccaggtagaattataaaggcaaaatactgtgaactgtttctgtcccatgttaggaaagcaacatctctgagtgaggttgactggctgtgggaccatgaggggccatccatgcaagccctggactggctagcagtgatctaatgggactgtgttgacctgactagtgatgacagcctccagctgccacgtgacatgctgttttagtccgtttagtgttgctataactgaagacctgaggctgggtaatttacaaataaaggaagtttattttgctcacaattttggtggcttgaaagtcaaagatcaggtggccagatctggct

SEQ ID NO: 60722 - DNA, 1402 bp, Homo sapiens
ttgcaaaaatcttctttattgtttcctcctctctctttcttgtatctttccttccttcctttattccccattttctcttaaaagcatttttgctgtatgcccaataatgaccacctaaatatttctacttcctaattcctagaactgtgaatgttgccatatatggcaaaagggtctttatagatgtgactaaataaagatgcttgagatggggagataatcctcgattgtaccgatgggcccattataatcaaaacagtccttataagaagcaggcagagggagtcaaagtcataggaataggtggtatgatgctggaaacagggactggggtgaagtgctttgaagatggaggaaggtggccacaagccaaggaacacaggcaaccactagaagatgagaaaggcaaggaaatggattctgtcctaggagcctccagaaggaatcagctttgctgacaccttcgccggtgaaatggattttagacttctgatctccagagcaatacgcaaatgaatttgtgttatattaaaccactaaggttgtacaaatttgttacaggagtagtattaacttcatatgactttcaaaaagaaaactaagtctaggccaggctcaatggctcatgcttgtaatcccagcactttgggaggccaagtcagatgaatcacttgaggtcaggagtttgagactagcctggccaacatgtggaaaccccatctctactaaaaatacaaaaattagctgggtgtggtggagggtgcctgtagccccagctacttgggaggctgaggcaggagaatcacttgaacccaggaggcagaggggcgaaggttgaagtgagccgagatctcatcatcgcactccagcttgggcaagagagcaagactccatattaaaaaaaaaaaaagtctaatcaagaaaatcaagaamctggtattattacacatattgtttagaaaacaaaactattaaatagagactaaacattgagcactgagtgaaaaatttcctgccaagcagaaagttcaactgggcacagagtctaggtcagctgttaggtggagttcagtggagaaccaggtagaattataaaggcaaaatactgtgaactgtttctgtcccatgttaggaaagcaacatctctgagtgaggttgactggctgtgggaccatgaggggccatccatgcaagccctggactggctagcagtgatctaatgggactgtgttgacctgactagtgatgacagcctccagctgccacgtgacatgctgttttagtccgtttagtgttgctataactgaagacctgaggctgggtaatttacaaataaaggaagtttattttgctcacaattttggtggcttgaaagtcaaagatcaggtggccagatctggct

SEQ ID NO: 60723 - DNA, 1551 bp, Homo sapiens
tccctaagacaagatctaataaaaaaaaagagcagaccaaataaaatagaaatagaattatagaaataaatgcttaatgaaaagattaaataacagattgaacagaattgagaaaattagcaattttggaagatagatttggggaaattacctaaaatatggtatggagtgataaaaaaaggaaaataaaatatttggaagataaatgaaggagctccaacacttatttaatagaagtagcagaaagggtgaatatagatggcagaagatagatatttgaaaaacaaatgaagaagattttcagatatgttaaaattcacattaaggcatccatttgatctttgacaatctgacattattagtcatcctggcatttattaacaatatgatctactgcaaattactaacttcttggagacttagtttcctctatcataaaaagggaatcatgaatcatgataattatttcaaagggtccttttgaaaactaaatgatattttatgcttagaaagcacttagcccaggttataatacacaggagcattcaataattgctcattcattaaattagaatttaaataataaatatgtttctattataattctattatctgttcttacggcaaagtttcctgaaaataaagaaactcattagaatgcaaatgcttcattactgggagtaatactatctagactcataacttataacatcttgacatagaagacagtgaccgtttaataaagattggacctgaaaatataaaaaacaccaaacattttgctgtatggtaatatctatgtataatttttaaacaaaaaatccactttgtaatcatctaaaatgtaggtctacaatttatttagtttttgaagaatatataaatgtatgtgaaagtaaaaaatgttagctctgtaaactgtaccttttccttaataaatttttaacctcagacttctgtttgaactagtattactccagacctacaaagtgctaacatctgaatgtcttatggctccatctagtgtcaaatgcttattaatacaatctgctttattaggaataagcatctgaatcttagatatatagagaattcatccatcatttagaaggggccacaccggcaatactaggtcagaagtcctttgttaacatcatgctctgtacacatttcaagamaattacctgttgagtccacgtgctttgttcccacacatgcctatttccactgtcctagacaggtaggaacccagtctcttttatctttgtggccaccaggctgtatgcagtgcctggaacagaccaagtgctaagtaaatctgaatggacaagagtagaaatatcaacaatttggtagaataacactgccattcaaaaggaaaaattttgatatccaaagtgattgtcttacatgagagaggtgtatccttacaaagaatatcaaaaatctctggaagtacagctatacaaagtcatttttatgtaacttggccttagttgagtctttcagcgatttgatattgatggcctgatagtgtggctgtgaaggatc

SEQ ID NO: 60724 - DNA, 1367 bp, Homo sapiens
agtttcagctttctacatatggctagccagttttcccagcaccatttattaaatagggaatcctttycccattgcttgtttttgtcaggtttgtcaaagatcagatagttgtagatatgcggcgttatttctgagggctctgttctgttccattgatctatatctctgttttggtaccagtaccatgctgttttggttactgtagccttgtagtatagtttgaagtcaggtagtgtgatgcctccagctttgttcttttggcttaggatcgacttggtgatgcgggctcttttttggttccatatgaactttaaagtagttattattattatttttagatgatgtctcattctgtcacctaggctggagtgcagcggcacaatctgggctcactgcaacctccacctcctggattcaagcaattctgtctcagtctccccagtagctgggattacaggcgctagccaccatgcccagctaatttttgtatttttagtagagacagggtttcactatgttggccaggctggtcttgaactccttacctcaagtaatctgcctgcctcagcctgggattacaggtgtgagccattgcactcggccaaatttttattacctcacttaacttagctcatataaatatgagcttccttatttggaaggaaaaacactggaatgttcctatatttctttaactggtgctttcccatatatactcattgtctaaactatgctttacttaccatcttagcaataaaggaacaaggaaattctatctttttaaaaggggtgataactgtgggtggctgtggcaatgtgagcagacagtggggaggtggtgatctatgagctaagataaacagatttgtgaaccatggctttatgggaaaattctttttcttcaattttaagtgagtcatactttttttttctcttcttatagaaattctcatgaagcacagacagtcatgaagttgggaacttatcaatctagttggagccatgggacattaaaataatgttttctcctcagtgcccctggaccttgaactagtaggaagcaaaaagcagaggtttccattgagttgggctatttggggaacttccattgacttggacaatggaggttcagctatccatcaaactatttgcagagtccaaatttttatgcttcccactgaacccccaagtcaaaaaaaccataaattatgttgtaccatatcaaattgtcattttaaaaaaagtttaaaaataatcaaatattggcagttttatttggttcaaagtatagatgagttttcaattttcatgattttttgaagagttaacttctaaaaatagcaagcaagaatattaccagtaacaaa

SEQ ID NO: 60725 - DNA, 737 bp, Homo sapiens
aggagtgatgcaagcagctgagtgtccaggcaagggtcagtcagggcagtgtaaaggattagaatgtaccatctcaaaatatgctgctttggcatattcattattttcagatgaaggcagttgagaaacagcatatgcaggaagggctctctgccctccccttttctacctaaaagcagagcataaatttcccataagtaccctcccygtaccaggaagaagagtagaacattcttatcattggagatggagagttgatactgagatgaatctataaaaacaaatcttactaaaataacttatatcttccattagtttctttatatattttatagtcacttttccacaattcactacccctagcccaagcctttttttcctttgtcttgccacatctttacaatttattgccctttgttaaaatggtatatgagcccctaggtctaacggtcctttggattttcatttttttctatgaagcctctcatgttatataaaaatactaattaatatcaaataaaatgtgtatagttttcctcctgttagtctgttttttgtccgttcaagctatcatctccagactcagaacctaagggggtagaggaaaagcctttcctcttctacagcaggaaggaggttggcatatttgatattcttcccaggaagaggaaaaagaggaggaagccagtggggctggcttggagtgaaacaggggatgtgggtgtgtgcaggatccc

SEQ ID NO: 60726 - DNA, 737 bp, Homo sapiens
aggagtgatgcaagcagctgagtgtccaggcaagggtcagtcagggcagtgtaaaggattagaatgtaccatctcaaaatatgctgctttggcatattcattattttcagatgaaggcagttgagaaacagcatatgcaggaagggctctctgccctccccttttctacctaaaagcagagcataaatttcccataagtaccctccccgtaccaggaagaagagtagaacattcttatcattggagatggagagttgatactgagatgaatctataaaaacaaatcttactaaaataacttatatcttccattagtttctttatatattttatagtcacttttccacaattcactacccctagcccaagcctttttttcctttgtcttgccacatcttyacaatttattgccctttgttaaaatggtatatgagcccctaggtctaacggtcctttggattttcatttttttctatgaagcctctcatgttatataaaaatactaattaatatcaaataaaatgtgtatagttttcctcctgttagtctgttttttgtccgttcaagctatcatctccagactcagaacctaagggggtagaggaaaagcctttcctcttctacagcaggaaggaggttggcatatttgatattcttcccaggaagaggaaaaagaggaggaagccagtggggctggcttggagtgaaacaggggatgtgggtgtgtgcaggatccc

SEQ ID NO: 60727 - DNA, 737 bp, Homo sapiens
aggagtgatgcaagcagctgagtgtccaggcaagggtcagtcagggcagtgtaaaggattagaatgtaccatctcaaaatatgctgctttggcatattcattattttcagatgaaggcagttgagaaacagcatatgcaggaagggctctctgccctccccttttctacctaaaagcagagcataaatttcccataagtaccctccccgtaccaggaagaagagtagaacattcttatcattggagatggagagttgatactgagatgaatctataaaaacaaatcttactaaaataacttatatcttccattagtttctttatatattttatagtcacttttccacaattcactacccctagcccaagcctttttttcctttgtcttgccacatctttacaatttattgccctttgttaaaatggtatrtgagcccctaggtctaacggtcctttggattttcatttttttctatgaagcctctcatgttatataaaaatactaattaatatcaaataaaatgtgtatagttttcctcctgttagtctgttttttgtccgttcaagctatcatctccagactcagaacctaagggggtagaggaaaagcctttcctcttctacagcaggaaggaggttggcatatttgatattcttcccaggaagaggaaaaagaggaggaagccagtggggctggcttggagtgaaacaggggatgtgggtgtgtgcaggatccc

SEQ ID NO: 60728 - DNA, 737 bp, Homo sapiens
aggagtgatgcaagcagctgagtgtccaggcaagggtcagtcagggcagtgtaaaggattagaatgtaccatctcaaaatatgctgctttggcatattcattattttcagatgaaggcagttgagaaacagcatatgcaggaagggctctctgccctccccttttctacctaaaagcagagcataaatttcccataagtaccctccccgtaccaggaagaagagtagaacattcttatcattggagatggagagttgatactgagatgaatctataaaaacaaatcttactaaaataacttatatcttccattagtttctttatatattttatagtcacttttccacaattcactacccctagcccaagcctttttttcctttgtcttgccacatctttacaatttattgccctttgttaaaatggtatatgagcccctaggtctaacggtcctttggattttcatttttttctatgaagcctctcatgttatataaaaataytaattaatatcaaataaaatgtgtatagttttcctcctgttagtctgttttttgtccgttcaagctatcatctccagactcagaacctaagggggtagaggaaaagcctttcctcttctacagcaggaaggaggttggcatatttgatattcttcccaggaagaggaaaaagaggaggaagccagtggggctggcttggagtgaaacaggggatgtgggtgtgtgcaggatccc

SEQ ID NO: 60729 - DNA, 872 bp, Homo sapiens
tcccagcttgggctcttccagttggtaccctgtgcttccccagctgtcccacagaacgtggccttcccgccacaacggtgtggtcctaggaacacccaccagagaatccaagggaggtagatgtttgttgaaactgatccttagacccacccctccatcagatttcctgaattaaaatctctagtggtgggtttgggattgtagtgccacccacttaggagagtgtacatcagaagaaagtaaaatggttgaactcaaactggctcactagtccgtggttataaactgtcaggccctttaaaagtgtaagggaaccttatgagcaaaattcgagtttaggtgtgtattagtccattttttgtgttgctataaatgaatacctgagattaggtaatttataaagaaaagaggtttaatggattcatagttctgcaggctgtacaggaagtgtgatgccagcatttacttctggtgagggcctcagggagcttacaatcatgactgaaggtgaaggcggaagcagcgcatggtgagacagggagcaagaggaggtgggggagatgccacacacttttaaacaaccatatctcacataaacccagagcgagaactcactcattaccaagaggatagcacccacgaggtcatgaggacccacctccaygaccaaacacctcccaagaggccgcacctccagcacctgggatcacatttcaacatgagatttggaggggacacacatccaaaccatatcaaggtgttatgagaaaatgagcgaagggtctttcctaggaggacagttggtggctttttggtactgtgcttcatagcactaatttccagagttcaaagatcttttccagtaacctcca

SEQ ID NO: 60730 - DNA, 879 bp, Homo sapiens
caaatccagctcacaggcactagatgatgatcgatttgctcctctttctattgcttctggttcttctgcacctgtgatgaaatttaaattggctgcatccacatcaaagaaaataaatttcttgatagaatttaaatgttaagtgtcctgaaatgtgtttacttctggatcagaaatgagaatgtactgaaacaggaagtcagcttcacagcaggaagcagacctcaaagaaatgtgactcacatagtcttttgaatgtgctccacttggggacacaatgttccccacagcttgcccatctcatccattctaactttcccatgggacaaaaagcatcataacaaagaattagaggagaggaacaaatcaatcaaaatggtagtaatgcagtaattatacaagaaaaaaaacaatgaccaaaagaatactgtgatgataatttacaaatacattatttaatgcaaaaatatcaaccctttaagatcatggccaacttaagttaaaactgataattagggtgatgacataatrtatcactcataacaggacacttctgaaagtaaaaggtggtgcccttaataattttatcaggacagccaacgtgaaccggaactgttccaggcaatctagtacatatggtcacccaagcgataattcacaaacaacacatccttcaagaaaagtgtgggaattccaagcatctagatacgcacttgctcagtaagaactttgtaacattattggcagtaaaattctgagaacgtagcctcaggattatctagcaacccactaattctagcgcacagacactcctgacagctgtggactttctgtatctcagagatttaggtcaacctgacttcagtccattaggatcca

SEQ ID NO: 60731 - DNA, 879 bp, Homo sapiens
caaatccagctcacaggcactagatgatgatcgatttgctcctctttctattgcttctggttcttctgcacctgtgatgaaatttaaattggctgcatccacatcaaagaaaataaatttcttgatagaatttaaatgttaagtgtcctgaaatgtgtttacttctggatcagaaatgagaatgtactgaaacaggaagtcagcttcacagcaggaagcagacctcaaagaaatgtgactcacatagtcttttgaatgtgctccacttggggacacaatgttccccacagcttgcccatctcatccattctaactttcccatgggacaaaaagcatcataacaaagaattagaggagaggaacaaatcaatcaaaatggtagtaatgcagtaattatacaagaaaaaaaacaatgaccaaaagaatactgtgatgataatttacaaatacattatttaatgcaaaaatatcaaccctttaagatcatggccaacttaagttaaaactgataattagggtgatgacataatgtatcactcataacaggacacttctgaaagtaaaaggtggtgcccttaataattttatcaggacagccaacgtgaaccggaactgttccaggcaatctagtacatatggtcacccaagcgataattcacaaacaacacatccttcaagaaaagtgtgggaattccaagcatctagatacgcacttgctcagtaagaactttgyaacattattggcagtaaaattctgagaacgtagcctcaggattatctagcaacccactaattctagcgcacagacactcctgacagctgtggactttctgtatctcagagatttaggtcaacctgacttcagtccattaggatcca

SEQ ID NO: 60732 - DNA, 879 bp, Homo sapiens
caaatccagctcacaggcactagatgatgatcgatttgctcctctttctattgcttctggttcttctgcacctgtgatgaaatttaaattggctgcatccacatcaaagaaaataaatttcttgatagaatttaaatgttaagtgtcctgaaatgtgtttacttctggatcagaaatgagaatgtactgaaacaggaagtcagcttcacagcaggaagcagacctcaaagaaatgtgactcacatagtcttttgaatgtgctccacttggggacacaatgttccccacagcttgcccatctcatccattctaactttcccatgggacaaaaagcatcataacaaagaattagaggagaggaacaaatcaatcaaaatggtagtaatgcagtaattatacaagaaaaaaaacaatgaccaaaagaatactgtgatgataatttacaaatacattatttaatgcaaaaatatcaaccctttaagatcatggccaacttaagttaaaactgataattagggtgatgacataatgtatcactcataacaggacacttctgaaagtaaaaggtggtgcccttaataattttatcaggacagccaacgtgaaccggaactgttccaggcaatctagtacatatggtcacccaagcgataattcacaaacaacacatccttcaagaaaagtgtgggaattccaagcatctagatacgcacttgctcagtaagaactttgtaacattattggcagtaaaattctgagaacgtagcctcaggattatctagcaacccactaattctagygcacagacactcctgacagctgtggactttctgtatctcagagatttaggtcaacctgacttcagtccattaggatcca

SEQ ID NO: 60733 - DNA, 654 bp, Homo sapiens
ttggatgattggagaagccagttttcctatgaatttgaaaacttttggtaagaatcttagtactaggaggaatggcttcagggcagttgagtttaggagcagtagttaccttccgtgccattccttaccaggcaaaagggaggaaggaggagtagatgatttttctttaaagtctatgggtggccttacaaatgtgggatctgatatcctgataattgccaaacttctcttttgtgggaatagcctgtattagccctagatttgatgggaagtccagtcagaatgttatggggagaatgctacttcgccactcctcaagtttccttccaagtggatggtgccccattcttgtcatctcctggtcactctccctttttactccacccttgcgcaatgtgggagatgggcragttggagagaggagtcatttatctgattgggaaatttagaaattggtcatatgctttctcagctttacccagtttttccctcttgggagtaagttatcctcagatagagctcccctctactctatgctctcactcctaagctgagcaagttccctgtccatcgactgtatctgtggtaggtaagtctgcctaattctggggcttagttaacaggcctatttgatttttgtattaagttacattc

SEQ ID NO: 60734 - DNA, 772 bp, Homo sapiens
cttctgtataaattctccaatggtgttccatttcactccttaccacagcctacaaggcccatcatgatctgccccgacctactctctgatcctctctcttcctgctcaagtgattctggccaccctttttttttcttcttttttagacagtcttgctctgtcacccaagctggagtgcagtggtgcgatcttggctcactgcaacctccacctcccgggttcaagcgattctcctgtctcaacctctagagtagctgggattacaggcatgcgccaccatgcccagctaatttttgctcaccctggctttttaatgtctctggaatatgctgccactcattcctgcctcagggtctacttctttgcatcacagcagatgccattatctgacatcacactatatatttatttgcttgtgtagttggtccccttctccaccctacagtagaatgtaagtccagtgaaaatgaagactttgttcactgttatgtcccagtacctagaacagttccaggcactaagtagacactcaataaatgttgactagtgaaaaaaaatgtgagacctgggatcctgccttataaggactcagtgtctagaaaagggagctgttttccatgcaaataactgtagtacaaagacragtgtaggcaaattgctatggggcttcaaagaaaggagaggcaatccggggcttggggaatcagggagggctttgagctgatctcccaggttggcagagttgagtcaagagagcatcgagagctaaggc

SEQ ID NO: 60735 - DNA, 1245 bp, Homo sapiens
tgatattctgtggaatgttaaaataatccaggtcccttttgtgaacaaaaggaagcaagagagttaagacagctctggggcaaaaaagtaagtatttatctcagatgaatacaaacagcttgaatttaaaaaatgtgttgctcagattaacaactacccatcccgtgtcagagctgggtagatatgttctagtcaggatatcaaatttggcacaggagatatgactggcaccacagctggcttataatggattaccatcatctgccatgatttatctggaattttccatgaccatatcagtgaattaaactttcagtcaccgaagttgacactagtttctataattctaccccagaaaattaaattttaaagatttactaatttaggggaaagttccagggtttccatttgacttttcccatcataatgggtcttaatccatagattgagaaaacaatatgagtgttctgccagctgcactaatcacctagggaaatgatgacagaaaagtccattggacacactgtatgatggccttggtctccataggcccccactctaacagragttatcatagtactttgggtcttctggtaacagtgtcagctcaaactctgtatcatagccctcaaaatatctgggtattatccctcttctagtgtataattattctgttaaatggccatacttttctatgggaaagaattgggagaatatttttgcataacttggtgtggcattccagggttcttttttaagtggacctcatctttaagtgatggactcaataactagctcagatttggaaactggcaagaagtaatgacttgtcattacagcaaccctttcctgaagaatctttggccttttgttgttattattgttaagtcaagaggtgcccttattggctgcctattcatcttgttccaaggaataccattgtttatcagccattgtcacaaatccacgtggtcaagaccccctggtttcctctctggccttgcccctccgttttcccgggcaataaaatatgtccactaaaatcctgttattctcgttgacactaggaagcctgttttcaaggattatttcctaccatcaccctggcttacaggagaccatgaagcttttcagtgaatctggtatcttcctcactcatgcacaccttattgctttagtgaaggaggtgtcgttcaggcttttttatggaacatagctagctggtggacttctgatttcattttg

SEQ ID NO: 60736 - DNA, 775 bp, Homo sapiens
  misc_feature (1)...(775): n = A,T,C or G
ttcatagaagacatgcacatgtagacagttctggtagctctaataaccagcaaaaaacatttgctttgtaatttacatgatcaaaagttaaaagtatggatattgccttaaaatattttatgttaatgagttaacacagtcaacaaaaatgtgtattggatttttagaaattcagtattgttttaaaattttaatggttactccaatttaggtcaagtatatttaagatgatgcaatatgagtttttatcaaaattattaggataaaatatttggttacatatctcgcagtgatacacatttaaaaaaaaatcaaaggacaaaaaaaamcaaaaaaacccaccctgatcactgatatgctgatactcacttagcatgacgaatatctggcagagacctctctagagcaatattgttgctgacgaaaatattaaaaccattttccctgtaagctgagtcatcatggtcctcttcagtaagggggtaaggtttcccatgttcacctttccctagcaggagaaaacaaaatgagattatcatctctataaaagccattttatcttctagaacagataggaagactggaatgtgtattatcgcctattgctgtgctctgcagaaggagctagtactaagattttattatattattttaattgcctttaagtaaatgaatttactcaatttaaaaagcaaccacacagaagttgaaaggtgtatctcactttgcagagagaaccactgccagatttttagngtacgttaattaatacttg

SEQ ID NO: 60737 - DNA, 930 bp, Homo sapiens
gggaagcataaatccccagaaatggaatwactgagatatctttaaagtacatataacagttttgacacatcctgagacacactgtaaattttcagcttcatcagtaaaatatatattcctcatattttaatttgacatttcttgattactatgaattaataatttcttatatctttatcatttgtatttccttcattgtgaaatgattgttcaagcatttttaaaaacagtttttgttttttacatactatatttattatatttttgttaattacatatgttgcaaatattttattttattaaatcagattaatttttccatccagatgattttacttttttcttttataatttctcgttttatattttatatatttacaaagaaggccttccctagtctagtatcacttttagtatctatttaaaaactcagagttttactaccattctgtttttattttatctatcaaaatttttgaaacatctggaatatgttttggtgtgagaagtgcgataaatataatttttatttttttcaaagcaaatgttcaggcagttatagaaatactatttattgaggctggtcatagtggctcaggtctataatcccagcactttgggaggtcaaggcaggctgatcacctgaggccaggagtttgagaccagcctggccaacctggcgaaatgccgtctctactaaaaatacaaaaattaggcaggcgtggtggcacacacctgcaatctcagctactggggaggctgaggaatgaaaatcgcttgaacccagaaggcagaggttgcaataagccaagattgggccactgcattccagcatgggtgacagaacaagaccctgtcatattaaaaaaaaaaaaaattatcgagtaatttgcttttttcttccctgctttaaaatgctatgtacaaaat

SEQ ID NO: 60738 - DNA, 930 bp, Homo sapiens
gggaagcataaatccccagaaatggaattactgagatatctttaaagtacatataacagttttgacacatcctgagacacactgtaaattttcagcttcatcagtaaaatatatattcctcatattttaatttgacatttcttgattactatgaattaataatttcttatatctttatcatttgtatttccttcattgtgaaatgattgttcaagcatttttaaaaacagtttttgttttttacatactatatttattatatttttgttaattacatatgttgcaaatattttattttattaaatcagattaatttttccatccagatgattttacttttttcttttataatttctcgttttatattttatatatttacaaagaaggccttccctagtctagtatcacttttagtatctatttaaaaactcasagttttactaccattctgtttttattttatctatcaaaatttttgaaacatctggaatatgttttggtgtgagaagtgcgataaatataatttttatttttttcaaagcaaatgttcaggcagttatagaaatactatttattgaggctggtcatagtggctcaggtctataatcccagcactttgggaggtcaaggcaggctgatcacctgaggccaggagtttgagaccagcctggccaacctggcgaaatgccgtctctactaaaaatacaaaaattaggcaggcgtggtggcacacacctgcaatctcagctactggggaggctgaggaatgaaaatcgcttgaacccagaaggcagaggttgcaataagccaagattgggccactgcattccagcatgggtgacagaacaagaccctgtcatattaaaaaaaaaaaaaattatcgagtaatttgcttttttcttccctgctttaaaatgctatgtacaaaat

SEQ ID NO: 60739 - DNA, 930 bp, Homo sapiens
gggaagcataaatccccagaaatggaattactgagatatctttaaagtacatataacagttttgacacatcctgagacacactgtaaattttcagcttcatcagtaaaatatatattcctcatattttaatttgacatttcttgattactatgaattaataatttcttatatctttatcatttgtatttccttcattgtgaaatgattgttcaagcatttttaaaaacagtttttgttttttacatactatatttattatatttttgttaattacatatgttgcaaatattttattttattaaatcagattaatttttccatccagatgattttacttttttcttttataatttctcgttttatattttatatatttacaaagaaggccttccctagtctagtatcacttttagtatctatttaaaaactcagagttttactaccattctgtttttattttatctatcaaaatttttgaaacatctggaatatgttttggtgtgagaagtgcgataaatataatttttatttttttcaaagcaaatgttcaggcagttatagaaatactatttattgaggctggtcatagtggctcaggtctataatcccagcactttgggaggycaaggcaggctgatcacctgaggccaggagtttgagaccagcctggccaacctggcgaaatgccgtctctactaaaaatacaaaaattaggcaggcgtggtggcacacacctgcaatctcagctactggggaggctgaggaatgaaaatcgcttgaacccagaaggcagaggttgcaataagccaagattgggccactgcattccagcatgggtgacagaacaagaccctgtcatattaaaaaaaaaaaaaattatcgagtaatttgcttttttcttccctgctttaaaatgctatgtacaaaat

SEQ ID NO: 60740 - DNA, 930 bp, Homo sapiens
gggaagcataaatccccagaaatggaattactgagatatctttaaagtacatataacagttttgacacatcctgagacacactgtaaattttcagcttcatcagtaaaatatatattcctcatattttaatttgacatttcttgattactatgaattaataatttcttatatctttatcatttgtatttccttcattgtgaaatgattgttcaagcatttttaaaaacagtttttgttttttacatactatatttattatatttttgttaattacatatgttgcaaatattttattttattaaatcagattaatttttccatccagatgattttacttttttcttttataatttctcgttttatattttatatatttacaaagaaggccttccctagtctagtatcacttttagtatctatttaaaaactcagagttttactaccattctgtttttattttatctatcaaaatttttgaaacatctggaatatgttttggtgtgagaagtgcgataaatataatttttatttttttcaaagcaaatgttcaggcagttatagaaatactatttattgaggctggtcatagtggctcaggtctataatcccagcactttgggaggtcaaggcaggctgatcacctgaggccaggagtttgagaccagcctggccaacctggcgaaatgccgtctctactaaaaatacaaaaattaggcaggcgtggtggcacacacctgcaatctcagctactggggaggctgaggaatgaaaatcgcttgaacccagaaggcagaggttgcartaagccaagattgggccactgcattccagcatgggtgacagaacaagaccctgtcatattaaaaaaaaaaaaaattatcgagtaatttgcttttttcttccctgctttaaaatgctatgtacaaaat

SEQ ID NO: 60741 - DNA, 834 bp, Homo sapiens
gatcctgcagaggagcaaggaagtccagactctgattgtcagagcagtcttccacggtcacctgtctcctaaccccagcccaatttcattttccagcctctgcccacaacacttccycagcacaccctcccaaccctggcccaccagtctgttttccacctcaaaggggccatgcttgttcctttcacccgttatcccccatctctacgtccccagaatcactcactctagaatccttccagtgaaaaccgcaggctccaccttgcctctcgtttgaccattcttgggttttcagggtgaatctcttcccttcaatagctcccacccttcatttgcacagtacgcagtatttaacttttctccacaggttccaaaggctgatttcttgcaagcaaaggccacctgatgtgtctttttttacaaatctctgctgaacaggtaacaggtgcccaataaaactttgtgagttggcagtctaagggcatctaccctcaaaacagctaacgtagcattttatgggagtggaaacggagtcgtgtggaaagacgaccaggcactttcgtttttgagatggagtctagctctgtcccccaggatggagtacagtgctgcgatctcagctcactgtgggcatgcaccacaaagcctggctaatttttgtatttttagtagagacagggtttcaccatgttggccaggatggtctccatctcctgaccgtgtgatacacccacctcggcctcccaaagtgctaggattacaggcgtgagccacaactggcccaggcattttttttttttggaaaagaatgtattttcacttcctttgagatac

SEQ ID NO: 60742 - DNA, 834 bp, Homo sapiens
gatcctgcagaggagcaaggaagtccagactctgattgtcagagcagtcttccacggtcacctgtctcctaaccccagcccaatttcattttccagcctctgcccacaacacttccccagcacaccctcccaaccctggcccaccagtctgttttccacctcaaaggggccrtgcttgttcctttcacccgttatcccccatctctacgtccccagaatcactcactctagaatccttccagtgaaaaccgcaggctccaccttgcctctcgtttgaccattcttgggttttcagggtgaatctcttcccttcaatagctcccacccttcatttgcacagtacgcagtatttaacttttctccacaggttccaaaggctgatttcttgcaagcaaaggccacctgatgtgtctttttttacaaatctctgctgaacaggtaacaggtgcccaataaaactttgtgagttggcagtctaagggcatctaccctcaaaacagctaacgtagcattttatgggagtggaaacggagtcgtgtggaaagacgaccaggcactttcgtttttgagatggagtctagctctgtcccccaggatggagtacagtgctgcgatctcagctcactgtgggcatgcaccacaaagcctggctaatttttgtatttttagtagagacagggtttcaccatgttggccaggatggtctccatctcctgaccgtgtgatacacccacctcggcctcccaaagtgctaggattacaggcgtgagccacaactggcccaggcattttttttttttggaaaagaatgtattttcacttcctttgagatac

SEQ ID NO: 60743 - DNA, 1308 bp, Homo sapiens
cgcgtccttcccaccctgggtcctgtgtgtgcccattacagtgtgtttcctattaaagttcctttcatgtttgggccaagggtgtttcctttaattcctgctggcatagaagaatgaggttttctgcagcaatttctaagtctgaaaagggaggctctggggtaagaatgttgaacaattaaaatgattagaaattatctatataaaatacaggtatacaaaatatgtatattgaatcctagctagacagacggtatccccgggagaactcctccttgaggaatgggccattcgcttcataatagatgcaagatcatcctcgggccagttagcatgcacagtttcccgggatgctttgcgatacaaattcataaacattgattgaaaggtcaggggacgttcccatcaacacgcggctctgtcggattgttcaagggaaagttagcaccgttgcatgcaggcagttgagttcttagggaagagtgctggccctggtggagttttccacgtctgtgtgatttggtgtggtgtgatatagtcactgggacttggttcggcgcagagagagctgcatgtttctgctcatgttatctggaaataaggattcaggctctgtgtgctgaattatgtttgcggtgatctcacagttgtgaagaagaggcatggctaggaggcatgttcagagctggagagggtataaaattctcatttcttaccttctctgagggaaggagtgtggagtggcagatttccagtctctgggtcttatatcagtgttgttctctgggaccagcactgtcctcatatggctaccactgggacgtgtagttgacctctgacgtgcacagcagatgcacggacaggcagggtggtgctgggtgagcattagccgtgtgcagctggtgagcctatgccttcttgttggcaggcctcgctgctgagagtaagttggtgaggacccatgcacgttggttctcgcatgtttccaaaggtcacttcctgcctcactggtgagcctttctcccaaatgagaactcctcgctcttgcctccctttctactttctacatcttcctgggacttcctggccatctcctttctgcatgcatgctgcaggaatttccactccaggcaggragctctcagtatctgcacagcccaggtgcaggacatgtgctgcccaggctgggttgctgtctgttgtttcaccctgcacagtgaagagaatggggggttaatgtgtcaggcatggcatgcgtgatttagaaccattcatgcctccaagtatttgaggcagctcctgggatcc

SEQ ID NO: 60744 - DNA, 795 bp, Homo sapiens
gatcctgggaaaactgtaactgcagtctaattttatatattcaagaggttattcacatttaataactccttttgtaacccttaagtgtatagaaaaatgaatgtctatggmattgtgggttattcacttcataagaaccaaagagttgaacttcatctttggattagtttggttcccattcccaagacactcctggtccacaagcagactggggagcttatatggtgaatctcagttctagaccaaggcctccctccactcagatgaggccctggccacaggctggtcagtgcgggttcccgggccaacaccaggcctcccacctcccatgctagccctctgccccacaccacgctgcctctgagtttcgagatgaacccaagtgcattttcctactttattctacccttttggaagaggtgaaaaacaaaatatagatatttataattaaataaaaccttctttagaatacatttttaaccagagtatgtttgctaaaataattgtttagagatacaccatacttttaattttcagattattttgtcacttgagtatttcaactcaactgagacttaaatggttcaacttggttttctcttccttcttctcatggagaaaccaatattttcttattctaagccttatcttattctatggcttttcaggtgactaagaaaacagactacttccctttcagatgacttctctgagaagatctatgatcaactcaagcgctggtctttgacctggaaaattaaatatgatgtcccactcttaggaaaaaaaggtaaa

SEQ ID NO: 60745 - DNA, 795 bp, Homo sapiens
gatcctgggaaaactgtaactgcagtctaattttatatattcaagaggttattcacatttaataactccttttgtaacccttaagtgtatagaaaaatgaatgtctatggaattgtgggttattcacttcataagaaccaaagagttgaacttcatctttggattagtttggttcccattcccaagacactcctggtccacaagcagactggggagcttrtatggtgaatctcagttctagaccaaggcctccctccactcagatgaggccctggccacaggctggtcagtgcgggttcccgggccaacaccaggcctcccacctcccatgctagccctctgccccacaccacgctgcctctgagtttcgagatgaacccaagtgcattttcctactttattctacccttttggaagaggtgaaaaacaaaatatagatatttataattaaataaaaccttctttagaatacatttttaaccagagtatgtttgctaaaataattgtttagagatacaccatacttttaattttcagattattttgtcacttgagtatttcaactcaactgagacttaaatggttcaacttggttttctcttccttcttctcatggagaaaccaatattttcttattctaagccttatcttattctatggcttttcaggtgactaagaaaacagactacttccctttcagatgacttctctgagaagatctatgatcaactcaagcgctggtctttgacctggaaaattaaatatgatgtcccactcttaggaaaaaaaggtaaa

SEQ ID NO: 60746 - DNA, 831 bp, Homo sapiens
ttacacatcatttcattaggtttcttagctttgctcttctctaatgcgactactttttatttaataaaagtaaaaggaacataatttaatatatacatgtttgttttacactagaattttcagaaatgtaggcggtatataaacagaagcaggtaggattctgaaaggacttcgaagaatgagttttcacgtcttagtttgcatcctgctgtgttcctggcttctctttgcagaaaggtttctgagtccacacagtggagtgtcatgtctccctcgtctcccatttaccctttcgtgtgccctgatctggtttctacaggcactgctcctagtgayattttagtaaacggttcctagtgatgtctccaaagacctccacactgcacaccaatgggctgcgccctgactgcatctcagctgttggaacgtcatcttttcttctggctgtcctccaactcaccacacacacacctcagccccctctgttgggatctctaagggccctctcctctcttttcctgctttttcttcctaggtatggtcattcatttccaggttcggaacacaatctgtgtgctaactactcccacattttatttctagtccaggccatttctctgagtgtcatttcctcagagctgacgttgccacttgggcatctcacggatctcccagcttcaccggccctgcacacttacccccatcctcccgcccttccctgagtcttctcagtgacagaaaatggcgtccatattcaaccaattgctcaaaaagcacaaagcatagatgccatcatacttctttcttccactctgtttgcaagtcaaatcc

SEQ ID NO: 60747 - DNA, 1303 bp, Homo sapiens
tgcatgaccctgagaagactcagccccctgccacagtaggacaggtttctcaaacaacccactagggttaggggcccgcaggtttcattctgcccctctccaggtcagggttcctaatgcactccccccaaagctccccatcaccctgccctctccaaatcctcgtcactgtcacaagcttggtcttccaggcaccgtgtatggccgtggtccctgtagtcgcccatacaatcactcccttcttagtaacaggaatcttaatttgattcagcttcagaaatactttttccagcctcttttgctgacaggggtgcctgtgtgatccagttctacccagggaattgtgacccagcgctctgtgagcttccaagagaggaggaggcagctgccatccaccctttaccttcttccttcctccttcttcctaaaacgtgtgctggctggagctcccgcagccaaggaatgagacctgacctcgtgctaagaagagtgagactgagacctgagaaggagcctgggccctgacggtggaggaayccccacaccagcctgcaccatcgacctctcatttccgtccggcgctgggatccaggcttcctgctctgcaactgaatccattctgacacactgtcttacagttctggtataaagggtcagacttcaagttagccaagggaggcagtgggggaaagtaacagccttggcactacccggccccctttctatcaactgcccccgctctgcccgctccagacacatgtggagggggattaagtgtcgagggagccaaggtgaacagcaggaaaaggaaagcagtggagacagagatttccaccaggctttactcacaatgcagccatacggattaatcccacagccaccacagaaggttgtgttacccccgcctcacaggaagaggctctggcaggaagaacagctggacccgagtcagacacgcaggtcacgggcccagagcagggccggcccaggcccaccgcactctatgacatcggccaccaggctggtctccaggaaatagggccctggtgtctacttcctaaactccctgtgaattgccaggggccagaatgtgggtaggtgggagaacagatggaggctgaaggacctctggtggcaaaacactgacctctacagaggtctcatcagaaagcctgaaatcccacgttagatatttcagaaagagggcaagcttctgttctatacatttgtatgttatttaaagttacatagccagacaaatatgtacataacactatgggttttggtggtaaatgttttatct

SEQ ID NO: 60748 - DNA, 1054 bp, Homo sapiens
gggcggtgagagcacagggctggggggacccctctgtcgaggggccacagctcctcacacagcagagctttatggatgaaagggctgagaggcacagacaggctgagaaatgggcccaaagtcccacagcatggagccaggaggtagcagacggcccctgcccgcccccctcacttggctgactgctcccacggcagccaccacctttatcctgagtcccggggtcctccatcaaatcgctgagcctcgggtggtcttgtggaccccagcttgtctgtgttgtgttgacaacatgggcctggctaccggcctaagtgcacttctgaggggtgtcagggaagcctttgctgcggcttggggattacagaattttaaacagcaagaaccttccctttgctagtccaagcttccctttgtatgagaaactgcttacgtctagagaggaaaaatggttgagaaataggaggaccagagaccaatcacgcggagttcttaatcakgtgaaaatattttattttgacgtgctttttcttgagtgcctgaatgtggtggctcttagggtaaccccagaatcctcactgcggcaacaagacctggccaccaccctcacctcgaccaccacggccttcgctgcagccccactctgactccccgggggctgctcacgtgccagcacccactggccaagcatcctccggcaggacccaagtcctctgtattcagaggccgaccctgctttccagagactcacgaggtggcagagagtcaggctgtggcaggggcccctgtgtatcgaggagaggaggaagagtctgcagaggtttctagggaaggagatagtgtggaagtgactgtggctctggtcctgcctgggaggagatctacaggggaggggcctggccttgggctggccctgccctgcgtgggatctgtgccctgcgtgggatccctgccctgtgtggggtgcgtggggtctgtgccctgtgtggggtgcctgccctgtgtggggtgtgtggggtctgtgccctgtgtggggtgcctgccctgtgtggga

SEQ ID NO: 60749 - DNA, 662 bp, Homo sapiens
tctgactccactctgtgaccttggacaactcycttaatctctctgagcccatttcctcattagaacatatggatagcaatgcctgccccccagactgtgagactgggagaggtaaggcatgacagtttgctgagctcccagcatgtcataggtcctgaaaaaattcacgtcacatatgagaccgtgtggggcatgatggtgtttaaggaagtattgagtcacaggttaaagcctttagaaaggaggctgacttcctgggagaagctgcagtcagagctcctgtctaactgagccacccacctgcccttgaggcctctctctctctctctgaaggttcctgccaggccaggccctagtaggctgtgcagtgggactcgccagggctgctatgaaagacaggtgaagcaggggaggctctgcccagtgccattaggcaggtccagagaacccctccttacaggatcaggaagggagccagagactgtggctccctttgtaccagctggtgaggggatggactggcccagtgtgcctcctgtgggcaggtgtctctgtgctgttggctgagccaagttaagcagacaggactccttctacaatgatggaacctacagccaaacagtggagtgacagacagggacagaagggttggggggtgggga

SEQ ID NO: 60750 - DNA, 662 bp, Homo sapiens
tctgactccactctgtgaccttggacaactctcttaatctctctgagcccatttcctcattagaacatatggatagcaatgcctgccccccagactgtgagactgggagaggtaaggcatgacagtttgctgagctcccagcatgtcataggtcctgaaaaaattcacgtcacatatgagaccgtgtggggcatgatggtgtttaaggaagtattgagtcacaggttaaagcctttagaaaggaggctgacttcctgggagaagctgcagtcagagctcctgtctaactgagccacccacctgcccttgaggcctctctctctctctctgaaggttcctgccaggccaggccctagtaggctgtgcagtgggactsgccagggctgctatgaaagacaggtgaagcaggggaggctctgcccagtgccattaggcaggtccagagaacccctccttacaggatcaggaagggagccagagactgtggctccctttgtaccagctggtgaggggatggactggcccagtgtgcctcctgtgggcaggtgtctctgtgctgttggctgagccaagttaagcagacaggactccttctacaatgatggaacctacagccaaacagtggagtgacagacagggacagaagggttggggggtgggga

SEQ ID NO: 60751 - DNA, 2061 bp, Homo sapiens
aggaaaaatgaaagttgacacaggcatggttcagaaacagcttgagagctggaatggacaggcagttctaaatagactctaagacggtcagagctggaaagtaccatttgattctcattttataaatgagaaaactgaggctcagaagccagctacccagcttcgactgtctcgcccaacatgtgcaccccctgtcccctggctgggccaccttgccttccctggccttagagttccctctcaggtctttctggctctcaccttttcctgcagagctgttttccatttttgcttactcctgaaggggactttatcgatgcccgcctttgtggcatccatggctcttaattaggcttccttaggcctcctttcagaaggctttgagtgaaaagaccatcagtatttggcactggcatcagtgtaaagggctctgcccatagcacggagagaagggcagatgtgcagggagactggtgctgaattactggggcctagagagcctggaggcctgaagagggtttttcagaccccatcccatgcatgttctgctggaagccagaggcccttcaagcytgagagccctggcttctgggctggctgctgacgtccccctccctaccactctcaggacaactgcccaaaggctggacacacacagggatttcctggctgcatcctgtgaatggagtggggctgaggagatgttggaagccatagcctggctgagttgaagtccctactctccagctggaaatatagccactgcctataggctcttcagcataacgatgtctttcagagaatcagggctatggagatcacgagaggagagtagtagttttgcttggctttggaacttgaggtgggtttggaaggaagatggaaggtcaaagcagagagggcacagcatggctctgggaatggtcttgctgatttgggtgtggggagtgtggataggaaagggcgggcctctcttaagctttaagtgcccagcctggggtggaaaaagaaatgccaggctgagtatggacaccactctggaggcaacagggagccattagggacccttggactgaagagaagtgacaagcgagtggtttggggcagcttctcctgggaattggcaatgatgaagccagagtggaggaactctcctcacaatttctcccacattcaagtagcacgggctcagggcagacgttcctctccaagggtgactgggactgtggctggatgctcacagacagcccaggatgattcccatgcgaatcaccatcaacccctggctcatgcccacccttggttagagtcttccttgacaagctctccctggggcattcttaagccagcaccagttgtgttttccaggtgagcagagcagttctcatgttgccagacctgaggttcctcactgtctgggacctcctgtccaatggaaggaaaaaggaaaacttgcattattgacagatggatcctgaacccctcagctcatgtaacccttgcagcagtcacaggcaggtgccattcgcacccattttatacctaacacctcctgatgagccaagtcttctcagactccacagtccctgctggtccctggactctggggttaccccggctctgggccccatcagaacctccctggggcctccaccttgaaaacctgcctgagcgtggatggtgcatgcatttactgcaggctccttgagtgatactgctccacaactgggtctggggaggttggccccaggtggccacctctagtggtctctttctggctggtggttgccagcatcaagaaccaccatcacttctcacaccattcaagaagccctcagggttttctctgcatttagaaaagagcacaaaaacataggctatatcctggaagtgggcaggggataggggaaagcctctcccactttcctcttccccaaagtatcttccacagcttccagacttgtcactatggagtgtcacagtcttaggtttggtaatgctcactccaggttctgcaaaagtttgaaggtcagcctcttaaagattgtggtcgctggccag

SEQ ID NO: 60752 - DNA, 776 bp, Homo sapiens
tgatgcccgcccactggatgcttgccttggctgggaygcaccctgtggggatgactctgctattataccattttacagagttgtgggctgcagcttggagctgtgaatgtatgcctgaggtcacaccgagtcattggaggaattcaatcccaaacccacatctcactccactcagctgtcatctccctcaactagggtcctcccttcccccagtctctacctctgggtccttaccggtgatctgtaagcatggaatgagggtggaggctgggcagctaggtcaccttgagatggccccacctctctcacagtgcgatgacattgtcgccctggtactgcatagcagctcccaggaaggctataaagttaccttgggagctgggtactgactgggtggtcatgaccaagcaactcattttagaagcacttttcttggtagtgagagttttgttctcatgcccactcctggagaatctgaagtcttaattacttttacccctacaggagtgtggccttgtctccctccactctgggccagtttctttgtgggagatagattgacagacacaggcctcaacctctcctgcaggaagtcttccttctcactccagcactctcctgatcatgctgagtcctgtagggcagatttgcgtgttagtgcaccctctcccctccccagcctttccccagcaccttctgcttctacacttacatttctcatagatgcccagggtgagaatcacaagggaggcaccaagggcctactatgtaccagg

SEQ ID NO: 60753 - DNA, 567 bp, Homo sapiens
tgtccatttacctctcctcctcagaggctcggttccaaggagggcggctcacatgataccactgaccccaaacgtccaggccccaggtaggtgctgagggaatgatggagtcaggtgggattagcgctccctacaggacaacagtctgtccctggtgctgggccagtactgtgcagaggccacctcacacagtggtcaccataacccaacaaggatcagcagcgcccttctacctgtggggaaatgtccttctgggaggttaagtgacttgcccaaagtcacacagctgggcagtgagagtcaagactggggaccatgtatagctgcttcaccccttttccatgcagcttcaaggcttggagcaggcactcatccccacaacaccagcctggggaaarcaaacagagaaggccctgccactccttccgagagcttggcccacgcccctggtctggaccaggccctgctactcggtggctgttacaacaatggcagatgttcacggagccccgccctgtaccaggcatgtcatacccattagctcttgcccttcaacaactgcattgt

SEQ ID NO: 60754 - DNA, 1634 bp, Homo sapiens
aaaatcgattaagggaaaaaatacaattcaattaggcttacaacatgatcagcagtaattgcaaagctaccttgctctttggtccatttctttgcagctggtcattgcttaatactctaggataacattgtccttgtcacaaaactatttgttctaagaataaaatgtaagagtgtctctattaagttccgcatgctgacaaaactaccaatgccagcaggtgagaagggcccagtgagaagctgactcatgaaaaaatgctgtttccacatcatgaatattttatccacttcccccaaacaattggtgaccctaatttttcagcctctcaccctttacaaatctacttaaacgcccttgtccagaacccctcatgtaaacagatttgaggcttcagaattcctccaaaatttcttcattctgtggtctcccaattattaaacttcttatgctataaactccactgccagtgtattagtttgttgctgtacagggggcttatgaacctggaagtcctgtaatgaaagtgggcatccaaacacagattttatggataataaataaggagtttcagaagaatagagaataatttattaatcccactgatgaaaacactaccagaaattcctctgtgaggaaccagatatggagaacagaacttatatcatatcatttgcacaacatttagtatgcatgtggatgtgaaattcttatttcagggtatggttctaaaggtctgcaacaactattcttgatctgatcacttcctaaaattaaaattgaattatactttaaggtttaactacaattctttgatagagtgcatatttcatacatgtttttgaaaactgaaataaattaaatacacaaaatctcttcccatagcttacactaagaataatacaataatttaaagataataaacttaatgtagaggtaatattgacttccctttttgttattaataatagcaatttttgcatttaataacagcaagatttcaggtctgatttttttatcagtagactatgggaaactactggctgtttgtatttatatgtgttcaagtgttcattttagagggtggaaaaagagaatgaggcttgcccactactttgtattgtatgaatccaggtaactggattaagctatctcacaaaatagaatcctatttaatcaataaatttgtaggctgagtgcgatggctcacgcctgtaatccctacactttgggaggccaagattggtggatcacctgagatcaggagtttgagaccagcctggccaatatggtgaaaacccatctctaataaaaatacaaaaattagcmgggcatggtggcaggtgtctgtaaccccagctacttgggaggctgaggcacgagaattgcttgaaccagggaggtggaggttccagtgagccaagattgtgctactgcactccagcctgggcgacagagcaagactccctctataaataaataaataaataaataaataaataaataaataaataaagttgtggattaatatatattgctatttgtattattatgaaaatacatttgcaatatactgctaaaggtaaaaaaacttaattacaagagtaaagtataatttgcctctgttaagcata

SEQ ID NO: 60755 - DNA, 1634 bp, Homo sapiens
aaaatcgattaagggaaaaaatacaattcaattaggcttacaacatgatcagcagtaattgcaaagctaccttgctctttggtccatttctttgcagctggtcattgcttaatactctaggataacattgtccttgtcacaaaactatttgttctaagaataaaatgtaagagtgtctctattaagttccgcatgctgacaaaactaccaatgccagcaggtgagaagggcccagtgagaagctgactcatgaaaaaatgctgtttccacatcatgaatattttatccacttcccccaaacaattggtgaccctaatttttcagcctctcaccctttacaaatctacttaaacgcccttgtccagaacccctcatgtaaacagatttgaggcttcagaattcctccaaaatttcttcattctgtggtctcccaattattaaacttcttatgctataaactccactgccagtgtattagtttgttgctgtacagggggcttatgaacctggaagtcctgtaatgaaagtgggcatccaaacacagattttatggataataaataaggagtttcagaagaatagagaataatttattaatcccactgatgaaaacactaccagaaattcctctgtgaggaaccagatatggagaacagaacttatatcatatcatttgcacaacatttagtatgcatgtggatgtgaaattcttatttcagggtatggttctaaaggtctgcaacaactattcttgatctgatcacttcctaaaattaaaattgaattatactttaaggtttaactacaattctttgatagagtgcatatttcatacatgtttttgaaaactgaaataaattaaatacacaaaatctcttcccatagcttacactaagaataatacaataatttaaagataataaacttaatgtagaggtaatattgacttccctttttgttattaataatagcaatttttgcatttaataacagcaagatttcaggtctgatttttttatcagtagactatgggaaactactggctgtttgtatttatatgtgttcaagtgttcattttagagggtggaaaaagagaatgaggcttgcccactactttgtattgtatgaatccaggtaactggattaagctatctcacaaaatagaatcctatttaatcaataaatttgtaggctgagtgcgatggctcacgcctgtaatccctacactttgggaggccaagattggtggatcacctgagatcaggagtttgagaccagcctggccaatatggtgaaaacccatctctaataaaaatacaaaaattagccgggcatggtggcaggtgtctgtaaccccagctacttgggaggctgaggcacgagaattgcttgaaccagggaggtggaggttccagtgagccaagattgtgctactgcactccagcctgggcgacagagcaagactccctctataaataaataaataaataaataaataaataaataaataaataaagttgtggattaatatatattgctattkgtattattatgaaaatacatttgcaatatactgctaaaggtaaaaaaacttaattacaagagtaaagtataatttgcctctgttaagcata

SEQ ID NO: 60756 - DNA, 1668 bp, Homo sapiens
caggagcgatggctcactgccactgctcagcgttgcaagagtatcatactgtatattgctagctcaggaaattatcaaaactaaaatcaaaagatcataagtcaaaccatcataagtcagggaccatctgtataagaatattctcctatataacaataccttagctcacctacgaaaatgaataayttcttattagctaataaatgatccagattttccctaatgtcttttttttttttttttttttttgagacagggtctcactctgtcgcccaggctacagtgcagtggcgtgatctcagcttactgcaacttctcccaggctcaagcgatcctcccacctcagcctcctcaatatctgggactacaggcacgcaccaccacgcctggaactttttggtttttttagtggctgtgaggttttgccacgttgcccaggctggtctcaaactcctgagctcaagtgatctgccctccttagcctcccaaagtgctgggattacaggtgtgtgccactgttcctggctcctaacatcttttctagcttttctccttcttacccaagatcaaaccaagttccatgcatggtgtttacggccaatctcagtaatccagagcagtctgtcccacctttctctcccagctacccaatgactgtagaagatgtgaagtcagtattctcataaagtattccacaattttgtgtctaacttattcttttatcccccatatttcctgtaaatagggaatccaatggactaaattcaggttagacattttttgctagaatataccacaggtgatggtgataatgtcagactgcactacataagcacgtaatacaggctgatccattttcagtgaaactagctttgcccacctggaataggtggagactataaggtcactccatgttaaagtggttctccttttacaatgagaattaatctaaggatgctacttagacaccctagaaatatcctgttccccaaaaacctttcacctgctgatccttgctggaattatttcattgagggtcacaaaatggtgatcatctaattctattatttcttctacatatattagccagcactcttctgcaaagagctttctctcaccaactggggaagaattagttcctcctttaaaaaggcaagctaaatttctttatcaatttttagagtaatttgctgtaagagtctcctccagtggtggcaactgaggaaggtttcatttgtatttattcaaggctgacaaccacagtctttttcttgattcttgaactgccccaaatttggcagtgcaagccccttcaaacaggctcctgaatctctttgacataccctcattagtctttgagggtttccccacattctggtacaaaatattcttttaactaaaagtttaaaagtaacctacaaaaagcctattatacaagttcttatattcttcataaaaataataatagtattaaaatgtcatatctaataaagcaactaataaactttactaacagagcttcttattttgtgaataagcacaatgacgctgtctagaaaaactccacccatcaaccattagactgaaggatgacctcatatattatattgctgttaggcacttttcaagacataaagataaaatcctgccctccacaaaaatgatcta

SEQ ID NO: 60757 - DNA, 987 bp, Homo sapiens
gaattcctaattctctggaattggaatttttgtccgttctgattatttgtcagttagcatttagtacctcgtatatttgtgggttttttttcatatgtgactttacatgtcctctgagaacagaatctctttctgtatacatttgatagccccccagcttacccacttgaaataaaattgggctcctagttagcacatagaaaatatttttgaatgaatgtaaattttttgacaaagctcatcagagtaggcaaatgtagctaatatttctctttctctctcttcattaccaccaggaactttcacagaattggattttaaagatgactgattgtgactgtgatagttgtactgatgctctgaattgcagtttgggctgtggctggaatcagaggatcaatctcttttcctgctagtgtcttatggcccagattagagctctgtaagaaacttggcctgaaataggcctgtgtctatgtttatggtcttatattctatttatgggtcaaagacccctgtgttaacactgtcatctgtggttggagttgaggccagatcctttttggtccttactgaaaagagcaagtctagatgacgagcttaggatttgaccccattgtatgtgcacttcactaacctcaagctctaaccaaatgaataaacktcctcaaatataacactgaatgccatcaatgtgtcaacccagagaacgcagcagcactctaacagttggaaactaaatgggttccccaagtaagctttctaattaaacaatatttttaattttaaaccatcaaattcaggtaattaaaaattaaaagatctacatatttatagttttattcttcatacgttgtgtgtatgtgtgtatggaggcggggaatctaggggaaaaaacaacaaataacgatcctgtttatatttgtttctcaaattgtgctttcaattaatatatctaaaattgccttagaacagtgccagaaaaga

SEQ ID NO: 60758 - DNA, 991 bp, Homo sapiens
tgcatgtgggcaggcatgttgccaatgagtaatggctaatttttctcccttaaacatctctcctctaagtcacaggactgccctgctaatagatgcaactttctaaagcaagtggaaacattgtgggggaaatgaataaacagcctctttattagcaagtcttgatgggattttttttccatttctccaatcttcatatgtgaattattaggagagaaatgagtcttgtaaagtgaaaattaaactcaaagtcaaaagaaatcagagtcaggcagagtggtcctcagagaaaaagaacaaaggcaagaaagacaaagagaaaagggcaaagtgaaggaaaggcagggaaatagaagaaaacatgggaggccccagatggccataggcaagaatgaaaatggcattctgcatgagcttctcatcttgggagacccagagatagaaaagagtgtattgggaagactctgtgccaaggaagctattttgtgatgtaagattcctctgaggtttgttatccaaatgaaattatagcacacaatcatcttttatcatacagtggccaaaggctrgaaacacgcacttcttaaaagccaagatcagttccaaaaactggaagatgatattgtccaattactatttggagtatttgtctaggaatcctttgaagtcacccatcctctcataatccattttatttcttcttagcttccaacctctatgaatgccttatggacaaggactacgtcaggttcccctttccttatggcctcttcttgcataaagttaggaaaatatttctctgcatttaaaggtcaaagttgagaaaggtaaaatcatcctaatatggacaactaagtcctgtgaaggaaaaaagtatggttgttttgtttcaaattattggcaagatatgaataaacataaaagagagagaagggtttgaaatggtatggcacatccatcaattaactgatagaactaattactccatgca

SEQ ID NO: 60759 - DNA, 991 bp, Homo sapiens
tgcatgtgggcaggcatgttgccaatgagtaatggctaatttttctcccttaaacatctctcctctaagtcacaggactgccctgctaatagatgcaactttctaaagcaagtggaaacattgtgggggaaatgaataaacagcctctttattagcaagtcttgatgggattttttttccatttctccaatcttcatatgtgaattattaggagagaaatgagtcttgtaaagtgaaaattaaactcaaagtcaaaagaaatcagagtcaggcagagtggtcctcagagaaaaagaacaaaggcaagaaagacaaagagaaaagggcaaagtgaaggaaaggcagggaaatagaagaaaacatgggaggccccagatggccataggcaagaatgaaaatggcattctgcatgagcttctcatcttgggagacccagagatagaaaagagtgtattgggaagactctgtgccaaggaagctattttgtgatgtaagattcctctgaggtttgttatccaaatgaaattatagcacacaatcatcttttatcatacagtggccaaaggctagaaacacgcacttcttaaaagccaagatcagttccaaaaactggaagatgatattgtccaattactatttggagtatttgtctaggaatcctttgaagtcacccatcctctcataatccattttatttcttcttagcttccaacctctatgaatgccttatggacaaggactacgtcaggttcccctttccttatggcctcttcttgcataaagttaggaaaatatttctctgcatttaaaggtcaaagttgagaaaggtaaaatcatcctaatatggacaactaagtcctgtgaaggaaaaaartatggttgttttgtttcaaattattggcaagatatgaataaacataaaagagagagaagggtttgaaatggtatggcacatccatcaattaactgatagaactaattactccatgca

SEQ ID NO: 60760 - DNA, 535 bp, Homo sapiens
gagcctagggcatcctgcgggggtcctgctttccacagggtcaccccaatttccacaccctctggacactcagcmccgggagatgcaccccagaaaagagcacagcaagcaggggctccaccgcctcattcaaccaggagaaagctggggcacagagaggggcagggcctggccccaggatgctcagcccaagctgggtctcaaacagcagccccaactccttcatgacttgttaattcaacaaacagctgcacagcgattttctgaccaggcggggaggagaaggcaggttttcggggctgctggcagctgctcatttgcaggcccgagcttgtgaacggtttccacctgggggcgtcgggggtgcttccaggtaccatttgttcctgcctggagggagccccttccctcggggaaccaagggctggtggcttccggtcgtcctgggtggaggcttagggcctcccaccaggaaccccagagaggtagatggggagagggtagctgtgtttccatgcttgtatttttgggggga

SEQ ID NO: 60761 - DNA, 535 bp, Homo sapiens
gagcctagggcatcctgcgggggtcctgctttccacagggtcaccccaatttccacaccctctggacactcagcaccgggagatgcaccccagaaaagagcacagcaagcaggggctccaccgcctcattcaaccaggagaaagctggggcacagagaggggcagggcckggccccaggatgctcagcccaagctgggtctcaaacagcagccccaactccttcatgacttgttaattcaacaaacagctgcacagcgattttctgaccaggcggggaggagaaggcaggttttcggggctgctggcagctgctcatttgcaggcccgagcttgtgaacggtttccacctgggggcgtcgggggtgcttccaggtaccatttgttcctgcctggagggagccccttccctcggggaaccaagggctggtggcttccggtcgtcctgggtggaggcttagggcctcccaccaggaaccccagagaggtagatggggagagggtagctgtgtttccatgcttgtatttttgggggga

SEQ ID NO: 60762 - DNA, 535 bp, Homo sapiens
gagcctagggcatcctgcgggggtcctgctttccacagggtcaccccaatttccacaccctctggacactcagcaccgggagatgcaccccagaaaagagcacagcaagcaggggctccaccgcctcattcaaccaggagaaagctggggcacagagaggggcagggcctggccccaggatgctcagcccaagctgggtctcaaacagcagccccaactccttcatgacttgttaattcaacaaacagctgcacagcgattttctgaccaggcggggaggagaaggcaggttttcggggctgctggcagctrctcatttgcaggcccgagcttgtgaacggtttccacctgggggcgtcgggggtgcttccaggtaccatttgttcctgcctggagggagccccttccctcggggaaccaagggctggtggcttccggtcgtcctgggtggaggcttagggcctcccaccaggaaccccagagaggtagatggggagagggtagctgtgtttccatgcttgtatttttgggggga

SEQ ID NO: 60763 - DNA, 535 bp, Homo sapiens
gagcctagggcatcctgcgggggtcctgctttccacagggtcaccccaatttccacaccctctggacactcagcaccgggagatgcaccccagaaaagagcacagcaagcaggggctccaccgcctcattcaaccaggagaaagctggggcacagagaggggcagggcctggccccaggatgctcagcccaagctgggtctcaaacagcagccccaactccttcatgacttgttaattcaacaaacagctgcacagcgattttctgaccaggcggggaggagaaggcaggttttcggggctgctggcagctgctcatttgcaggcccgagcttgtgaacggtttccacctgggggcgtcgggggtgcttccaggtaccatttgttcctgsctggagggagccccttccctcggggaaccaagggctggtggcttccggtcgtcctgggtggaggcttagggcctcccaccaggaaccccagagaggtagatggggagagggtagctgtgtttccatgcttgtatttttgggggga

SEQ ID NO: 60764 - DNA, 535 bp, Homo sapiens
gagcctagggcatcctgcgggggtcctgctttccacagggtcaccccaatttccacaccctctggacactcagcaccgggagatgcaccccagaaaagagcacagcaagcaggggctccaccgcctcattcaaccaggagaaagctggggcacagagaggggcagggcctggccccaggatgctcagcccaagctgggtctcaaacagcagccccaactccttcatgacttgttaattcaacaaacagctgcacagcgattttctgaccaggcggggaggagaaggcaggttttcggggctgctggcagctgctcatttgcaggcccgagcttgtgaacggtttccacctgggggcgtcgggggtgcttccaggtaccatttgttcctgcctrgagggagccccttccctcggggaaccaagggctggtggcttccggtcgtcctgggtggaggcttagggcctcccaccaggaaccccagagaggtagatggggagagggtagctgtgtttccatgcttgtatttttgggggga

SEQ ID NO: 60765 - DNA, 535 bp, Homo sapiens
gagcctagggcatcctgcgggggtcctgctttccacagggtcaccccaatttccacaccctctggacactcagcaccgggagatgcaccccagaaaagagcacagcaagcaggggctccaccgcctcattcaaccaggagaaagctggggcacagagaggggcagggcctggccccaggatgctcagcccaagctgggtctcaaacagcagccccaactccttcatgacttgttaattcaacaaacagctgcacagcgattttctgaccaggcggggaggagaaggcaggttttcggggctgctggcagctgctcatttgcaggcccgagcttgtgaacggtttccacctgggggcgtcgggggtgcttccaggtaccatttgttcctgcctggagggagccccttccctckgggaaccaagggctggtggcttccggtcgtcctgggtggaggcttagggcctcccaccaggaaccccagagaggtagatggggagagggtagctgtgtttccatgcttgtatttttgggggga

SEQ ID NO: 60766 - DNA, 2175 bp, Homo sapiens
gctggtctcgaactcctcaccccaagtgatctgcctgccttggcctcccaaagtgctgggattacaggtgtgagccactgcgttcagccatcttcctcccttcctttctctctcttgctctcttgtgcgctctccctctctctccctctctccctctctctctctatatatatatatttctttttttttttaatttgcaaacctggaaactctgcacgctttccttactggaagacaaaagcacaaatgataccaccgtcattgccacccgcagtgagtcttcaagaatgccaaaggcatggccacctggccctatctataaggcacccaaatgccatcctcacctcccagggctgctaactcctcaggaccgacgagctcagctgccagtgtgcgccaggagggcccctctgaggccatggaatctcaggggcagagcctggcctgggcccacgggcgctggcagccatgacagggatccgcagggttcacacagcccctgcccactccccagggggtcctgggggccactcctccttggggagtaatcacatcaccacgcctgcgtggcaactgctccatagcccttaatttccaagcacaatgagagcactcctggctaccagagcctgggccctggcagagcaggtcagctggcaggcagccaggttaccacgacctggctttggggatgagccgcccttgtcctttcaacactgaccacgtgttccactcaaagtgcccgtgttctcacattcccacagccggctgctgtcactgagatgtgaacctgccctctgggccccaaaggaaaagctaagctcttaggctgggtccacaccsctgccaatgagctcatccacccacaggacttggaaacaattttaaggcatcccaaagtacagactgacttcggatgtgactccactaatcattagaacaaagtgctcactgaatagctgggaagtgaagccactcattggtctggcaagaaaaatggttactctctagtcatatgacaaacatttattgggcacctactacatactcagtagcttggaagattctgagatcagagtgtaaaggatcttcccttgaggaacgtctgtctgatagggagagaaaataggtacaaatgtatgaattccactgagaaaaacaacaacatagaccatgaggaggcaggagagatgacttatggctgggtggagtctggaaggcttcttggaggaggtggcatttaagctaggccttgaagtatggggagacggtagggagaggcaggaagggacttccaggtggaagaaaaaatagcagctgacatttatgacactgacagtgtgcagtcattaactggactgatgcacttacccctagcagggcagtcctgccatccccatggaacgaatgggagaatgtggcacagagaggtgaggtcacttgccccaagtcacacagcagtaatgaaggagaacccagatgggagcccaggcctggcgctgttcatggttctattacatgcttcccttacagcccaggcaccaagcagagatgcgaagggccagggcgtggcacagaagcagcatgagattcggttggcaggagagctggggaggcaggagctccaggtgggcgggggcagcccatggaggagcccaggattcccacccaaccgctgcatgcagccgggaaccaggggccgtcccacactcctggatatcggagtgaccggatctttctggagctgaaggaagagatgccagtggccacagatggctggctgggggcgtgaccctgagtgggactgcccaggctcccaccagcctctcccgtctgcacctcactagctgtgtgaccctgaaaaacgagcacactgtttcctcacctgcaaaaacgagagggcacgaagccagtgccctccccctgatgctgccatgaggactgaggcgtgaccacaggtaaaggacatagggagggcccattctgtctgcaaggggcccctaccagcccctgtgggcagtcaacccagcacttaacacaggcctctccagccggcatcctcctcccggcctcactagctggcctttggaaacaaagtgagggcccttccagctccacgcaggtggcctctgcacctggacaggggagttggtgtggcagaggaggagcagcaca

SEQ ID NO: 60767 - DNA, 692 bp, Homo sapiens
ggatccgtgtctctttcccgagtgacatggccccttggggtccccttcatgcccggccactgcacctgggatgctctatgtgtgrcttcttgggtgccccttgttggggtgctaaactcatctccctggtaaccttcacccgatggggccagattccttcccaatgcaattgctctgcacctcaagggagcttggggtctgggagggttgtatgggtgccccgggaagggctgcaccttgtgggtctcctccacaggggtgagcaggtgcgcttgcagccatcgggctgcccaggagagccagcccccgccccctgcccacttcccttacccccacagctgctggggtggagaaacgctgtgacccagtcagtgtttcttttaatgagcggcgattaaaacagtgtaaccgtggcagtttggtagcttctttaggaggaagcagagagcccaaacagaacctgaaaaaaatacaaagataaaataaaacccagtgaatttttaatagtgattatctcctgacacatagcgcgttgccatctggcagacacgcggcccactgaagcttggtgctggtggggaggagggcgctgggggctcctactgccaccccagagcaggaggtgccaggcattctctccatggacgcctccgtggcatgtccttgagcccagccacgtgagaggtgcacgg

SEQ ID NO: 60768 - DNA, 633 bp, Homo sapiens
gggatccatatggtgacactggccagaccacagcccccacaaatcccacaggcatgccggcggcttaggctggagccaggaggcggcggcacctcaggccagcacacttgattcattcatccactcactcagggcccagggtaagcccatcaggacggcaggtaccctggggcctgtaccaaggtggttcccaccctggggactgagctactcctgcagccttgccctgagtcatctcaggaaatgctgcagggtgatgctagagagaggaaggcttggggctactgtgtccatgatgcagcacagacggcagctccagccagccccagaggctcctgctgcgagggacggcttatggggcagcacccggtcatgctgggccgcatctgcattcaagcccccaggggatgggctggaggggtgcaggggagggctgtgccatgccccagtctcgacccctgtccacctcctggtccctcctggagctgrggggccagggttctgctggagagagaagctgagaggcccctcctggggtggagatggctcccggaagcgggactgtgagtataaggaaagaaggcagcaaacacggctgtggtgaggctcaccctccactcaactcagcactgg

SEQ ID NO: 60769 - DNA, 677 bp, Homo sapiens
tatatacacatatatatacatatatatacatatatatacayacacacacacacacacacacacacacacacacacacacagaaattagctgggcatggtggcatgtgcctataatcccagctacttgggaggctgaggcaggagaatcgcttgaactcgggaggtggaggttgcagtgagccgatatcgtgccactgcactacagcctgggtgacacagtgagagtcggtctcaaaaaataaataaataaataataaaaatttaaaaaataaataataacaataaaaaaacaaagacaggaagcatttcccgtctccattcccatctccagaggagcgcctgagctcagagaggctaggtgcccagcctaaagcaacatagcagggtatgacctctctaactccccactaggtggcttgcattaaatcctaccccaaagccaggctttgaaatgtgagccattaacagctcccacgtgtcttaagcagcaagacaagagtgattcccacacagcagcagacttccagaaacactcagacttcccaagcctggggtaagaagggaggagggagatagagaaagacagggaagatgtgtccctgggccccaagggctcatgcttggccactgacatttatccaagaggggcaggagaactcagagaggggcagactctg

SEQ ID NO: 60770 - DNA, 677 bp, Homo sapiens
tatatacacatatatatacatatatatacatatatatacacayacacacacacacacacacacacacacacacacacacagaaattagctgggcatggtggcatgtgcctataatcccagctacttgggaggctgaggcaggagaatcgcttgaactcgggaggtggaggttgcagtgagccgatatcgtgccactgcactacagcctgggtgacacagtgagagtcggtctcaaaaaataaataaataaataataaaaatttaaaaaataaataataacaataaaaaaacaaagacaggaagcatttcccgtctccattcccatctccagaggagcgcctgagctcagagaggctaggtgcccagcctaaagcaacatagcagggtatgacctctctaactccccactaggtggcttgcattaaatcctaccccaaagccaggctttgaaatgtgagccattaacagctcccacgtgtcttaagcagcaagacaagagtgattcccacacagcagcagacttccagaaacactcagacttcccaagcctggggtaagaagggaggagggagatagagaaagacagggaagatgtgtccctgggccccaagggctcatgcttggccactgacatttatccaagaggggcaggagaactcagagaggggcagactctg

SEQ ID NO: 60771 - DNA, 677 bp, Homo sapiens
tatatacacatatatatacatatatatacatatatatacacacayacacacacacacacacacacacacacacacacacagaaattagctgggcatggtggcatgtgcctataatcccagctacttgggaggctgaggcaggagaatcgcttgaactcgggaggtggaggttgcagtgagccgatatcgtgccactgcactacagcctgggtgacacagtgagagtcggtctcaaaaaataaataaataaataataaaaatttaaaaaataaataataacaataaaaaaacaaagacaggaagcatttcccgtctccattcccatctccagaggagcgcctgagctcagagaggctaggtgcccagcctaaagcaacatagcagggtatgacctctctaactccccactaggtggcttgcattaaatcctaccccaaagccaggctttgaaatgtgagccattaacagctcccacgtgtcttaagcagcaagacaagagtgattcccacacagcagcagacttccagaaacactcagacttcccaagcctggggtaagaagggaggagggagatagagaaagacagggaagatgtgtccctgggccccaagggctcatgcttggccactgacatttatccaagaggggcaggagaactcagagaggggcagactctg

SEQ ID NO: 60772 - DNA, 781 bp, Homo sapiens
cttgaggccaggagtttgagatcagctgggcaacaaagtgagaccctgtctacaaaagataaaaaagaaaaggaaaattagccaggcactttgggtggcatgtgcctgtgaacccagctacaagggaggctgagactggaggatcacatgagcccgagaggtggagkctgcagtgagccatgatcacaccactgcactccagtctgagtgacagagcaagacacaatctcaaaacaaaacaaaacaaaaaaaacacaatagctagacattcatgacaggggcaacccatctgataggaagtcataattcttaaactaaaactaagacgtcatctgggttcagatcaaagtctaagggatttacagatgctttgcttctctggctaagaaggttcctatctctggagttcgtctgctgcccctacccttcggcgagtcacttcactggtgggcctgagggaggcctctggccctgtgagccccaattttcaacgcccactgacctggtggcccagcttctgtacagatgctccgagcaactccagtgcgccctctggagggagggaagaggaagcgccgtctcctgacaaccctggagggtgccagcctggccgggtagagggcgggcagcaggattcactgggatcactgcaccccccaacctccccactcaatcccccttgccccacactgttctgaaggcttgggacttcccaagccccataagtcaataaagatgcagtccacacccagcaggcacagagtgaggtcaaaggaggaaa

SEQ ID NO: 60773 - DNA, 649 bp, Homo sapiens
cccgctttctagtgaccctcctggaaagacccgtgccccacccgcccatcccacagtgggatcagacacagcaagtgcaccaatgtttctgtcgccagtgacctcatccatataatgggacacacagttcctgcctcactgagttgtttaaggcttaaatgggtcagcccctgcagggacaagctcaggcctggccctcagtagatgctgtggacatagtggctgcgggcattgcaaaagccatctttgccacaagcttccgctctaggaccttctgttccacctggtcagggacagacagcagctcctgggcttggggacaaccccagtgtcaactgaacccagatttttcagccccagcagccctcgaggccttgaaccagggactttcttgtcttmcaatgacaagcttttctttgcggcaggcggggtggggtccccttctttcttctactctttatgtagcaaaggcattcatggacttcttgcgctaagttggagtgcacagctgcctcatggtccaggacgcatggtccagggctcgaaaaaataaaaaggcggttctgccccaggcttcaagtttggccaggccacctacctgtcctccatccatccatcatccatccacccattcactattcatctatct

SEQ ID NO: 60774 - DNA, 602 bp, Homo sapiens
cccatctcagcctcccaaagtgctgggattataggcacgagccaccacgcccggccatctggtatattctcaaaccctgaccccgactctaaatgttgcctcctgaggtggcctctagcgccctctatgaggtgaaccttttgtaagggcagggcccgggcaccctcactgctgtccctgcagagactaaggcagcctctgactgtcagaatccccaggctcggtgcctgggctcccatcacgtcactcactcccaaggtgtctccccagtctcccagctttacacgccatctgtgcrctgggacgcccacattcatagctccagactcaaatatccaactgccagttggatctccgcacagtgtctcacggcagctctcacatggccaggacggagctccagcgcctctcccacccccaaacctgctcctcctggcaacactaaccttccagccgctcaagtcaacagacttggagatgttctaaggttctctctctctcctatcccacctctgctccgccagcaaatcctgacagctctatgctcaaaacgtttcccaaatccaatccctccctacaaagctgccaccctggtcctgcct

SEQ ID NO: 60775 - DNA, 654 bp, Homo sapiens
agggagaacacagaggccaaggatcttcttccagctcgggtcttccagcagactagcggcctgacaggctgtgcaggtggtcagccgggggtgatgttgcccccagggggacatctggcaatatcaaaagatgttttggttgtcacaactcggggagtgagtgctactggcatctagtggggttgaggctgggaatgtggcaaacacccaacagtgcacaggatggcccccaccacccaaaattatctcacccaaatatccacagggctgctgggcatggtggctcacacctgtaatttgaactataatttgtaaytttgggaggccaaggccgggggaccgattgagcccataagtttgagaccagcctgggcaacatggtgagacctgctctacaaaaaaatacaaaaaaattagccgggcatggtggcttgtgcctgtactcccagccacccaggaggctgagatgggaggatgacttgagcctgggaggttgaggctgcagcgaccatgatcgtgccactgcaccccggcctgggggacagagtgagactctgcctcaaaaaacaaaaaaacaaacaaacaaacaaaaaacaaaacaagaaaaaccaccaccaacaaaaaactccacagggctaaggttgagaagccccg

SEQ ID NO: 60776 - DNA, 571 bp, Homo sapiens
cggggatccacccaccttagcctcccaaagtgctgggataaggcgtgagccacctcatccagcccttttctytccatttgacattaacgcagttataataatatttatgcagttagtaaaataattctttaaatcacaaagagaaatcctaaattaattgttaactaatttctgtatttaccaaagaatttctgtgaaataaatccaagtaaaaattttaaaaagaaagaaaggccataaacccaaattgcacttgattcagctcaccattcaactatgagatctttgcaaactgggccctcatctacatagcatctggtaaacaaatgctgttgagtgaaaacgcagttaatcatgtgtgtttcaaagaactttctaaaagaaccaaagagagaataccttatgattttaacacaacccctgggatactgttagaaattcagaatctcaggccccacccagaactgctaaatcagaacatgaattttttttctttcctcctcctcccctagaacctatatttttttttttttttttttttttttggagatggagttttgctcttgttacc

SEQ ID NO: 60777 - DNA, 571 bp, Homo sapiens
cggggatccacccaccttagcctcccaaagtgctgggataaggcgtgagccacctcatccagcccttttctctccatttgacattaacgcagttataataatatttatgcagttagtaaaataattctttaaatcacaaagagaaatcctaaattaattgttaactaatttctgtatttaccaaagaatttctgtgaaataaatccaagtaaaaattttaaaaagaaagaaaggccataaacccaaattgcacttgattcagctcaccattcaactatgagatctttgcaaactgggccctcatctacatagcatctggtaaacaaatgctgttgagtgaaaacgcagttaatcatgtgtgtttcaaagaactttytaaaagaaccaaagagagaataccttatgattttaacacaacccctgggatactgttagaaattcagaatctcaggccccacccagaactgctaaatcagaacatgaattttttttctttcctcctcctcccctagaacctatatttttttttttttttttttttttttggagatggagttttgctcttgttacc

SEQ ID NO: 60778 - DNA, 611 bp, Homo sapiens
cccatttcccatgtgaggagactgaggtctggaccaggtgtcctgccctgtggggatctttatttattgagggcctgtgcctatttgttttattttatttatttatttttgagacagtctggctctgttgcccggactggagtgcaatggcacaatctagcctcactgcaacctctacctctcgggttcaaccaattcttgtgcctcagcctcccgagtagctgggattacaggtatctgccaccacrcccggctaattttttggtatttttagtagagacggggtttcaccatgttggccagggtggtctcgaactcctgacctctggtgatccacccgcctcggcttcccaaagtgctgggattacaggcatgagccactgtgcccagccgtgtgctgatttctaagggcctctctcaagaagctcgtgttgataaaaaggtaatttcaggtgctcacttgagagctgtgaattaaaaacagggaaaagatggcgggtgagggcagcaggcgaggactgttttgtttgcagggggccagggtaggtcactctgctgcggtgaccttgcggctgagccctgaacaatgagcagccgcagccaacatgcag

SEQ ID NO: 60779 - DNA, 1046 bp, Homo sapiens
aaaactctttttgtagccaatatttttgcacagaactcttacttacatgtctcatcgaaactccagaacaaacatcaaaaggtacattttatgaatcttatttcaagctgatcaaaccatgttagttttattttaaagtactatttctcaaaattaaaaaaaagaacaaaaataagtactatttctaactaaagatttaatatgaaaactgaagtgagagagtgactggttgaattggttgcacagtggttttcaatagtataatctttgtaagtctcaggttgttattagctttttttttttttcccctaataaaaatgaggctgggtgtggtggctcatgcctataatcccagcactttgggaggccaagttgggcggatcacttgaaggcaggagtttgagaccagtttggccaacatggcaaaaccctatctctcctaaaacaaaaattagccgggcgtggtggtgtgtgcctgtaatcccagttacttgcgaggctgaggcaggagaattgcttgagcccgggaggtggaggttgcagtgagccgagattgcgccgttgcacttcagcctgggcaacagagcgagactctacctcaaagaaaaaaaaaaaaaagaactgattttagtagttaagtgaataaagtgattttactgattatatttttactctgtgccatgggttatttctctttttgtttgttkggttttttttttgttttgtttttattgatcattcttgggtgtttctcgcagagggggatttggcagggtcacaggacaatagtggagggaaggtcagcggataaacaagtgaacaaaggtctctggttttcctaggcagaggaccctgtggccctccgcagtgtctgtgtcactgggtacttgagattaaggagtggtgatgactcttatcgagcatgctgccctcaagcatctgttcaacaaagcacatcttgcaccgcccttaatccatttaaccctgagtggacacagcacatgtttcagagagcacagggttgggggtaaggtcacagatctaca

SEQ ID NO: 60780 - DNA, 1046 bp, Homo sapiens
aaaactctttttgtagccaatatttttgcacagaactcttacttacatgtctcatcgaaactccagaacaaacatcaaaaggtacattttatgaatcttatttcaagctgatcaaaccatgttagttttattttaaagtactatttctcaaaattaaaaaaaagaacaaaaataagtactatttctaactaaagatttaatatgaaaactgaagtgagagagtgactggttgaattggttgcacagtggttttcaatagtataatctttgtaagtctcaggttgttattagctttttttttttttcccctaataaaaatgaggctgggtgtggtggctcatgcctataatcccagcactttgggaggccaagttgggcggatcacttgaaggcaggagtttgagaccagtttggccaacatggcaaaaccctatctctcctaaaacaaaaattagccgggcgtggtggtgtgtgcctgtaatcccagttacttgcgaggctgaggcaggagaattgcttgagcccgggaggtggaggttgcagtgagccgagattgcgccgttgcacttcagcctgggcaacagagcgagactctacctcaaagaaaaaaaaaaaaaagaactgattttagtagttaagtgaataaagtgattttactgattatatttttactctgtgccatgggttatttctctttttgtttgtttggttttttttttgttttgtttttattgatcattcttgggtgtttctcgcagagggggatttggcagggtcacaggacaatagtggagggaaggtcagcggataaacaagtgaacaaaggtctctggttttcctaggcagaggaccctgtggccctccgcagtgtctgtgtcactgggtacttgagattaaggagtggtgatgactcttawcgagcatgctgccctcaagcatctgttcaacaaagcacatcttgcaccgcccttaatccatttaaccctgagtggacacagcacatgtttcagagagcacagggttgggggtaaggtcacagatctaca

SEQ ID NO: 60781 - DNA, 1046 bp, Homo sapiens
aaaactctttttgtagccaatatttttgcacagaactcttacttacatgtctcatcgaaactccagaacaaacatcaaaaggtacattttatgaatcttatttcaagctgatcaaaccatgttagttttattttaaagtactatttctcaaaattaaaaaaaagaacaaaaataagtactatttctaactaaagatttaatatgaaaactgaagtgagagagtgactggttgaattggttgcacagtggttttcaatagtataatctttgtaagtctcaggttgttattagctttttttttttttcccctaataaaaatgaggctgggtgtggtggctcatgcctataatcccagcactttgggaggccaagttgggcggatcacttgaaggcaggagtttgagaccagtttggccaacatggcaaaaccctatctctcctaaaacaaaaattagccgggcgtggtggtgtgtgcctgtaatcccagttacttgcgaggctgaggcaggagaattgcttgagcccgggaggtggaggttgcagtgagccgagattgcgccgttgcacttcagcctgggcaacagagcgagactctacctcaaagaaaaaaaaaaaaaagaactgattttagtagttaagtgaataaagtgattttactgattatatttttactctgtgccatgggttatttctctttttgtttgtttggttttttttttgttttgtttttattgatcattcttgggtgtttctcgcagagggggatttggcagggtcacaggacaatagtggagggaaggtcagcggataaacaagtgaacaaaggtctctggttttcctaggcagaggaccctgtggccctccgcagtgtctgtgtcactgggtacttgagattaaggagtggtgatgactcttatcgagcatgctgccctcaagcatctgttcaacaaagcacatcttgcaccgcccttaatccatttaaccctgagtggacacagcacatgtttcagagagcacagggttgggggtaaggtcacagatcwaca

SEQ ID NO: 60782 - DNA, 619 bp, Homo sapiens
agataattccaaaattggtaggacagcataagaatcgctagcatatacaactacacaaaggcaagagatttattctaatcagccatagtgcctggtcaaaatccaagaaaaattcaaaactggagtaccagaaacaagagctggaaaggatgtaaggcattatatcagaccttctgtaaagaaaataaaggccaggcgtggtggctyacacctgtaatcccggaactttgggaagccaatctgaaaggatcacttgaggccaggagtttgagaccagcctgggcaacatagcaagatgctgcctctacgaaaatttaaaaattagccaggcatggtggcatgcacttgtagtcctagctattcaggaggctaagatgggaggatggtttgaggccaggagttagaggctgtagtgagcagccacttgcgctccagcctgggcaacagagcaagaccctgtctcttagaaaaagaaggctgggcgcagtggctcatgcctgtaattgcaacactttgagaggccaaggtggaaggatcacttgaggtcaggagtttgacaccagcctggccaacatggtgaaaccctgtctctactaaaaatataaaaattagttggacg

SEQ ID NO: 60783 - DNA, 619 bp, Homo sapiens
agataattccaaaattggtaggacagcataagaatcgctagcatatacaactacacaaaggcaagagatttattctaatcagccatagtgcctggtcaaaatccaagaaaaattcaaaactggagtaccagaaacaagagctggaaaggatgtaaggcattatatcagaccttctgtaaagaaaataaaggccaggcgtggtggcttacacctgtaatcccggaactttgggaagccaatctgaaaggatcacttgaggccaggagtttgagaccagcctgggcaacatagcaagatsctgcctctacgaaaatttaaaaattagccaggcatggtggcatgcacttgtagtcctagctattcaggaggctaagatgggaggatggtttgaggccaggagttagaggctgtagtgagcagccacttgcgctccagcctgggcaacagagcaagaccctgtctcttagaaaaagaaggctgggcgcagtggctcatgcctgtaattgcaacactttgagaggccaaggtggaaggatcacttgaggtcaggagtttgacaccagcctggccaacatggtgaaaccctgtctctactaaaaatataaaaattagttggacg

SEQ ID NO: 60784 - DNA, 619 bp, Homo sapiens
agataattccaaaattggtaggacagcataagaatcgctagcatatacaactacacaaaggcaagagatttattctaatcagccatagtgcctggtcaaaatccaagaaaaattcaaaactggagtaccagaaacaagagctggaaaggatgtaaggcattatatcagaccttctgtaaagaaaataaaggccaggcgtggtggcttacacctgtaatcccggaactttgggaagccaatctgaaaggatcacttgaggccaggagtttgagaccagcctgggcaacatagcaagatgctgcctctacgaaaatttaaaaattagccaggcatggtggcatgcacytgtagtcctagctattcaggaggctaagatgggaggatggtttgaggccaggagttagaggctgtagtgagcagccacttgcgctccagcctgggcaacagagcaagaccctgtctcttagaaaaagaaggctgggcgcagtggctcatgcctgtaattgcaacactttgagaggccaaggtggaaggatcacttgaggtcaggagtttgacaccagcctggccaacatggtgaaaccctgtctctactaaaaatataaaaattagttggacg

SEQ ID NO: 60785 - DNA, 619 bp, Homo sapiens
agataattccaaaattggtaggacagcataagaatcgctagcatatacaactacacaaaggcaagagatttattctaatcagccatagtgcctggtcaaaatccaagaaaaattcaaaactggagtaccagaaacaagagctggaaaggatgtaaggcattatatcagaccttctgtaaagaaaataaaggccaggcgtggtggcttacacctgtaatcccggaactttgggaagccaatctgaaaggatcacttgaggccaggagtttgagaccagcctgggcaacatagcaagatgctgcctctacgaaaatttaaaaattagccaggcatggtggcatgcacttgtagtcctagctattcaggaggctaagatgggaggatggtttgaggccaggagttagaggctgyagtgagcagccacttgcgctccagcctgggcaacagagcaagaccctgtctcttagaaaaagaaggctgggcgcagtggctcatgcctgtaattgcaacactttgagaggccaaggtggaaggatcacttgaggtcaggagtttgacaccagcctggccaacatggtgaaaccctgtctctactaaaaatataaaaattagttggacg

SEQ ID NO: 60786 - DNA, 619 bp, Homo sapiens
agataattccaaaattggtaggacagcataagaatcgctagcatatacaactacacaaaggcaagagatttattctaatcagccatagtgcctggtcaaaatccaagaaaaattcaaaactggagtaccagaaacaagagctggaaaggatgtaaggcattatatcagaccttctgtaaagaaaataaaggccaggcgtggtggcttacacctgtaatcccggaactttgggaagccaatctgaaaggatcacttgaggccaggagtttgagaccagcctgggcaacatagcaagatgctgcctctacgaaaatttaaaaattagccaggcatggtggcatgcacttgtagtcctagctattcaggaggctaagatgggaggatggtttgaggccaggagttagaggctgtagtgagcagccacttgygctccagcctgggcaacagagcaagaccctgtctcttagaaaaagaaggctgggcgcagtggctcatgcctgtaattgcaacactttgagaggccaaggtggaaggatcacttgaggtcaggagtttgacaccagcctggccaacatggtgaaaccctgtctctactaaaaatataaaaattagttggacg

SEQ ID NO: 60787 - DNA, 1100 bp, Homo sapiens
atgactgttttctaataagagcattaaaaattaactgatgttcttaactcttagctgattatgagttactgatgaagtcccagcaagaaatgctttatcagacacaagtgactgcatttgttcaagaacctaaagttggagaaacagcacctggatttgtatactctgagtatgaaaaagagtatgaaaaagaacaagccttaattaggaagaaaatggccaaagatactgtagtggtcagaacttatgtagaagatcaggtgagtataaaagtaatgaccaaccaaacaatttcataaattatactttcctttttttatttgatattttcattttcaagtgatgagctcggggttagacagctattagaaggtccaagttcactgttgctaagtttccttaatcttcatggtatgttgcacctgtgagtttagaaatagagattacatataggccataaatgtgactttaaaaatagggcttataatatattaaggaaaacaccaatattagcacagctgagttcattcatgccaagatctcttcatctgtgtgataagctaatgtaacctctaacccaaatctaactcctgcttttggaatacctttctacccaagatgccacaacattcactgggaaagatgaccataatgcagattaaaacaaacaaaccaaaaagtcctctagattcttctcccagctaaaaacttcaacagtctagctcagatacatctccttaaataatttatatcagtaaggatatgtatttttaacagaccataatctttttgcataggaattccatatttcttcctttgaagagagacttattaaagaaattgaatatagaataataaagactacattagaagaacttcttgaagaagatggagaagaaaagatggcagttgacatttctgaatctgaagctgttgaatcaggatttgattyaagaatcaagaattatagaattcttgaggggatgggtgtcacttttcattgcaagatgtctggatatccattaccaaaggtaaaatataaacatttatcatagctccttgccacagtaaagatacaaattggttaaaatataactatt

SEQ ID NO: 60788 - DNA, 636 bp, Homo sapiens
attccaaaactgtaagatagttaatagaatgatccccatttcatagaagaggaaattaaagatgaaattaacacaaagaggttaagtcatctgttctcacagctcattcttctccccttcacttttattctccttcttttgcctttagtctatgttttccctatgactttatagtaaaattgaaaatttttaaactttgaaatatacaattactttacagtatattgcaaagtttcatcattaatatgatacatacattataattatattgatcttttcagaawaaaaagacagagttttggtttttttttttttgctttgtgaattatccatgaagcattatttgttcttgaatgagcttttcctgctcatgagtatttctctgagctttctcgcttatttacaaattcaaagtaatttcatatttttcctccaatgccatgagctccttgaaaataagggctgtgttttattcatttttataaacacgtagtgttttattcatttttatacagtagaaattcaataatgtttctttgatgagttgctgaattcattatgattaataatgataaccataataactgccatctgagtactttaagcatattttgtgtgtgtgtatatatatatata

SEQ ID NO: 60789 - DNA, 681 bp, Homo sapiens
tcccaaagagacattcatgcttataggggcaagtattcacaggcactgaaaaagtagaactatcttgagaatttgtaaaaataacattgagaactgcttcattcactggatgtaggcaatgattttcctaaggtgttaggcaaaatgcatgccatttgtatgtgggaagaaagaatggcaacagagggaacattacaatgaaatttggttttataccttgccatatacyttaacatgtttcatctcaaagcacattttgttgcctatttcaagttaaagtcccaacttctgacattgatctttgatgtgcccccacaatatggcccccctaccctgcacttctattgcttcttcccttcatatcttacctgccttagtcaacacaaactactcattatgcttacaacatgccgattcagcaaaattcaaagaaacaaacatttgataaatgtccaccatatgtttggaattttgctaagaactatacagggcaggaagagaaagcatttcttctatccttaagtaattggaaatctaatgggaaagacaagcaagtacataaattaatctgatatgaagtagagtgagcggtagggagggcaaaaatgttgaaaagtaaattgggttatatgaggacatcaaaagaggttatttaagtgtgtgtgtgtttttaatgcattg

SEQ ID NO: 60790 - DNA, 600 bp, Homo sapiens
gttacagaaaaggaggaggtgcagttcaccaccgtcctctgctccaagatccagcaggacccagagctgctcgcctacatcctggaagtgagcactctgatcgggaacaggagggggagggcccagaaccccagggcaagccccctctgccctcctgaggaggcagaagcagagatcaggtacccgggaggcacgcaggcagcttcccctccagctccaggccgacgccctgctggcagcccaccctgcggtcccagtgggggaccctgggaagtggtccccaccaggyctggcctcatctcaccctcttttcagggtaaaaagattgtaggtaggaagaaagcatgcggagaacccactgccctgcctaaggacacaaccagccacggggacaaggactgctcccacgatggtgctcctgccaggccccagctggacggggagtcctgtggggcccaggccttgaacagccacatgcctgctgagaccgaggagctggacggtgggaccacagagagcaacctgattacctccctgcttgggctgtgccagagcaaggtgctggcagcagagatggagaggttgggggtgggggaaggg

SEQ ID NO: 60791 - DNA, 1115 bp, Homo sapiens
gttagccatgccaaggcacccctgggagctgggtggggaaggggctatcctgccgacccccttcctgctccagatcagcatcaccacactccggctgtttgaggagctgctgcagaagccccacgaggggatcatccacagcctggtcctgcgcaaccttgagggccgcccttacgtggcctggggctcaccagagcctgagagctatgaggacaccctgtaagtgaaaccggcgccctttggactcagcccagcccttagcactcgcacgctcactctgtccattcattcactggtgccgyactgctctgccctggccacagagacctggaggaagacccctacttcaccgacagcttcctggattccggctttcaaactcccgcaaagcctcgcctagctcctgctaccagttacgatggcaaaacagcagtgaccgagatcgtcaacaggtggggagcaagttaggcagtctgaaccacttgagttttattttattttattttattttttgagatagagtctcgctccgtcacccaggatggagtgcagtggtacaatctcggctcactgcaacctccacctcccgggttccggatccaagcgattcctgtgcctcagcctcccgagtacctgggattacagacatgcaccaccacacccagctaatttttatagttttagtagagactgggtttccccatgttggccaggcaggtctcgaactcctgacctcaggtgatccgcccacctcagcctcccaaagtgctgggattacagacatgagccaccgtgcctgccctgagttttactctttggccacagccctggggtccagtcagggagggagatggggtcccacaagcaggggagagcagggtgagccgggagcgcctccacaccggcttctatctctcagtttcctgtgcctggtccccgaggaagccaagacctctgccttcctggaggagacaggctatgacacatacgtccacgatgcttatggcctggtgagtggctcctgctaccagctcccacttcctgtccttcagaacagctgggtcataagctctgggttccgcctctctcatctgcccaaggaccccagcccatcc

SEQ ID NO: 60792 - DNA, 345 bp, Homo sapiens
gaggggggtccccaagagactgcgggagggcaggctgagaacgtggaggaaaaggagccagatgttggctctcaactcgtgttgatcactgggtggctttttaaaatcccaatgcccagtgccccatcaccagttaaattattgttgctgggggtrcacccagagttcaagctctccaggtggttgtgcatggtggctcacgcctataatcctagtaccttgggaggctgaggcgggaggatcacttgaggacagaagttcaagaccagccttggcaacatagtgagaaccccatctctactaaaagcttaaaaatgcgcctgtggttccagctacttgggaggc

SEQ ID NO: 60793 - DNA, 761 bp, Homo sapiens
ggctcaaggagagagcagaggcagcacctgcagctcctgtcccacttgaagttcctctggggccgcccactgcccaacccttggagggctcagagctgtgtttcattagggatgggtcccctcagagtcacatcccgggccagcasgccaactggagggagccccaggggccgtgctggacagcagactggcccgcactgtcagtgcactgggaaaggcatgggtgcctgtgggtaacacgaggggagcagcagctcctggacagtagtccccatcactttctccccacagagacgtgtaggcagggaggcaaggtgagtaacacctctttactcagcaacgtgctcctccctcgggggaccttccccagtgcccctccatgctcgaagggcctggaaggatcagaatgcaggcctttcccaaggacggcacagaacgtgatgaggagatgccactgggggtgcagaaagctccccatccccctgggaagaggcgtcagcgtgccctcagggtagtcaggtcctgagctttggactcctcgcttggttaaaggcactgtcccttgtgcaatctagaggaatgctcctcaaagcatctctcctggggaccaggagagccgcccctgctcccaatgcaacaagatccctgatcgccagcctcttgcctccctcagagggagacaagtccgcactggagggagcacggctgcctagctccctgtcacctcccccacctctctatctgttcactgggacaacaga

SEQ ID NO: 60794 - DNA, 761 bp, Homo sapiens
ggctcaaggagagagcagaggcagcacctgcagctcctgtcccacttgaagttcctctggggccgcccactgcccaacccttggagggctcagagctgtgtttcattagggatgggtcccctcagagtcacatcccgggccagcaggccaactggagggagccccaggggccgtgctggacagcagactggcccgcactgtcagtgcactgggaaaggcatgggtgcctgtgggtaacacgaggggagcagcagctcctggacagtagtccccatcactttctccccacagagacgtgtaggcagggaggcaaggtgagtaacacctctttactcagcaacgtgctcctccctcgggggaccttccccagtgcccctccatgctcgaagggcctggaaggatcagaatgcaggcctttcccaaggacggcacagaacgtgatgaggagatgccactgggggtgcagaaagctccccatccccctgggaagaggcgtcagcgtgccctcagggtagtcaggtcctgagctttggactcctcgcttggttaaaggcactgtcccttgtgcaatctagaggaatgctcctcaaagcatctctcctggggaccaggagagccgcccctgctcccaatgcaacaagatccctgatcgccagcctcttgcctccctcagagggagacaagtccgcactggagggagcacggctgcctagctccctgtcacctccyccacctctctatctgttcactgggacaacaga

SEQ ID NO: 60795 - DNA, 1437 bp, Homo sapiens
  misc_feature (1)...(1437): n = A,T,C or G
gcataaatgattctgtgaaaggtgttagctattttgtccgtattctgtttaatgttgctcagaccgcatctgtaccctttctaccaacattgtagtagttgtcacgaaaatgttccctttagtgctgttcaaagtgaacaactgagggatttttgtaattttgtcatcatttcgtattctttaattctctagaattcaaaaatctgttggttttcttcaacaaaagcagttgagagaatcttcagttcattttgaaacatggaaatcatagtttaattctggtagcccaaaaagttcttgttgactttttaaataattcattgaatgaagtctacttatttcttgttcattgttttcactttctctcaagcaaaaagattatgcaaatcaaagaagagtaaacagtgttattgaagtactccattgctaacagaaacttgttgaatggataaaaaaaaaagaaaacaaaaactcatcctttaagtgtcaagattgttcttactaggcacagtattgcctagtaatgaataggaatgaataggatgaatagaattcatcctatttatgaatttccctagttatgaataggaaaagaannnnnnnnnnnnnnnnnnnnnnnnnnnnnnnnnnnnnnnnnnnnnnnnnnnnnnnnnnnnnnnnnnnnnnnnnnnnnnnnnnnnnnnnnnnnnnnnnnnncaaagtctttgcagatgtaactaaatgaaagatctcaagacgaaatcattcaagattagtcaggtgggcctaaatccaataatccagccttataaaagaaaaaaagagaagaagacagggagaagggatggtcaatatgaagatggaggcagagattggaaggaagcaaccataaaccaaaggatccccagaaccactagagcagggagagacaagaagtgtttctcccctaaagccttcagagagagtgcaaccctgcaaacgcctagcttctggacctctggtgtccagcaccaataccatgagagaataaacttctgttgttttaagccaccaagtttgtggtaatttgtcacagtagccataggaaagtaatacacccccttctaccttttcataataattcacaagctgcaatgcttgatgtccactttcaaaaggaaacttcaggtcttatttattatagcatttatgtatttgttaagccatttaacatatataaaattgcactaccatttttaataggttttcatcttctttacgggtcacygattacacttttgagtgttttgtttataaatgtattttttccacaatccctgtgatttttactgtatgcttttgcataatgtggtttttatggacatgtgtattacattataacacggctgactgcacatgttttggataactatattacacatttttcttgggtatatattcggtcatggaattgctaga

SEQ ID NO: 60796 - DNA, 1437 bp, Homo sapiens
  misc_feature (1)...(1437): n = A,T,C or G
gcataaatgattctgtgaaaggtgttagctattttgtccgtattctgtttaatgttgctcagaccgcatctgtaccctttctaccaacattgtagtagttgtcacgaaaatgttccctttagtgctgttcaaagtgaacaactgagggatttttgtaattttgtcatcatttcgtattctttaattctctagaattcaaaaatctgttggttttcttcaacaaaagcagttgagagaatcttcagttcattttgaaacatggaaatcatagtttaattctggtagcccaaaaagttcttgttgactttttaaataattcattgaatgaagtctacttatttcttgttcattgttttcactttctctcaagcaaaaagattatgcaaatcaaagaagagtaaacagtgttattgaagtactccattgctaacagaaacttgttgaatggataaaaaaaaaagaaaacaaaaactcatcctttaagtgtcaagattgttcttactaggcacagtattgcctagtaatgaataggaatgaataggatgaatagaattcatcctatttatgaatttccctagttatgaataggaaaagaannnnnnnnnnnnnnnnnnnnnnnnnnnnnnnnnnnnnnnnnnnnnnnnnnnnnnnnnnnnnnnnnnnnnnnnnnnnnnnnnnnnnnnnnnnnnnnnnnnncaaagtctttgcagatgtaactaaatgaaagatctcaagacgaaatcattcaagattagtcaggtgggcctaaatccaataatccagccttataaaagaaaaaaagagaagaagacagggagaagggatggtcaatatgaagatggaggcagagattggaaggaagcaaccataaaccaaaggatccccagaaccactagagcagggagagacaagaagtgtttctcccctaaagccttcagagagagtgcaaccctgcaaacgcctagcttctggacctctggtgtccagcaccaataccatgagagaataaacttctgttgttttaagccaccaagtttgtggtaatttgtcacagtagccataggaaagtaatacacccccttctaccttttcataataattcacaagctgcaatgcttgatgtccactttcaaaaggaaacttcaggtcttatttattatagcatttatgtatttgttaagccatttaacatatataaaattgcactaccatttttaataggttttcatcttctttacgggtcactgattacacttttgagtgttttgtttataaatgtattttttccacaatccctgtgatttttactgtatgcttttgcataatgtggtttttatggacatgtgtrttacattataacacggctgactgcacatgttttggataactatattacacatttttcttgggtatatattcggtcatggaattgctaga

SEQ ID NO: 60797 - DNA, 1437 bp, Homo sapiens
  misc_feature (1)...(1437): n = A,T,C or G
gcataaatgattctgtgaaaggtgttagctattttgtccgtattctgtttaatgttgctcagaccgcatctgtaccctttctaccaacattgtagtagttgtcacgaaaatgttccctttagtgctgttcaaagtgaacaactgagggatttttgtaattttgtcatcatttcgtattctttaattctctagaattcaaaaatctgttggttttcttcaacaaaagcagttgagagaatcttcagttcattttgaaacatggaaatcatagtttaattctggtagcccaaaaagttcttgttgactttttaaataattcattgaatgaagtctacttatttcttgttcattgttttcactttctctcaagcaaaaagattatgcaaatcaaagaagagtaaacagtgttattgaagtactccattgctaacagaaacttgttgaatggataaaaaaaaaagaaaacaaaaactcatcctttaagtgtcaagattgttcttactaggcacagtattgcctagtaatgaataggaatgaataggatgaatagaattcatcctatttatgaatttccctagttatgaataggaaaagaannnnnnnnnnnnnnnnnnnnnnnnnnnnnnnnnnnnnnnnnnnnnnnnnnnnnnnnnnnnnnnnnnnnnnnnnnnnnnnnnnnnnnnnnnnnnnnnnnnncaaagtctttgcagatgtaactaaatgaaagatctcaagacgaaatcattcaagattagtcaggtgggcctaaatccaataatccagccttataaaagaaaaaaagagaagaagacagggagaagggatggtcaatatgaagatggaggcagagattggaaggaagcaaccataaaccaaaggatccccagaaccactagagcagggagagacaagaagtgtttctcccctaaagccttcagagagagtgcaaccctgcaaacgcctagcttctggacctctggtgtccagcaccaataccatgagagaataaacttctgttgttttaagccaccaagtttgtggtaatttgtcacagtagccataggaaagtaatacacccccttctaccttttcataataattcacaagctgcaatgcttgatgtccactttcaaaaggaaacttcaggtcttatttattatagcatttatgtatttgttaagccatttaacatatataaaattgcactaccatttttaataggttttcatcttctttacgggtcactgattacacttttgagtgttttgtttataaatgtattttttccacaatccctgtgatttttactgtatgcttttgcataatgtggtttttatggacatgtgtattacattataacayggctgactgcacatgttttggataactatattacacatttttcttgggtatatattcggtcatggaattgctaga

SEQ ID NO: 60798 - DNA, 1309 bp, Homo sapiens
tatgcatgttggattattgatctttaagaaaaattgtagaaataatttggatgaacatgaattcagtgatcctaattcaaacccaagaaagtccaattatgagtcatcctttattagtcccagttggatttgtttgaaaaaaaagtaattagttttctatattctgtgatttgcaggatgattagaaattaactcctttccgaaacatctctcaccaacagtgccattgtgcttgaaatattgttatatattaattattactaaaatattactgcctcaggataattcgtaacaacaacataaacaactaacctttgctaagcatttgttgtgtgccaggaattctgttaaatctatcaagtgcattatttcacataattcttaaagctgaaaactaaattctgaaaactaaagcttaaagaggttaaataacttaccaaacattgcacagatagataatggtggaaatgtgtgttccaatactttgaaacttaccttattctttatatttgttatattttatatttgtcctagaaaatatgcttatattttatatttgcctcttggcaagaatactctttctgctctgagtgtcaaaattttatcattcaatataaagctttgtatgatgatcacagacaagtatcctctgcatttgagctgttcttacttctataatagatcgtgtgacagtgatttgaaatattttttaaatttcaatattccttaccatgctacattttgtaagggcagtgaacgtatcttttatataataacaattattattgttactgctattcttagtgttctaagactgaacacaatggcaactgcatatatgatgttccataaatgattgctagatgagagcatataaaattagcatcagcatcttataatgtttcatgttgctttcctttataaatggtgaaatctacagtagcatggaaaactttaatgcccaggagatatcaatagatattaatcaatatctaatacccatgtatagaaacaaaaatgataaaaggatgtggaaatcctttgtggtttggcattgaaacagacctgcttttgctgttcactaaaacaaattrtcctgataaagtgactgatttaggtattgatgacaaagaagagtggttggagccttcagttacaattggtgaactggaccctcatgcttaactctcctccaatctgaaatctgcacaaacaatattaaagggttaacaaaatgaatcacgagatcaaaaatagcaggtaagaagaaccattaagaatgaagttttggaggctatgatatggatgc

SEQ ID NO: 60799 - DNA, 387 bp, Homo sapiens
tgagattatcagatttgtccagatatttggacagtattatattgataatgtttgaattttttaaaatttctgacttttaagatattgtccaggttatgtgcttctatctcttggccattattattttggctcatacttgaagactatcaattacagatgagtcaattaaggcagaaacgcttggtataaaartataaaacaccatcataaacaatatttgaccttggaaaggttctggggaaaaaagtgaattaatcagcacagattcattggcagagtctgttcaagggtgtatcaccaacctcaataatggtgctaggtgtgagccaatccaccggatacactcactcctctgatcctactgaaattcatcttgaccatttgctt

SEQ ID NO: 60800 - DNA, 661 bp, Homo sapiens
gctgcttttaacgggagcaggagggaaatagaactgcaaataatgttttaaaaggactttcatcctaataatttatttctttaacaaaagtggaagaaaatataacaaaacaagtaaaatattcacaggtattcattctgattgtaggtgtggaaaatacagatttttgctacattattcttgtaattttccctatttgaactctttttaaaataaagtattttattcccatctgctttgtgctgggatcgtaatgccatagatatagacagayttctaggcagacagattatagaacaagactgtgaagagtaacaattagatatgctgttccatcctctgagatacactgtgagcagtaacatgatgcagcacaaacagcacttagctcttggctgagtgaggtgatagacagacaaacactttcagcctataacacatctttatattgtgtattacttcaatactacctaaataccatgggatctctttctgacaacaaagttaacagaaagtgggcagcaaaatatgttctatgtaaaaagaagaaatgtgagtactaagctattttctagaaatcagtgacactatatcaactataagcattcagtgactataaaaacattttaagggctacatccacaatacaaacagacaaaat

SEQ ID NO: 60801 - DNA, 523 bp, Homo sapiens
acattataaggctaccagaggtgcgaggaatttactcagcaaacacatatttgggatgttccctctgccagaaatgatgctagtaataggagatgaagcaaatatgacatagtcctcatcctagaaatacttattctagtcttggaatgtaaataaatatatatagyatatgacatgcaaaaatatcactgaatttggacaataggcgttaaatcaaaaaatttttggtgagtgaaaaaatacaattttgtacagtggaatgagtgggtctgaagggctggttcttagacaaggagtaaattctcttctcactttctgagatttcccttggaaaaatagtttaaacttatgtttttagccactatctacgtaccaagccaaatatagaccctcggcccagacttcctgctgagcttcagaaccataaagccactacccactgaacattagcacttgacattccggtatttctaggataaggtctatgtcatatttagtttatctcctattactagcatcattt

SEQ ID NO: 60802 - DNA, 523 bp, Homo sapiens
acattataaggctaccagaggtgcgaggaatttactcagcaaacacatatttgggatgttccctctgccagaaatgatgctagtaataggagatgaagcaaatatgacatagtcctcatcctagaaatacttattctagtcttggaatgtaaataaatatatatagtatatgacatgcaaaaatatcactgaatttggacaataggcgttaaatcaaaaaatttttggtgagtgaaaaaatacaattttgtacagtggaatgagtgggtctgaagggctggttcttagacaaggagtaaattctcttctcactttctgagatttcccttggaaaaatagtttaaacttatgtttttagccactatctacrtaccaagccaaatatagaccctcggcccagacttcctgctgagcttcagaaccataaagccactacccactgaacattagcacttgacattccggtatttctaggataaggtctatgtcatatttagtttatctcctattactagcatcattt

SEQ ID NO: 60803 - DNA, 593 bp, Homo sapiens
caacatcttttttgtttgtttgtttctgagacaaggtattgctatgttgcccaggttggagtgcagtggctattcaaagcctctaactcctgggttcaggcaattctcctgtctctgcctcctgagtagctgggactacaggcatacagcacctcgccaggctaatcctaacatcttggttttcctgtaatttactttataaagcaagtactgggtgtgcacagtgacccatgcctgtaaccccaacactttgggaggctgaaacaggaggatcacttcagaccaggagttcaagaccagtctcaacaatatagcaagatcctataacaaattaaaaaaaaaagtagctcactgtggtggcatgtgtctgtagtcttagytattcaggaggctaaaatgggaggatcacttcagcccaggagtttgaggctgtagtgagctatgattgcaccactgcattccagcctgtgcaacagagcaagaccctatctcaaaaaaaaaaaaaaaaaggccaggcgcggtggctcacgcctgtaatcccagcactttgggaggccgagacgggcggatcacgaggtcaggagcttgagacc

SEQ ID NO: 60804 - DNA, 624 bp, Homo sapiens
caggccctgatgcccaacccccagcagagctaacctgtgctcccaggttcccctacctctgcaggaactctgccagcccgcctaggcagcagtgggccatccgctccccaaactcctggctgatgcggggtgctcgctctgtgtgctcttccagcagctgtgargtccagggcgacaagaagaggtgaggaggggcaaggtcccactttccatccagcccatcccccagcctccctccacctcctacctcacacacatcctgggccaggctgctgggctggtcctccaggctcccccagtgctcttcgtcctcctgcagcacacggagaagggcagcccgggtctgagcctacagtagggagaggggagacaggcaggagttgggggcggcctggaggtctttttttttatctctttctcccaccacaatcccctagcccttaaccccaagcagttctggattctacctatgagcttgtcaaggtgatgctggggagggaggctgagccagaaaacttctgcagcccttcccactcctaactctgtggtttggaacttcatattaaaagtctggtttggccaagcgtgatggctcacacatgtaatctctttgggaggctgagg

SEQ ID NO: 60805 - DNA, 725 bp, Homo sapiens
tttttaatttttaatttttttaattttttatttccatagatttttggggggaacagatggtatttggttacatgagtaagttccttagttgtgatgcgtgagattttggtgcacccatcaccaaagcagtatgcactgaactcaatttgtagtcttttatccctcacctattattctaagtgaagtaattcaggaatggaaaaccaaacattgtatgttctcactcataagtgggagctaagctatgaggatgcaaaggcataagaatgatacaatggactttggggactcagagggaaggagtaggaagtgggtgagcgcaatctgtgttttcatcaactctatagtgattctagtatagrattaagtttgagaaccctgatctctagataatttacactcacccagctctgttcacccccagaggaagcttctgtgaccctctctcatgctctgctggatttggtgccctcccatttgctcccatatcattgctctgccatggcatttattattgtattatccctgcttatttatttgcttgtctcctcttttaaactcaaagttccttgagaataaagactgtgttttatggtcattgactctccaatgtcttccacagcacttaacatacattaggagctcaaaagtgtttatgaatgagagactgaatgaatggagaagtagattcctacctttaatcacatatacaagtatactaaata

SEQ ID NO: 60806 - DNA, 725 bp, Homo sapiens
tttttaatttttaatttttttaattttttatttccatagatttttggggggaacagatggtatttggttacatgagtaagttccttagttgtgatgcgtgagattttggtgcacccatcaccaaagcagtatgcactgaactcaatttgtagtcttttatccctcacctattattctaagtgaagtaattcaggaatggaaaaccaaacattgtatgttctcactcataagtgggagctaagctatgaggatgcaaaggcataagaatgatacaatggactttggggactcagagggaaggagtaggaagtgggtgagcgcaatctgtgttttcatcaactctatagtgattctagtataggattaagtttgagaaccctgrtctctagataatttacactcacccagctctgttcacccccagaggaagcttctgtgaccctctctcatgctctgctggatttggtgccctcccatttgctcccatatcattgctctgccatggcatttattattgtattatccctgcttatttatttgcttgtctcctcttttaaactcaaagttccttgagaataaagactgtgttttatggtcattgactctccaatgtcttccacagcacttaacatacattaggagctcaaaagtgtttatgaatgagagactgaatgaatggagaagtagattcctacctttaatcacatatacaagtatactaaata

SEQ ID NO: 60807 - DNA, 725 bp, Homo sapiens
tttttaatttttaatttttttaattttttatttccatagatttttggggggaacagatggtatttggttacatgagtaagttccttagttgtgatgcgtgagattttggtgcacccatcaccaaagcagtatgcactgaactcaatttgtagtcttttatccctcacctattattctaagtgaagtaattcaggaatggaaaaccaaacattgtatgttctcactcataagtgggagctaagctatgaggatgcaaaggcataagaatgatacaatggactttggggactcagagggaaggagtaggaagtgggtgagcgcaatctgtgttttcatcaactctatagtgattctagtataggattaagtttgagaaccctgatctctagataatttacactcacccagctctgttcacccccagaggaagcttctgtgaccctctctcatgctctgctggatttggtgccctcccatttgctcccatatcattgctctgccatggcatttattattgtattatccctgcttatttatttgcttgtctcctcttttaractcaaagttccttgagaataaagactgtgttttatggtcattgactctccaatgtcttccacagcacttaacatacattaggagctcaaaagtgtttatgaatgagagactgaatgaatggagaagtagattcctacctttaatcacatatacaagtatactaaata

SEQ ID NO: 60808 - DNA, 1825 bp, Homo sapiens
tgcattcaaagcaattagcacagcacttttcatataataagccctcagaactggcacctattattagatacccatgaaaagatcactcacagagaacgtgagctgatcaaagcccaagtgctaggtaaatggtagaaataatcagcatactagaaattctaacaggggagatgccaagcagaagctggtcctggaggggaaggaatctgaaccaggcattgagggatggatgggtaggatttggtgatcaggggaaggaatctgaaccaggcattgagggatggatgggtaggatttggtgatcaaaataaggcaacaacagctacatgtttaaagtttatggctcttttcttcctttccatttataactgcagaagcagccacagcaagatataggggcggtgccaacccacctcccccgcacagtagaagctgctttaaaacagaactggctctcacttctctggcttccagtcactgtgtctggaggggagacagagagctggtgccctggctcgtaccaggctccctccagggttcttaattatgttcaacttaaactgggttttcccccctgttattcagtgctgcagttgtatcagcttattccaaaataaagatgtgttgctctttaaatttgagcaattttactttttcaccacatttttagtgcccttctttcagaaatggtgacaataaatgggaaaaatcatggaaaggactcaaaagtgtttatttatgatgtggaagaaaaatgttaacagcaatgctcttcagcaggcaaaagggtggcaaacccgcacctccttgcgtgacctctctgcctgcccacagagaaaagaaagaaggtagggtagaagagagagagagagggagggagggagggagggagggagggaagtcagttggtctacaacctgcatacaggttcatgattttcttttacctttatggggtgcaaaccaattgttcaaagtataaatatcagttagttaaggactccaaaatattgttctgcatatcactggctaaccctgtaagaggctataataaagggaaggggtcttcaattcagtgctcgggaaatgatgtttggccatcttcatcttaaagattcacagcacacatatgcatttttaaggttctcagaaatcctgcaataaagaaagttgcttacctttatgtaaccgagtcaatcccaaatttatctggccaggaggtttttttgtttttgtttttgttgcatgcaacacctattaaccattgtttagaatttgagttctgtggaataggaatacagtatgaaaatactcaaagtatatttctttactgatatttgtcttcttttgctcasattctcacacagatttgtggaaagagcaaacctgcatttaaaaaaatacttcataaacaataacaaatttttaatcccccagactttcactacccaaaaaaaactattttaatttttcaggtcttcccctctgcaatattacccttgatattatcttctttctacataagaactcaaaaacatagccatcccatcaggcagtccacaaaactcaaagcattgtttaaaaaatgcatctgcatgtggacattcccccgcccccaggtgtttatctgttttccttttaattcttaccctattctatgaacaagaggaagcttttagctgagaaagagaaatgcagaaagcacctcaggctttggagttttctgttaatgttgttgagatgtgggcaaaaaaaaaattttttctaatctatgacaaaagaaaacctggctttccatatagaaagtaactgtgtctcccgcaatt

SEQ ID NO: 60809 - DNA, 663 bp, Homo sapiens
ttcacagatagtcttcaaatgatactatatttcttcttgcaaagtataagaatttcacattaaatagtttcatttctcaattcccacctttatgttattgttgtcattcattttacttttatgtagtacaaaaactgcaaaccattgttatttagtgtaaaattttgttatttactttgtaaaggaatttacataacaagaaaaccaataatatattttttctcgtttctatttccagtgttccttactccttttgcatttctatatttccattaggtatcttatttttctgcccaaaggacttcctttaatgtctcttgtaaggctggtttgttaaaaaataatttttttcagtgtttctaagtctgaaaaattcttgatttcatggtyttttttggaaacatatgttaactcttttaaaaattctatttgctagatatatggcttcagtactttaaacataatgctttactatcttcttgcttagattgattatgatagtaaatcctgttatttttatcttttctttcctctatacttaactcaccatttttttaattaaaaaaattcttaaacattaacatttttatcactaatttgaataatttgtttctgaagtgctttgatacagttttctttctgtttcttctgcttaggtttcat

SEQ ID NO: 60810 - DNA, 985 bp, Homo sapiens
taaaaggtacacaccaatttacatcgatagctgagaaacggtggtggtacatctagaaattacttaattattaaaagtagtctcttaagtagaattcaagcatccttagttacccacctataatcctggactcaaggaatatttcttgtaaatattctcttctttctcctagagactgactatcatgccaaagtctagtttggtagcgagttttgaccttttgttctggtcatcatctgcatacttactgttaagcaagtacctatttctttttaagtgccctgtgtgagaaaagatcccattttctaactatacccacatgagcaaaatctagatattatgaagcagggataacaaaagctgcggctacacttaactctagcttggccaaagtagttaatttcctcaaagcttcaaaaaaaattacttttgcagataaattttattcgaaatgaaaatacaaattttattcgaaatgaaaatacagttttacaatgaatactgttcagtactttcttatttttaattaataatcagatgttacttctttgtgctgtgagcccagaatgagaaagttgtaccaaatatgtcaatattgaataactgtttccctgatcaattgccactaatatgaataaattgtattacttaaaatatgtgggaggtattttgaacatcacaagcctgaactaaaatcttccttctctgagcatacatctttagtttctcaattcttttttctcttgaaatatacctagaattgacttaaaacattagaaatagatacataattatataaatatattagaaatacatggatgccttaaaaatcaaatccatttatcatttgctttattaaagtttctaagacttttttcctgttttcatttttttgtttttaartatcaaattttatcttagatgcaagggtacatgccaaggtttcttacctgggaatgttgtgtgatgctgaagtttggggtat

SEQ ID NO: 60811 - DNA, 578 bp, Homo sapiens
tgggcaacagaatgagaccctgtttcaagaaaaaaaaaaaaaaagatagacagtggggatcaaggcaggcctgaggcatactcaggtgggagrgagtagatgtttgaggaagcagaggaggttatttggtaggaggatggtgcaaagcagccaggctaagtcatgttaacagggagactaaggaaggagcatccatcatttgctgatgctgactgagctcctttaagctgccttgaatgtggaaccaccttccaactgcatatcaaggagcccgtcctaacactattagtagtaatgatggtgatgatagtaaacacagacataacatttactatgagttaagtagttagtagtattcattctatacttattaactcgtgaatccagacaataatcctatgaaaccaagaggatcactatttatagataagaaactgaggcacaaaaaggttgaataatttgtctacagtcccacaactggtaactggtagctttggtcccaattgacctggttccagtgactgtgcacataaccataacacagcattgcttttattcctagattaccatgtaattcc

SEQ ID NO: 60812 - DNA, 578 bp, Homo sapiens
tgggcaacagaatgagaccctgtttcaagaaaaaaaaaaaaaaagatagacagtggggatcaaggcaggcctgaggcatactcaggtgggagggagtagatgtttgaggaagcagaggaggttatttggtaggaggatggtgcaaagcagccaggctaagtcatgttaacagggagactaaggaaggagcatccatcatttgctgatgctgactgagctcctttaagctgccttgaatgtggaaccaccttccaactgcatatcaaggagcccgtcctaacactattagyagtaatgatggtgatgatagtaaacacagacataacatttactatgagttaagtagttagtagtattcattctatacttattaactcgtgaatccagacaataatcctatgaaaccaagaggatcactatttatagataagaaactgaggcacaaaaaggttgaataatttgtctacagtcccacaactggtaactggtagctttggtcccaattgacctggttccagtgactgtgcacataaccataacacagcattgcttttattcctagattaccatgtaattcc

SEQ ID NO: 60813 - DNA, 1279 bp, Homo sapiens
tgtgtgttgtgtgtgcatgtgtgttgtgtgcatgggggttgggggggttctgtgagtgtttccagagaaaggcaccaaagtttctggaaggttttcaaaaaggtttatgccctaaaaaataagaaaaaccacttctcccttcccggctgaacctggacctaactgtgtggtggttccaaccgaagagggcatggagcctcacccctggcagcttctgggatccttctagaagcctttcactgctttctcagcctgtcagaaaggagagaaggcttgtcttgagaggggccaaaagagtgactttagtcagcccaggaaacctggctcaaaggttcacaaagcaaggaggccttgagatggggctgactgtccccttccctctgctctgagactgaagtcctacaggacctggggacaatcagtctaatgaccagaccacctaatgatcaatttatctatctaaaggtccatttcccaaatactcrtgttgatcagtattacagcactcacatgcaataggacaatttcagcctcctattgaaaatttgtggcatccctttttctcatttgcttacctttgagtatttcaaggatttttttaagccaacttatttaaaaattctaattttaaaaatattttataatgaaggcaagctcaactggaaaaaagaacagcaaaaagagatgagtatattcaaaaaagataaatgagctgaattgtacatgcagtatgtaaatttggtaaatatttattagaaatgggaactgtgagcagacattgcctataagcagatgggttagaaaagcctggaaatgttcccaactagacaacatagcagtttcctcccctttgctaatttttccatcctaaggaaagtgatgcaaattagaggatcaggaatggctgacaaaggtgtccttaggcaaatgggatgcaaaccctgggaaaggccttgatgaggggaagccccaggaatggctgggtccaggggaattccccaaaggactttaacactggtaaactgtcttaagcaggaggacattttcatgctggagaagggcgagttggcagaggtggcattgtgactgccatgggcacctcagccttgcactttggttcacaggattcacactcccacatactcaagtcatgcccaggccttgggcttggggaggcccacttcctccagtccacggcttcccaggtttattcttatatctcatctcctgatgcttcagctcaatagaaactccatgaagatggggactgagtctgcct

SEQ ID NO: 60814 - DNA, 1279 bp, Homo sapiens
tgtgtgttgtgtgtgcatgtgtgttgtgtgcatgggggttgggggggttctgtgagtgtttccagagaaaggcaccaaagtttctggaaggttttcaaaaaggtttatgccctaaaaaataagaaaaaccacttctcccttcccggctgaacctggacctaactgtgtggtggttccaaccgaagagggcatggagcctcacccctggcagcttctgggatccttctagaagcctttcactgctttctcagcctgtcagaaaggagagaaggcttgtcttgagaggggccaaaagagtgactttagtcagcccaggaaacctggctcaaaggttcacaaagcaaggaggccttgagatggggctgactgtccccttccctctgctctgagactgaagtcctacaggacctggggacaatcagtctaatgaccagaccacctaatgatcaatttatctatctaaaggtccatttcccaaatactcgtgttgatcagtattacagcactcacatgcaataggacaatttcagcctcctattgaaaatttgtggcatccctttttctcatttgcttacctttgagtatttcaaggatttttttaagccaacttatttaaaaattctaattttaaaaatattttataatgaaggcaagctcaactggaaaaaagaacagcaaaaagagatgagtatattcaaaaaagataaatgagctgaattgtacatgcagtatgtaaatttggtaaatatttattagaaatgggaactgtgagcagacattgcctataagcagatgggttagaaaagcctggaaatgttcccaactagacaacatagcagtttcctcccctttgctaatttttccatcctaaggaaagtgatgcaaattagaggatcaggaatggctgacaaaggtgtccttaggcaaatgggatgcaaaccctgggaaaggccttgatgaggggaagccccaggaatggctgggtccaggggaattccccaaaggactttaacactggtaaactgtcttaagcaggaggacattttcatgctggagaagggcgagttggcagaggtggcattgtgactgccatgggcacctcagccttgcactttggttcacaggattcacactcccacatactcaagtcatgcccaggccttgggcttggggaggcccacttcctccagtccacggcttcccaggtttattcttatatctcatctcctgatgcttcagctcaatrgaaactccatgaagatggggactgagtctgcct

SEQ ID NO: 60815 - DNA, 512 bp, Homo sapiens
ctcaggggctcaggagcccatggtgcatctgagggctgaagcagacttgatgtggtggctggggacagaaaccagccagcaaaacgcaggattgaggagtgacacatccccgccacgggctgggctgctttgctgaagcaaggggctctctttaggtttggacacttaaaaaactaaaacccacttgccaggcctcggagatgttttatgtccgtgtgctgaatggacagattctatactcctcccgaggcgctcactaaggtggaccctggcccacacagtttggagaggcctcgggacctctagaaggcagccgctgtggatgctgaagaatcagggagggaattggactggggtctccctggggtggggataaagtgacagaaatcttcctctgatcacaagaggcacattccaggagagagacgcctgaaggtattgtcagcagcccacagagcatctgygaggaggccagtgcatcaccaggagccgggcctcggaggccacagagg

SEQ ID NO: 60816 - DNA, 753 bp, Homo sapiens
acccaaatccccttggatgctgcttaccaactctgagtgccccgccccacccctggcttctgtgtgctttggcgtctgatggccttcaggctgctggagccactttgaccctgagtgcagagaactggaagccagggtgggacgcttggccagtggcagagggccttgctttgagtctgaccaacacagaggcgtgatctacattgtgggcacccctccccagcctcctgcatgtaccctggctgggtgcctccctcgccctcaccagctcccccaggagcacacccttgatgcatyccttgtacaggaatcctcatctcagactttactcctggggtctggccagagcagcactgtacccggggccctttctatctggtcctcacagttcctccccgaggcggggagggtgactattcttatctgacaggaaactgaggctctgatcagctcacagaccgcaaaggttaagccagaatcggaacccagaccctggagaggatgcttttccttcctgaacttggattctgcagccttccacacagccccttcccctggactcctcctgcagccctggggaacgggaatcgtcctggtctgcatttcctgcagcaggaagtggctgggtgcagtgacttgggctctggaggagaagggtctttttgggaccccgcccatctcacccccaggcctgggggggattactggggcctgaaatgtgggtgctgtagctgtggctccctgagggaatga

SEQ ID NO: 60817 - DNA, 753 bp, Homo sapiens
acccaaatccccttggatgctgcttaccaactctgagtgccccgccccacccctggcttctgtgtgctttggcgtctgatggccttcaggctgctggagccactttgaccctgagtgcagagaactggaagccagggtgggacgcttggccagtggcagagggccttgctttgagtctgaccaacacagaggcgtgatctacattgtgggcacccctccccagcctcctgcatgtaccctggctgggtgcctccctcgccctcaccagctcccccaggagcacacccttgatgcatcccttgtacaggaatcctcatctcagactttactcctggggtcyggccagagcagcactgtacccggggccctttctatctggtcctcacagttcctccccgaggcggggagggtgactattcttatctgacaggaaactgaggctctgatcagctcacagaccgcaaaggttaagccagaatcggaacccagaccctggagaggatgcttttccttcctgaacttggattctgcagccttccacacagccccttcccctggactcctcctgcagccctggggaacgggaatcgtcctggtctgcatttcctgcagcaggaagtggctgggtgcagtgacttgggctctggaggagaagggtctttttgggaccccgcccatctcacccccaggcctgggggggattactggggcctgaaatgtgggtgctgtagctgtggctccctgagggaatga

SEQ ID NO: 60818 - DNA, 1256 bp, Homo sapiens
catgctgggcttaataactaggtgatggattgataggcacagcaagccaccatggcacacgttcacctgtgtaacaaacctgcacatcctgcacatgtaccccagaacttaaaattaaagttaaaattaatttttaaatgataaatgtgaaaacaacatactgcctacattcaacatattcaataaatcattattgaaaccaaaccccaaaattttaagcatcatttccaaatttacctcttcatcaaaagggataacaatttcagtgtgtatagacctcaagtctttttttttttttttttttgagacggagtctcgcgctgtcacccaggctggagtgcagtggtgtgatctcgcctcacggcaacatctgcctcccgggttcaagcaattctcctgtctcagcctccccagtagctgggattacaggcgccggccaccacgcctggctaatttttgtatttttagtagagacagggtttcaccttgttggttaggctggtctaaaactcctgacctcaggcgatccaccctcctmggcctcccaaagtgctgggattacaggcatgagccaccacacccagctagagctcaagtcttgagtgaagtatactttcttaacattcagagtatttaaaaaatttaattaggaggtcattaggctgaaacaactccggcaccttgggtcccctactagtaaaccaaaacctaactcattgtcaacagtaaaatgaaacttaagcttaatcaatcagaaaccaccaactaacctctaactaggaactttccactttaaccaatcaaatattttctttgtctttcttccacaaacaccttataaaagttttcccatcaaacctccttgatggagtcctggactgcttaaggtctggtgctgcccaattcatgaatctctgcctgcacaaataaattcttccaaattttaatgtgcctaagtttatctttcaacaaaagcaaccaaattttacaaaagttaaaaactaaaactaaaattttccacaagaaaatattggggcaggggaggtaaattaaactgggctatgtagctagagccaaaaccaaattaaacaaggcctaatgagaaccaggcagaagcctaagagaaatctcgtacacccttttcaccctggcatttctttgcttagagtccatcagagtctgtattgaaagggatgaaatgtgaacacatttactaaagaaattgctgtactttctcacgtaatgatataggctcc

SEQ ID NO: 60819 - DNA, 1099 bp, Homo sapiens
gtgacaggttgataggtgcagcaagccaccatggcacacatttttctatgcaacaaacttgcacatcctatcctgcacgtgtatcccagaactcaaaaagacatccctgccatttctctrtctccaattgcctagactttttccctaggtctctaacttaacagttaaaacacgaactcttgaactatctaaaagagagttgtactcctaaccatcacaagcgtcccaccctccctttttctccccagtaacaagtggcctcatgcctggaagcattgggattgcagatgttcaagtggtgctgaaagtacttgtgtgaatggcatgcctgagctatcccagctctcacaatttactattcaaaacccaggaaccaatcagatttgggtatccctcaccatccaaactcacttcccgaaatctggttacccaaaggctggaaccaaacacgtggaccgggaggaatacatacttacattaacattgttttcaaaaaagaaatgacatccactagatggcgaactttcatcaattcttatgcttggtgtttcccaacgtcctacgcttgctatatcgtttcatagcacaatagaattggaattggaaatactcctacatgtaacaccactatcctttatacacatggataacagtgtatgacaaagttaattagtaaaagaaagcacacaaaaaccatatacacaattattacaactttataaaatatatgtgtgaaaaagtgctaggagctcaccaggctgaagtgtaatggatttccctcagccctccttgtcagttgattccctgcctctccatcgacttttcctgttcagctgccctcagtgtgggctgctcaatctcattatcaaaagagagcaaataccttgtcccttgtgagccatgctaatcaatgactgatcaccatgttgatcaaaggcatattcttcaatatcaagcccaaggccatcctagcagagcataaatttcatgccagacttaacagctgaggtgtcctgccagagaagaggcttgaagtatctcaaatgaaagtgaatggtgtgatttattaactcatactttgtctcctgagcaccaactg

SEQ ID NO: 60820 - DNA, 1739 bp, Homo sapiens
atgtgcaaaggtctttgtggatgagaagagctgggaggggcggtcatgtaagtgggcatccagggcaactatctcattctccaggtaaggaaactggggttcatagacgcgacccattcarggtcacaagattacctgtgagatggagtggattattctagttcctcactccttcctgccatgtgacttgcagaacaggagagtgagcagagtctgttttcctgccccatcattgttggccttgaccatgggacttgttttgaccaatgggatgtgagttaagtgaggggttgccagctaaaatctaagatcttaaggggcacgtgcacttctatcaataccttgaaaatttgctgcagggaaagatgtagctcccagaaatatgagagatctgtagaattccctcaatgcaatgtctagaatgcaatgtctagagtcagcctagagtcaaccccagctgaccccgaagcctgaagcagaactgccaccagcatttacctgccaaatcacagatgatctgcatttctgtgagcatggtaatcaatattttttgtaagccaccacgaatttgaagtggtctgtgatggaaacagctagctaatacatctggtatgactggagcttaggatgtaggccctatacctgggtttctagcttctctggggtcacctgagcaactaggtcccatcccagaaattgtggtttaattggtctgggtgctgggctgtgctttagacattctaaaagatctccaggtgaatttgaacatgcagacaagtgtttggatccctgccctacactacagagatgggatgacagaggtataagcacaggcttgatgaagctttaaacaccaagccaaagagcttggacttcattctgagagtgacgtggaaacagcgaagggttttaaggaggatgaagacatgtttatattcatgttttaaaaggatcacccaggcagttccagggcattctggaagccacgcctttatctggctgggctgcagggtttcctactaacttctgcctgacaaggtatgggatgtagacttgtacctggacactctttctggttcaggacctgtttcccaagtgctcagtacacactcaggtggccccacagctgctaataactgtcttaaaagaggagcaagaaaacaatctgcaactttttccagaaatcccatggctgctaccggaattcaggcctcaccacctctaacttggaatattacatcccctccactggccctgtctgctccccttccacccctccttcctccatgtgaagcccagctggtactgtttctgccctaccggagaggcagccctggctcctattcctataggatagtttcacaccctttcccagggagtcaaggcccctcctactgcagccctgatctttctagcttcatcttccattgcaaccttccaggggcctttgcatgaactgaaacacatctgcaattgtcttcctccatgcttttgaacataccaatctgtgccaggaatgctctcctctgacccctccacctgtcaaagtcatggttaactttacggcctacttaggggcctcgttctctaggaaataaatattcctagactcccacaacctcagacagaatgactgcctccttcctcagagcactaaagcctgtcctttgtcccctcattttccatgcaggcaattgatatccacatctccctccacctttctgagcccctgcaacctg

SEQ ID NO: 60821 - DNA, 894 bp, Homo sapiens
tcttcacaacagtcctctgaggtagctattatgtgttcttatctccaatttgcaaacaaaaactctttggcacagagggataaaatgagttgtccaaaggcacatagcctgaggtttgcaccacatgcgatctttcattttccaaggcctcctcaaacctgaacacccaccatgtgtgcccacctgcaggctgggccttcactggaaatgatctccagggctgactgcctcctcccagcccatctcaggatttggctaggcatgtccagatgctccctggcaggcagaaagggattggacactgacctggagctgtctgaagggctgggcatatgtcagggcatctgacccagggataggagctgacatgaggggctcccgatatcrggaaaagcctgacacatgaggatgtcaccatctcccaactatagtgggaaggctgacctagtaagtgggtgggacacagaagtggggaaattaggctgatagttgtaatctaagaagccctgatgggcaggaggcaggccctatcaccagccagggaagcaggtgagagggagagaacaggagctggggagaggaatggagttccttggcctgaaacaggctggccagggtaagagagggcccatgtcctggatgggggctggaggcagggcagagctgtcacagagacttggagccaagctctaagcccaaattccagcatcagacccagattacatggtatagggataagatgctagggcatagggccattgacccccatggaggcacaacgtcagcagtggaagaactgcaagaattaattattcttaagaaatggactctgaagctgggaccgaacaaaaccctgaactcattcaatgatgctctttcgatctcccttgctct

SEQ ID NO: 60822 - DNA, 894 bp, Homo sapiens
tcttcacaacagtcctctgaggtagctattatgtgttcttatctccaatttgcaaacaaaaactctttggcacagagggataaaatgagttgtccaaaggcacatagcctgaggtttgcaccacatgcgatctttcattttccaaggcctcctcaaacctgaacacccaccatgtgtgcccacctgcaggctgggccttcactggaaatgatctccagggctgactgcctcctcccagcccatctcaggatttggctaggcatgtccagatgctccctggcaggcagaaagggattggacactgacctggagctgtctgaagggctgggcatatgtcagggcatctgacccagggataggagctgacatgaggggctcccgatatcaggaaaagcctgacacatgaggatgtcaccatctcccaactatagtgggaaggctgacctagtaagtgggtgggacacagaagtggggaaattaggctgatagttgtaatctaagaagccctgatgggcaggaggcaggccctatcaccagccagggaagcaggtgagagggagaraacaggagctggggagaggaatggagttccttggcctgaaacaggctggccagggtaagagagggcccatgtcctggatgggggctggaggcagggcagagctgtcacagagacttggagccaagctctaagcccaaattccagcatcagacccagattacatggtatagggataagatgctagggcatagggccattgacccccatggaggcacaacgtcagcagtggaagaactgcaagaattaattattcttaagaaatggactctgaagctgggaccgaacaaaaccctgaactcattcaatgatgctctttcgatctcccttgctct

SEQ ID NO: 60823 - DNA, 589 bp, Homo sapiens
tggcccctctgtcaggatcaatcgccctaagcctgtctgaggcgctccgggcttaggagcagctgtgaaagccgcctttgtgcctgggagaatgagccgcaagaggacagggggccctcgccccgggagccccttgggtcctggctcctgagatcaacgccagcagggaggaccccagcctggcccctgcagcccacccaggcctggtgcccacttcgtgccatgggagcagcccaggggaagaaggtaggaacctctaagtgtcctgttggggccctggtcatgggaagggagactggacctagcaagtgggagccccgacccacctaccctgcagcttcagccggcagtgcccaccagccctccccctggaactcacagccaagacttgcatctagaaagcaggcaagggctcagggaagaaccagtgtcctatctctccatctctaggacagactcgggggcagccaaatctctctggctccctggtcttaaccacacacatctctacttccctgartaaaagctccctgggtaccccttccccataccccaggagagtgtctgatgcaggtggatacaggggaaa

SEQ ID NO: 60824 - DNA, 589 bp, Homo sapiens
tggcccctctgtcaggatcaatcgccctaagcctgtctgaggcgctccgggcttaggagcagctgtgaaagccgcctttgtgcctgggagaatgagccgcaagaggacagggggccctcgccccgggagccccttgggtcctggctcctgagatcaacgccagcagggaggaccccagcctggcccctgcagcccacccaggcctggtgcccacttcgtgccatgggagcagcccaggggaagaaggtaggaacctctaagtgtcctgttggggccctggtcatgggaagggagactggacctagcaagtgggagccccgacccacctaccctgcagcttcagccggcagtgcccaccagccctccccctggaactcacagccaagacttgcatctagaaagcaggcaagggctcagggaagaaccagtgtcctatctctccatctctaggacagactcgggggcagccaaatctctctggctccctggtcttaaccacacacatctctacttccctgaataaaagctccctgggtaccmcttccccataccccaggagagtgtctgatgcaggtggatacaggggaaa

SEQ ID NO: 60825 - DNA, 721 bp, Homo sapiens
gacccataatttaggtgaagatgagtcttctaggctggtgctcaatgtcatgctcagcacagcttttacaccagtacctgctcaaatagggaatgagaagtaacttttccctgccagggcccccaaaggacaagcgttgtgtgtcccacttcagtactgagactcctactagaatgcctgggataacctgacagtgaatatcctggcctcatcttacgccaggcgcctctcctggagttccctcctggagagcctcagcagcattaggaatctggagtttcaagcacctgccagcgaatggcaggctccagaatttcctaagaattgttaatcggagaacatagagattaaaggtggaggttcttggaatgcacgaggccttgaaatgtgcagtctgggggccacctcttacagagaacgaggatagtaagagactaggaaagagctactacttgtggagtgtgttctgtgccaggattaaacgtgctacttcaccaccacagcctctccacttggcagagttaaccatcctctgttccaaaaaaccaaaattcagaaaggctaatttatgcacagatacacatagatagtgtaacccagggttgctgggttttggagatgcattattgtgaaaatgtatccacttgtaacgttgcaccttgagttcttgtttcaaaaaagytctaggaagaagctcagcccaggaaaaaccaaactgatg

SEQ ID NO: 60826 - DNA, 1233 bp, Homo sapiens
  misc_feature (1)...(1233): n = A,T,C or G
ttgggtccattatcaatccttaataatgagaaaaacatgaaatttaaaatttaaaattatctttcaaacattggaagaggaaaggatggttttagttccccaggtcgttaaatgagtaatgaagcaagttttacattctaaccgtgagacatattagctgttcatttgaaaaggaaacatttagtttccagtctttggggacctcactgcaaacttttgtttacaaagctggttgcgcatgtctattattgtgcatcatttttgagcttttgcattatattttgcatcaccacagttaagggtagaataacaggactatggcatctgtgtttagatttagatagacaaatggggaaatagtgcagagaaaagccaactaaagaaattttaattgttccttgtataaagccccagtttacagaaaggttgaaccaattcatttctgcagcttacatatctaaatttgtgaccatgtagcatatgaaacaaattagggtatccctattaatcactgagttgtcaatatgaacataaagattggtgcgaattcagtgtcctgcacaaaagtcttcagttaaaacagaagagatattatggtggtggattccccaggatgttcaacaaacagagaagaggccaaagcatgttgtctcaatcttccttcttgttttagtccattctcacactgctaaacgatactacccaagactggataatttacaaagaaaagaggtttaattgactcacagttccacatggctggggaggcctcaggaaacttacaatcatggcagaaggagaagcaagcacatcttacatggtggcaggtgagggaacatgagcaaaagcagggaaaactgccttataaagccatcagatctcatgacaattcactcactatcacgagaacagcataggggaaaccacctctacgatccaatcgtctcccatcagattcctccaaccacacgtgaggattaccggtattacaattcaagaggaggtttgggtggggacacagccaaaaagtaacactttttatttattacaattttatatcatccctagcaaattgttccaaattcttgcccatcctycatcaatatctaaaattgcacttgtaannnnnnnnnnnnnnnnnnnnnnnnnnnnnnnnnnnnnnnnnnnnnnnnnnnnnnnnnnnnnnnnnnnnnnnnnnnnnnnnnnnnnnnnnnnnnnnnnnnnatataatat

SEQ ID NO: 60827 - DNA, 1612 bp, Homo sapiens
  misc_feature (1)...(1612): n = A,T,C or G
aaggaaaattacaaagattttggaaagactcaataaaatatatttacttcgttaaaaaaacacaaacctatgcatactagtaagtagagttgctgcttctgttgattacggagactactgggagaaggcaatcaaaactaagatataatatgccattctcttggaagccagagaaaaagaaaaccaccagaaacctagccctggaatgtcactgaatagctgtaggatagtggcaaggatgtcagcatctgtaacactcgattttctcttctgcaaaaatgaaactattagtattccaccatattgcaattaatatcacttgagctaatgtatacaagcagtatgaaatcccacaggattcacatgtaaaatattggattttttatattttaatatgtaaaatgtaagttgtttcttttctctctgatacgaaatgcagttttcattccacagtttcactctcatacacttaataacttttgttaacgtaacaatacagtgtgagagttcctggggctatgcctgacccaaagcagacacttagtaaaatgtctgtggaacctaaatttattttaggatacaattggaatctaaactaaaagagttttcaaattcagaatcaggcatatttgctgcaaagcattatgggtctcatctccatttccaaatccaccaagtccatcctttcacgcatcgtgttactcagggataaagcacatctaagtgaaacagaagttaaatttgctctttcataacccagagacattaattacaatggaatagcatgataaacaccgtgaacgatatggagattaatagaaaaaatatgaaaagaaaatgacagcagctaggaagaaacaaaaaggatgggtggaaataagggaggttggcctccaaagggcaagtaaagtagaactgaaataaaacctggtgattttgatctgcgtgtgtaattaatatagtttctggtcgggggtgatgggagaaatggggataaagaaaagccctgggtagcaaccttcttgcctgaattgtgaaggcaacacgaatacacagatcacgtcttgggaaaaataaatgtgaccccttaaaatttgcaccatattattgaaatctctttgacacaagtaaccatagaagacacaggtaacatatgggttgctctttatgtagggctttagcagtctattcagtcttttaccatgtgactactttgtatgtggaaaaattgttacataaacaaaatagaagcattttctctttgataccaagaggagatctctgaccaattaatcaatattaaggggaaaattttaccttggatataanaaaataattttctaacagctcaaattatactcagttgttgttattaactaacaacccttatatctgcatactaatacttgtaaaatcaagattaatttgatattcatttctggtaggggayggggttatgtcattttcctacagtcttggagagaaaataatttgttaaatgcaatttgctagcatctattagaaatcttgtaaaggttatatatttttaatttcacttaatatttctgcttttatttttctacacatgaccataaatatatatcttcatgta

SEQ ID NO: 60828 - DNA, 1612 bp, Homo sapiens
  misc_feature (1)...(1612): n = A,T,C or G
aaggaaaattacaaagattttggaaagactcaataaaatatatttacttcgttaaaaaaacacaaacctatgcatactagtaagtagagttgctgcttctgttgattacggagactactgggagaaggcaatcaaaactaagatataatatgccattctcttggaagccagagaaaaagaaaaccaccagaaacctagccctggaatgtcactgaatagctgtaggatagtggcaaggatgtcagcatctgtaacactcgattttctcttctgcaaaaatgaaactattagtattccaccatattgcaattaatatcacttgagctaatgtatacaagcagtatgaaatcccacaggattcacatgtaaaatattggattttttatattttaatatgtaaaatgtaagttgtttcttttctctctgatacgaaatgcagttttcattccacagtttcactctcatacacttaataacttttgttaacgtaacaatacagtgtgagagttcctggggctatgcctgacccaaagcagacacttagtaaaatgtctgtggaacctaaatttattttaggatacaattggaatctaaactaaaagagttttcaaattcagaatcaggcatatttgctgcaaagcattatgggtctcatctccatttccaaatccaccaagtccatcctttcacgcatcgtgttactcagggataaagcacatctaagtgaaacagaagttaaatttgctctttcataacccagagacattaattacaatggaatagcatgataaacaccgtgaacgatatggagattaatagaaaaaatatgaaaagaaaatgacagcagctaggaagaaacaaaaaggatgggtggaaataagggaggttggcctccaaagggcaagtaaagtagaactgaaataaaacctggtgattttgatctgcgtgtgtaattaatatagtttctggtcgggggtgatgggagaaatggggataaagaaaagccctgggtagcaaccttcttgcctgaattgtgaaggcaacacgaatacacagatcacgtcttgggaaaaataaatgtgaccccttaaaatttgcaccatattattgaaatctctttgacacaagtaaccatagaagacacaggtaacatatgggttgctctttatgtagggctttagcagtctattcagtcttttaccatgtgactactttgtatgtggaaaaattgttacataaacaaaatagaagcattttctctttgataccaagaggagatctctgaccaattaatcaatattaaggggaaaattttaccttggatataanaaaataattttctaacagctcaaattatactcagttgttgttattaactaacaacccttatatctgcatactaatacttgtaaaatcaagattaatttgatattcatttctggtaggggacggggttatgtcattttcstacagtcttggagagaaaataatttgttaaatgcaatttgctagcatctattagaaatcttgtaaaggttatatatttttaatttcacttaatatttctgcttttatttttctacacatgaccataaatatatatcttcatgta

SEQ ID NO: 60829 - DNA, 1229 bp, Homo sapiens
gcatttaatgtgatcctgaatcttctcttgtacaacttcagttacattatccaaaataataaatgaatttgtaggtgagattaacgtggtttgacaatgttaattagctgccagatctaccatgcacatgggaggtaaccatgaagtgacattttaacatataataaatggagtagttccccctctccctccctctctcattttgccaacaatcagaaaaagatatcattcctccagttaaacataaattgattttttggcttagaaggagggtctcctagtgaaagctgtgcattcaagggtataatgagattgattccatgctctgtgaataaaaacacatgacatttaaatttggctacttcaaggatgagtgaatgattaagatgagcacatatgttgaagaagcaagttaaatgagagactgttaaagcgaagtgccatgacatgtcgaacaacagaaacgtcatttagaggactatgatttaacatgtagatttttgtctgctgtccaatctatactccaggcaaagccaagtttaatattactagatttccagtgtgtcctttgaatacgataatcctcactgtgtgatatatacatgaggatatgtatgatgatttatttaaaataaaactaatgataaagtgactggatatttcttgcatactttggtaactgggatcaccacgagctagtttgactactgtttttttcatcatagaagttttaacatcttgcgcagtcaaaattaaaacaaataagaaaatcacccataaacataatttaaaaaaatttatattctcctgaattttcttagtctccttttcttcatataagcataatctgtatatttattgatcccttcatctgtactaagcactaagtgttcaagaatgaataaaaggtattccctaaatattgaaggagttaatatatagtacaccacacttaatgaacaaacacgtactgtcttattcagttacataataaacattattccttatgagcacacatayccttcttttaaggaaaatattttaattaccaaagttacacatgtatattataagaatctcaatgataattacattgaatataaaataaacttcctgtttctttacagtaccccatattgtacttactggaaagaatcaataataatttggagtgtttccatctagctacacactcacagacacagactagaaccacagaacttgttttt

SEQ ID NO: 60830 - DNA, 1229 bp, Homo sapiens
gcatttaatgtgatcctgaatcttctcttgtacaacttcagttacattatccaaaataataaatgaatttgtaggtgagattaacgtggtttgacaatgttaattagctgccagatctaccatgcacatgggaggtaaccatgaagtgacattttaacatataataaatggagtagttccccctctccctccctctctcattttgccaacaatcagaaaaagatatcattcctccagttaaacataaattgattttttggcttagaaggagggtctcctagtgaaagctgtgcattcaagggtataatgagattgattccatgctctgtgaataaaaacacatgacatttaaatttggctacttcaaggatgagtgaatgattaagatgagcacatatgttgaagaagcaagttaaatgagagactgttaaagcgaagtgccatgacatgtcgaacaacagaaacgtcatttagaggactatgatttaacatgtagatttttgtctgctgtccaatctatactccaggcaaagccaagtttaatattactagatttccagtgtgtcctttgaatacgataatcctcactgtgtgatatatacatgaggatatgtatgatgatttatttaaaataaaactaatgataaagtgactggatatttcttgcatactttggtaactgggatcaccacgagctagtttgactactgtttttttcatcatagaagttttaacatcttgcgcagtcaaaattaaaacaaataagaaaatcacccataaacataatttaaaaaaatttatattctcctgaattttcttagtctccttttcttcatataagcataatctgtatatttattgatcccttcatctgtactaagcactaagtgttcaagaatgaataaaaggtattccctaaatattgaaggagttaatatatagtacaccacacttaatgaacaaacacgtactgtcttattcagttacataataaacattattccttatgagcacacatacccttcttttaaggaaaatattttaattaccaaagttacacatgtatattataagaatctcaatgataattacattgaatataaaataaacttcctgtttctttacagtaccccatattgtacttactggaaagaaycaataataatttggagtgtttccatctagctacacactcacagacacagactagaaccacagaacttgttttt

SEQ ID NO: 60831 - DNA, 1223 bp, Homo sapiens
gaagaagaaaaaattgygtaagtagtttgccactcacatgttaggtcatttcagaggtttgttgctttaatgctttaattttaataactttaagtgtctctgagacacaatagactcaaagacaaagccaccaggataggcctcgtgtttacttggttatctggtcagtaaattattcgcatatttttcctgatcgctgtcttcaagcaagtcctcttatcctctgtcacaaatgctttccaaaaggaaggtgccacagaagcctcatctcaagtcttgagtgggagcttcgttatctcatataatgcttattttgttctgaccagtaaaggcatccaagaaaagaagagcctgaaggaaatctgggtccagttgctttttctgtgggaattcaaaactcctaattcatggcagtcactcttagaacagcatatgtaaaagagaactaaatggagagactgcacctgggttctagccccagctctgccatcaaggagctgcaggactttgcaacagtctccaaacgcatctgggtccccagtttctcctttgtagtttgaaagagtttaaagggatgactgtagagaactcttaattaaaaaaaaaaaatcccacagtgtaagtctgtatctttctcattaatttagccattgagagttgatgccagttgtgagaataataagcatgctgagaacatgacacatctagaggtctctgatggaaatccagaaaaccaccttcagcagctcttagtccctcagggcactgagggactaagctctgagcccttcctggaaccagcacttccagaagtcacaaaataatgacaggctttattcagtaatttttaacattttctcttccctcttaggatgtattatgctgtgaatgtgacatatatatatatatatatatatatatatatatataatgtataactatgtataactgtataatgtataatgtataacaatgtataacaatgtatatacacacacacagttatacactgctacattgttacattctgagaaatgtatcaggcaatttcctattgtgcaaacatcatagagtgtacttacacaaacctagatggtatagcctactacacacctaggttatatggtatatgctgttgctcctaggctacaaatctgaactgaatactataggcaaatgtgacacaatggtaaatatttgtatatcaaaacacagaaatggta

SEQ ID NO: 60832 - DNA, 1830 bp, Homo sapiens
  misc_feature (1)...(1830): n = A,T,C or G
ggtgcttagcacatactaggtgctcaataaatagttgttgaataatgaatgaataagaggtttaaaaagttcctacttagatgtcttatctaaataaataaaacaaatgctaccaacttgacttctttttgactgaagtattaagaaacctaagattttaacattaccaagattttaaatgaaaaatatgtggatatcaatttgttgttgttttatatgtgcatatagatactttcatgttgttttatatgtgcatatcaatacttcttgtaataatggtgaatttgatgtgaaaaagatatatgcttatgtgtttttgttttaactgtgtataaaattcttttagattttacaataaaccacaaatttttctgaaaattcactgtactttctacaataaactagaattttttaaaaaaacactacaaaaagaacttcaagccagcaggatcttaaagataagtaattctttccttctagtctcctatagtagttaaaacatgtattcttcagcatacacatcaatatgcagtaaaaatttgtttaatttgtctggggcatgctctcattctttcatttaattattatatcgctgatagtgtatataatccagattgtttaaatggttttaaatggtgtttatacttggtaaagaatcatttttatttggaaatttatgcctttgttatgcaagatcagtatatctatgtccatattaaatctactcttcaaaagatgcatatgtattttaatcatctcatttttcctaatccttttaaaatatcaatttactccatagtgcacttcagtctgatgaatcccatatcaccnnnnnnnnnnnnnnnnnnnnnnnnnnnnnnnnnnnnnnnnnnnnnnnnnnnnnnnnnnnnnnnnnnnnnnnnnnnnnnnnnnnnnnnnnnnnnnnnnnnngctcacagcacagcagtggaaagggaagaaatttttggccaacaaatgtgtagcaaatatagactggtgttaatcatgttcagttctttgctcagttcttacttttttcttgcttatatttttttctcaacaggcctagccaccaactgagctatctctttgtcccactggaagacaacatagttagaaagggcatagccattgcccaagtccagtttagttaaccttcctaaggtttccccccagacttcatctgtgcctttgagaaaatcatttgatcagtgtaacctctagatgaggcactggtaaaaccacaggattggtcatgtcaaccacccagtttaccccacataccttgcaatttggtccaatttctttgaaggaaaaaacattctacaagataggaaattttggtttgtcatgttttctggaaaaaacaaaacaaaacaaagcaaaaaacacttctagactgacatttgcccaaaatcttaaaatttgtattatatatatagcagtcttactacatctcaargaaactaggcattctttcttttctttttttttttttttttttttgagatggagtctcgctctgtcacccaggctggagtgcagtggcgcgatcttggctcactgcaacctccgccccccaggttcaagcgattctcctgcctcagcctcccgagtagctggggttacaggcgcgctgtaatttttgtgcttttagtagagacggggtttcaccatcttggccaggctggtcttgaactcctgacctcatggtccacctgcctcggcctcccaaagtcctgggattacaggcgtgagccaccgtgtccggccaaaagtaggcattctttctaatacagaagaacaaatatattacttaagagctgtgca

SEQ ID NO: 60833 - DNA, 830 bp, Homo sapiens
tgcatatattactacttcactttttatctaatagtatctcatgttgactgtttgtaattatttccatgcaacaaacatcatactgaccttttgttaaaataactaaataaaatcaagarcacaaatctttttatcattattgccctgtgaatttcaatcttgtcttttctttggtcctatgagatataaattgccttagattcacaaattttatattaagtaccaatatttaaaatattattacatgcaaatgttgttatatatcttcaccacaataaaatatagtaaaaattttaaccaaaaatggtgttgactcatatatattaaatgttcttcagtggaaattatcaaccattaaataaaatctaacaatgtgcctagatgtctatgtaacatcaaacatccatatgaattctaaaaatctcaatcaaatttctgtactgttagtcattagtcagggttctctagagggacagaactaataggataatatatatatgggagtttattaaggagcattaactcacacgatcacaagctcccacaataggctgtctgcaagctgaggagcaaggaagccagtccaagtaccaaagctgaagaacttggggtccaatgtttgagggaaggaagcatccagcatgggagaaagatgcaggctgggaggctaagccagtctaatctctccatgttctcctgcctgcttttattctggccatgctggcagctgattagattgtccccacccagattgagggtgggtctgcttttcccagtccactgattcaaatgttaatctcctttggcaccaccctcacagacacacccaa

SEQ ID NO: 60834 - DNA, 644 bp, Homo sapiens
ccccatcatcgatatctcccaccagaatggtacacacttgttacaattgatgaacctacattggcatgtcatttttacccaaatccataggttatattagggatcccttttgttgttgtacattttatgggtttggacaagagtataataacatgtagccatcattaatggtatcgtacagactattttcactgccattaacatcctatgtgctctgcctgtttatcctttcctcaccccttacccctggcaaaggtaatggtgccttactgggtacctactgaactagggtacccagaacagggtcctgggattctcaacctccagttcccggccaatcacaggagaaaaacaaagatccaaaaaggrgatctggggacagggggagaaaaataggagagactggaagtcaagatgtgattattactgtcactactgttattaattggaagaattcattgaacagagccaggagttgttctgagtattatttcataggttcctcataccaaccctatcgggtagatactgttattaccccactataaagttcattatactaagtgacagtgtggttaagtaaattacacaacatcccactgatagtacagcacaaaaacagttcaaatttcagcagtctgcca

SEQ ID NO: 60835 - DNA, 1134 bp, Homo sapiens
  misc_feature (1)...(1134): n = A,T,C or G
taatatgtgtatttcaagcaaaggcagagaaatactaagtatttgttattttggtgtaattcaccctttcacacattttgcatagtctttaaataacaaaactaagcattaggcagacattgagtcaaagaaatttgaaccatacagagagtgaatatgnaaaaaaaaaaccagaagggacttaacatatttttatgttaaagaaatttatgaaaatataaatctattttgactatgacttatacatgacaattgttgccatcaagtaggcaactgatgccctttacagtgtttagaacaaaactagtcctttatacaattttcatgaaaatgttaggtttctgtttgatcagcaggtgctgttgagatgaaagccatgtgtaaattttcagaaggccaaaagtgtcaattcagaaaaggaaagtgataagagaaaatgcaatcagttttcctgttttcaatttgtgcgggatttgaagagctgttttgttaaactgctacatctgctccaatatgaatattgaactacttccactaaaaataacaacctataatttggaagctactgcagtcttttgttaatgtgagtgggttatttaaaaacaaaaaaacaaaaaaataaaaaaaaaattttctattctgacaatctcttgcctaatgtgcattttcatttgttggcacttttatcctcagcagataaatggtagtatgcaattaagacctcatcttgtttgactataaaagaggtttccataggtgaaaatcctggtaataaaaaggggttcacacaaaacaaaatttattttaaaataacctgtttaaatacatgtattgaaaatcagatagttattccttacattctctaatactacaatttttaacttactgccggactgttgtaayaaagttaacactgttcttgcatactgagcattccgagatttattttacctttaatatacctgcaaatgtaagtttaaactaatcagggatattttactaacagggctttcagaataatcttttccatgcttaaataaaatgattaaattatgcttgagtgcctgcatacaaaagctttagcttctatagtactgctaatcaaataagttttatggacagggaaagcaccac

SEQ ID NO: 60836 - DNA, 553 bp, Homo sapiens
ccaattggtatccctttgtgaacattcgaaggacattctcaaaatggctttgccaaattacctctaggaggtggtttgtgatttaataatctgattttaaagaattaaagttactaagaacctgtgctagccattgcctacttttgcttagtatcatgygcctctagggaatatatatgcttaaggctagatttacagagcacaagacaaaatggaaatttcaatcagtggtatcgatgttccatcacccccttgatgttgtattgtgaagacacaatctatttatagacagtgtatcatatcaattactcatcatagcaaatatcaaataatggagattacgcacaacacatgaacacttcaaaaacaattttctatgcaatatttattttcatcggcagttccaaatgactgtgaaagactcaggagaaaaacaccaattgttttagttttaatttaaaaatatattgtcatctaggtctttgatgaaaatgtggctttgtccatgctgttataaagcacatcagtttttgcaaccatgaacagtgaataa

SEQ ID NO: 60837 - DNA, 744 bp, Homo sapiens
aagggctttctcctccctccttgctgtccctgggaaagagcatgctggtgaaaagcaagaaggcaggacaaaagggggagacaagtcttttctgttattcttgattaaatgtcattgataaataggactccactgacttggagccctcagtttatgggattccaaatgctctggcatcacactcattggcccttgacttgttttccacagaggtgttgttagcacgctagcagtcactccccactgccccatctcagctctacacagacactaatctgctttctgtctgtatagatttgcctattttggacatttcatataaatggaatcatacaatatatgtgttttttgcaactgacatttttacttgggacaatgttttcaaggtccatccatgttgtgtagcacgtgtcaatacttcatttaattttatggctaaataacattccattatatggaaatgccacattttgttcatccgtttagcagttgatgaatatttcacctgtttctacttttgggctattatgaataatgcttttgtgaacagctgtatccaagtttttgtgtagagaagtaygctataatttacagttagtttttagaatacaaatggtaacctttccctatctgcatggcacacttgcttatccatgaatgttactgaagtccatttgaatcctttaaggtaaaatggatgaggatttctagtttaacccttatgcttttgagatttaaaaaact

SEQ ID NO: 60838 - DNA, 629 bp, Homo sapiens
tgtcttcaggtgtcggctgaaacaaacagtaaactctttgggcagccttgagttttctcaggacagcacttttagggggcttatggtgagcctaggaaggtggccttgaactgctagaaactatattagtgtttactgaagtctttataggacaagagtgaggccttgtcaaaagagggcccagaggagcctggctagagttcagtcaaggagagaacactcatcatctattgtcttacatacctctggctcattggaactgtggaggcaccaacaactttcagagtttcgtggattttcaactcctctgtatacatcagactgtatattgttgtgaaattaaagcattaagttatcttgcagttctaarcttctgtgaattggttactgcttggtgaagtgcaccaataacttccctctgagaatcaggaagtagcactctgctaaagtgtgccatgtcatacccagagacctcatagcttgttcaaggttaaacagcgagtttgcagcaaaacttatggtttgtagagtaattccacaaatatcagtgtatttgatttatacaaccttcttaggaagaagacagggaactgagctatgttttgtagataagaacaataagcttagag

SEQ ID NO: 60839 - DNA, 696 bp, Homo sapiens
aaatgatttggtcattttctttctggaaaacacccaaatgaaaactgtttgctcacttggcatgatcagttagaattaagtaacttccaggtgtctctctcctgttttctggagtctgttactggcccaaaacaatctgggggaagtgaatttcattgtagctgacctaggtttattattctagttaaaagaatttgccaaygatccaaagttttgttagggcttttactcctgttttgatcgtcaggacttgcaaagggtgcagagtatggcagtatgagtagcatgtatatacggggatcaggaaaagctaataccctgaggccatcatctagtgtccttgtgcctgagttatatgaacctaccattaatgatttttgtaaggagtcagtatgaaaacgtacacaaacctttagcataactacctcacatagttgtaataatgaaaataaaactacttaaattccatcctctcttccggcccagggatgtttaacatacattattccaactcacttcacataaattgaggatcactgagttttaaaatatgtttattcctagttaatttggaaaacatgatcactttaagcttttataacaaaagctggtggtttcccaaatctaagtaggagagagaggacaatggtaagtcctagttgctgggaattaaatattttccagaatctagaggat

SEQ ID NO: 60840 - DNA, 567 bp, Homo sapiens
agaactttctttgacagagcaaacaactaactataccaactaagtaaaatagagaatattcaatactaatatgaggaatgaaacaagcacatcaacactgaccttacagaaataaaaacagattacaggagactatagaactatccctatatactttatacaattaaacaaggaagaagagtgataaataaaattaaaccaagcttgcagcacattycacattaatcattaattagcctgctctcagatctgcttcctcatggttgttcactgcctactgcccctctcacccccttaacttctttacagataatgatgtaaacattaggaaacattatgttttccatttgagatatttattcaggtcctgcatatcagtgggatgtttcaaagtcagatggtctgaaggactccctgagaaacagactcactaaagaatgcagtttccacatcctgatgattttatcccccttacttcaacctatcaaagacccaaattttctagcattttgtcctccacaatctcctcaagaatcccagcccagaactgctcagggagatggattt

SEQ ID NO: 60841 - DNA, 593 bp, Homo sapiens
gaggttgtggtgagtcgagattctgccattgcactctagcccgggcaacaagagtgaaactccgtcaaaaaaaaaaaaaaaaaaaaaaaraaagaagaaagaaagaaaaaaaaaagaaaagaaagaagatgatgatgatagtgatgataatgagattgatgatgatgatgatgatgatgatgatggaaatctctgctcccaaagtcttacctcctgccagattccacagttgatatggacacagagctgggcaggaccacagggattatctgtttaaccccttcattttaaagctggggatacagccttggagaggtacagaggtatgtccaaggtcacacatccgagttggggcagagtcagggtcctgccctagccccgtcctggtctctgccccacttgggctgccaggcctcctcttgctgccacagattcttctctttcctcccagtccactgcagcaggacctggttcttggcttctcacctgtcccagcagactttaactatgaatgttcatcactgggttttaattatcctgcaagttctgcaagcactttccaggagacatttttctctattattttcctccag

SEQ ID NO: 60842 - DNA, 593 bp, Homo sapiens
gaggttgtggtgagtcgagattctgccattgcactctagcccgggcaacaagagtgaaactccgtcaaaaaaaaaaaaaaaaaaaaaaagaaagaagaaagaaagaaaaaaaaaagaaaagaaagaagatgawgatgatagtgatgataatgagattgatgatgatgatgatgatgatgatgatggaaatctctgctcccaaagtcttacctcctgccagattccacagttgatatggacacagagctgggcaggaccacagggattatctgtttaaccccttcattttaaagctggggatacagccttggagaggtacagaggtatgtccaaggtcacacatccgagttggggcagagtcagggtcctgccctagccccgtcctggtctctgccccacttgggctgccaggcctcctcttgctgccacagattcttctctttcctcccagtccactgcagcaggacctggttcttggcttctcacctgtcccagcagactttaactatgaatgttcatcactgggttttaattatcctgcaagttctgcaagcactttccaggagacatttttctctattattttcctccag

SEQ ID NO: 60843 - DNA, 593 bp, Homo sapiens
gaggttgtggtgagtcgagattctgccattgcactctagcccgggcaacaagagtgaaactccgtcaaaaaaaaaaaaaaaaaaaaaaagaaagaagaaagaaagaaaaaaaaaagaaaagaaagaagatgatgatgatagtgatgatartgagattgatgatgatgatgatgatgatgatgatggaaatctctgctcccaaagtcttacctcctgccagattccacagttgatatggacacagagctgggcaggaccacagggattatctgtttaaccccttcattttaaagctggggatacagccttggagaggtacagaggtatgtccaaggtcacacatccgagttggggcagagtcagggtcctgccctagccccgtcctggtctctgccccacttgggctgccaggcctcctcttgctgccacagattcttctctttcctcccagtccactgcagcaggacctggttcttggcttctcacctgtcccagcagactttaactatgaatgttcatcactgggttttaattatcctgcaagttctgcaagcactttccaggagacatttttctctattattttcctccag

SEQ ID NO: 60844 - DNA, 593 bp, Homo sapiens
gaggttgtggtgagtcgagattctgccattgcactctagcccgggcaacaagagtgaaactccgtcaaaaaaaaaaaaaaaaaaaaaaagaaagaagaaagaaagaaaaaaaaaagaaaagaaagaagatgatgatgatagtgatgataatgagattgatratgatgatgatgatgatgatgatggaaatctctgctcccaaagtcttacctcctgccagattccacagttgatatggacacagagctgggcaggaccacagggattatctgtttaaccccttcattttaaagctggggatacagccttggagaggtacagaggtatgtccaaggtcacacatccgagttggggcagagtcagggtcctgccctagccccgtcctggtctctgccccacttgggctgccaggcctcctcttgctgccacagattcttctctttcctcccagtccactgcagcaggacctggttcttggcttctcacctgtcccagcagactttaactatgaatgttcatcactgggttttaattatcctgcaagttctgcaagcactttccaggagacatttttctctattattttcctccag

SEQ ID NO: 60845 - DNA, 621 bp, Homo sapiens
gcccatttcttggaccagtcagtttccagagatctatggatctgtgatcgmtggatctgtcatctatgattggcctggctgggcctttaactgtctctaaggaggggaggcaggatgtgggctgtgattagtaatcctttctgaacctcatggcctggggagtgcaaagagctcagtttcctaaatgaagggtaaaggtggtactatacacagaggaggaagggatgactagggaataaaaacagcatgtgttgatcacagtagatattattaatcctaccttacaaaggaagaaactaagtgtcagagagaatctaaacaaccctagcagattagcatgtggcagactgggcactcaacagcccttcaccatgaccactaagctacaacgcttcccagggacgcaggcctctgcaagcacctccggcaaccccaggcctcaaatccaacaggtttaaactcataattccatcccaaacaggacaattctcaaagctcaggcactgaggcccctggaaggccccagagcttacaaacctaatcataatgatagatttaatttgaaggtccctttttcccagaccacagtgaactgagcatgctgtccgtggcaatttcttg

SEQ ID NO: 60846 - DNA, 599 bp, Homo sapiens
aagcctttcccttcttcaagttaactatgaattcaactcaattcagtgattgttggaaacttactggacactgactttggtgccaggtattgtgaaaggtccaaaaagcagtgggacatggctgatctcaaagtgtttacacttgtgctgaggaagaaaagtccaaacactgatagctactaacaggactaaactatgtgggctggattttagatggagagttttagatagtggagaaatgacttactgcaggcctcatggcatcaactttaagccttctttggtgttcatattaaagtactgtacactattgtccactttggtctgatcaaatgaggcagcccsttttggctttggtttcaaactttgagccacgaaattacaaaaacacctattccctacacctaccaaatttactcagtattcttgcagggggaaaaaggctttaaaaagaggatgctatttgagacatgaccaattttctgttttgactttatcagtcaaaaatttgctcagtaaaatcaaaaccacaatgagatatcatctcacaacagatgctggtgaggttgcagagagaagggaacacttatacactgctg

SEQ ID NO: 60847 - DNA, 856 bp, Homo sapiens
agcagttatatatttgtactctgagctctaaggagcagcaaaggccccactgtgtcgtcttcctgtggtttttatggcacagaaagccaaaaatgatttcagttcttcactgagggctgccaaactattggcccactttatgaatagttgcatatgctttgttaaaaaatttttatacttgcagtctcagccaaaatccaaagtgattttctaaaatataattaatactccatgaaattctttgcactaataaagcacaaaaagatagatatacaaacttggtcaccttaatagaaatgcctgaatgacattaaacttttaataagtaagtcttcagttgatctggtgccatcactgtttaagtgcctgcccgtgaatccgcttcattttgtagagaagctatatctcttgaaataaatattaaaacaaaatactctccctagtctatagctttaatttttattgggatatctttaatttttattggkatttttaacaattataattattatgggaatctgtaaagttgatacatggcaaggtagtaatagcctagtaaagcatttcagttccaaagacaatacttgaatagtggaaggatttaccaatgtgcaataattaaaattagccatgtaaaactatgggacatagacgaaaaggcaagccataaagtaagtctcagattatcttactctaaatctgaattttgctacgaagtacccagggacattgtgctgttctttttctccgtgctgggagattcgtgctaggtcgtgctgcattattagtaaaaggctattgtgatagttaaccctcatttaggaggagctctaagatggattcacaaaatacccaa

SEQ ID NO: 60848 - DNA, 724 bp, Homo sapiens
aaggggtctaagcaggaaggaaaaggtgagaacaatgccatcgtgggccctttccttgccaaggagttatgtgtggtggctttaacttgatgtttagtacaacttcaacgtgcttttcttctcctgcatgactactgccttgtgggaagagtgtcttctcttttagctcacttcattaattttttatgaaatatctaaatacatatataaaggtgtcatgacattccactcctaaatacttcagtgtgtatctttaagacgtaagaatattggccgggagcggtgactcatgtctgtaatcccagcactttgggaggccaaggygggtggatcacctgaggtcaggaattcaagactagcctggccaacacggtgaaactccatctctactaaaaatacaaaaattagccaggcgtggtggtgggtgactccaatcctagctattccagaggctgagacatgagaatcacttgaacccgggaggcggaggttgcagtgagccgagatcacaccattgcactccagtgtgggtgacaaagcgagactttgtctcaaaaaaaaaaaaaaaaaaaaaaaaaaaaaggaatatgttctgcatagccaaaatcaaaatataacacccaacaaaattaactataacctcccgacattatttaatacttaatccacaaaatttccccagttgattccaaaatgtcctttactgctgttttgttcaaaccag

SEQ ID NO: 60849 - DNA, 705 bp, Homo sapiens
tcatgcaaccaaatcctaatttccaagggataggcctctgtttccaaacaacgccacgcaagaaaaggctcctcttagccgtgaagaggttcagacgctgagcacccgtcaaacacaacccctgcaaatactgactattatagattccagctctggggacatcgtccttttatcctcaaacagaagaagagtcatttctgctctcaaagggatgagtgcacctttcttcttaacaaggaataccaacttcctgcagtttcctgatatttaacattatctagttactttatataaattatataattttaaaatatttatattattcttaatataattatatttaatacattatactaatatgytatataatttattaatatagtagaatatattttatatattaatgatctccctagtaatcatctccaacataagattaaggataattgtggcaattttaaaattttgttttgtttttgagacagggtctcgctttgtcacccaggcttgagtgcagtggcgcaatcttggctcactgcagcctcgactttctgggtgcaaatgatcctttcgccttagcctcccgagtagctgggacaacaggcgcgtgccaccatgcctggctaattcttttgcattttgtatttttgtagatatggggtttcaccatgttgcctaggctggtttcaatctcttgagctcaag

SEQ ID NO: 60850 - DNA, 705 bp, Homo sapiens
tcatgcaaccaaatcctaatttccaagggataggcctctgtttccaaacaacgccacgcaagaaaaggctcctcttagccgtgaagaggttcagacgctgagcacccgtcaaacacaacccctgcaaatactgactattatagattccagctctggggacatcgtccttttatcctcaaacagaagaagagtcatttctgctctcaaagggatgagtgcacctttcttcttaacaaggaataccaacttcctgcagtttcctgatatttaacattatctagttactttatataaattatataattttaaaatatttatattattcttaatataattatatttaatacattatactaatatgttatataatttattaatatagtagaatatattttatatattaatgatctccctagtaatcatctccaacatargattaaggataattgtggcaattttaaaattttgttttgtttttgagacagggtctcgctttgtcacccaggcttgagtgcagtggcgcaatcttggctcactgcagcctcgactttctgggtgcaaatgatcctttcgccttagcctcccgagtagctgggacaacaggcgcgtgccaccatgcctggctaattcttttgcattttgtatttttgtagatatggggtttcaccatgttgcctaggctggtttcaatctcttgagctcaag

SEQ ID NO: 60851 - DNA, 625 bp, Homo sapiens
tgccccctctacaccatcttgtggagctacacattcacctcacccaaatttgagaaaaataatcaagaaaatgactctcactagcagtgagaccaagtccataagcactaatgtcatcagtgcacactgcagcctcatgctgccaagcatgttttgggcgtatccctggactggtttggtgacatgatcaaaggtacattttccacctgcatagccccatcctggatctatagccttccttgtgtctttgtgaacaacctagtgtgaactcaaagtatgagacagatctcaattaatttagaaagtttattttcccaagattaaggacaagcccatgataaagyctccagaggtcctgatatatgtgcccaagggggtcggggcacagcttggtgttatacattttagggagacaagaaacatcaatcgatatgtagaagatgtgcatcgctttggtctggaaaggtgtgacaactcaaggcagggaagggggcttcctgctggggttgcattgttttgagtctctgatcagcctttcacatgtgaaaggcaggtagagaaatagtcatttatgccttagtctggcttattgaaacagtagggcagaagaagcattgcatatgca

SEQ ID NO: 60852 - DNA, 657 bp, Homo sapiens
ggaattctaaattccttctctgtgttatcttgaagtttcttgagctttcccaagacagctcttttgaattccctcttaaagtttacatattgctgtgattctaagattagtcactagtgttttagtttgtcttgggaaagcttcttatttaccttatagttcgccgttcatgtagctttgaacacctacataaacagctaagttaacagcaaactataatgtaaataataagtcctaacatatggagtgaaagtctaagttcaaaagtccctgtagaattgattttaaaccttaagggatctaggtgaataacccaaaggaccaatcagagacaaggttcttagggaaaacctgttgtagctatgtcacttgttgggagaatttttttttcctattcaagtttcaacatctctgaatgtgttcatataggtgaagcaagtgttgtttaatactgtgtatacttccccttgtttagccaacagaaaatctagtggtgtcctaattgcctatgactacctaacaacttaaaggaccttttctgagccataagactatatgctttttttttttttttttttttttgggcaataaaccttaarataccagatacgtttctgaccatatttttgagggcatatactccataactagaaacca

SEQ ID NO: 60853 - DNA, 760 bp, Homo sapiens
gccagtagatggcagtagcagacaggaaccagttgcaatggtagtggtagaatttctgccttacttctgccccatgtaagatatgctcaggtattccaggaggtaaactgggttgtggaaagccaggagcttggaccccacatactgyttcagtgaggggatgatgccagctggaaccagattggcaagcttgcactcaggccccccagtggtaagtgcaggcaccagctgtgacttggggttgaagtgatgttcaggtccctgggaaaatgcttgggtcagggatgactgctgctgttctgaggtcttgtcatgggttgcaaatatggccagtctgtgaacattgctttggttagtcggtgggcagtttttgtccatttcacaccttagtcctggcaggtcttcctcccatgtcccaggtgaggctgctgagtaggctggtcagtcagttttggcacatccagcccacccataattcagccccaggccataggagacactgtcttgctcaaggccaagcctcagcagcaactctcatctttctcaggtcgtggggaagagctcggcttcagcaccagtggctggagtgtatatcatgctaacttctcagttctggttccaagagtccctccttcactcaagtcccacttccacaagctacagcttgagtctaatgccaaagactggtgcctctcatttccagggccacacacagtttgttaagggctaggattgagaatggtatcttaatgtaaatgca

SEQ ID NO: 60854 - DNA, 589 bp, Homo sapiens
gatatggrtaaatgatgcatctgaagccactaacagcaacaggttaaaagtagaaagatggacaaaggtatatcagaaaaatgctaataaaaagaaagttatatagcattgttaatatcacataaaataaaaataaaagtaaattgcattaaataggggcaaggatggttttgatcaattttccagtacatccctataagtttgtttcttactctccttatctcgtctatttcatccacttctctaaacatatcttcattgcttaaatgcctcttatgtacatctttatattctggagagatggaattagctttctctaaaagttccttctgcattttcctcctcctctggcttttcctcaaaatttggttcactattttctggccttccttccatttttggacagggtttcatctcatgtctgtggggcttctctttcttccttctattctttctttctttttccttccttccttttgttttcctttcttccctctttcctttcttttttcctgcttattcccctttgagtgcaataacttctggcactgatcaggtaagtttctttctcctctttgtctagccttgc

SEQ ID NO: 60855 - DNA, 547 bp, Homo sapiens
gaacttctgacctcgtgatctgcccgcctcggcctcccaaggtgctgggattacagacgtgagccaccgtgcccggccaaggctgccaggtcttttttaagctcagagctagaaacaagacattgctactcctaccaacttcttctattggtgaaattgagtcatggtttctcatggtctcaatcatgacccagcccagattccagggtcaaggaccataaaaggctacattgatggaagacatgtctcattgagggacaccagagtaacaactaccagacaagaaggggcaggtctgtgtgagcgccatttcctaattctatattgcccactcttcagagaagatggttggagggcaaattgtggggagcaaggtaactccaaacttttacaraattaaaggtagggggtctggtcagctacagtccatctgttatcaagaggcctggctgtgtgtcttcattcagtttattaggcatttactgagcacagcctacatgccaggttcttcattttttgacacagggtcttgtgttgcccaggctgg

SEQ ID NO: 60856 - DNA, 980 bp, Homo sapiens
aatattaggataagggcttcagttctctgccgggtttccagaacagattcaattacccaaaatggaggcaaggctcccaaagtattttaacaacagataaccagaaccagagaccccactcattgcmctagaaaatcccctcctgtcttcattaagctctttgaggctgtccacccaaagcattgggtctgattggggactgtcttttagccatgcttactggatccccaggagaggaaaactatttggatataaaaaattatttcagctgatttggacaagattatcgctttcttttcccaccaactccccccatctcccccacccctgccaactcttcacctcatctcacgagactggagagctcctggagtgatcttgtcccaccttccccagggcttccccacctcatctacctgctgaatgggtaggtaaaagatctctaaacttacagattcacagcaccaacatgaggttgcatgggggcaggccatgatgagagaagaagaagggtttggggacccatattctggcagtttttctaccatcaccccaaactacaagcaacagctcttggctgtacaaatgagagtgtctatgttgaacataaatatgcaatcattaaagatgtgtcagtttggagagaaagggactttagaggaggctgtgtctcaaactcttttcctatctcacccatcttccactctccctctcccagtctctgccctccccaacactttctcccatctttatctcctctcatacaacactgatgaattctatcagccatgacagtcttgtcctgctgcactttaaaatggcagatcttaaatcatctttccagtttcttccataattgacatagtcaagttttctgcttcatcttgagtcaagcttgagcatttgctaagatataatcaattttctttagctttaaatgtttgtggccatagagttacttataatgttctcataaaaca

SEQ ID NO: 60857 - DNA, 980 bp, Homo sapiens
aatattaggataagggcttcagttctctgccgggtttccagaacagattcaattacccaaaatggaggcaaggctcccaaagtattttaacaacagataaccagaaccagagaccccactcattgccctagaaaatcccctcctgtcttcattaagctctttgaggctgtccacccaaagcattgggtctgattggggactgtcttttagccatgcttactggatccccaggagaggaaaactatttggatataaaaaattatttcagctgatttggacaagattatcgctttcttttcccaccaactccccccatctcccccacccctgccaactcttcacctcatctcacgagactggagagctcctggagtgatcttgtcccaccttccccagggcttccccacctcatctacctgctgaatgggtaggtaaaaratctctaaacttacagattcacagcaccaacatgaggttgcatgggggcaggccatgatgagagaagaagaagggtttggggacccatattctggcagtttttctaccatcaccccaaactacaagcaacagctcttggctgtacaaatgagagtgtctatgttgaacataaatatgcaatcattaaagatgtgtcagtttggagagaaagggactttagaggaggctgtgtctcaaactcttttcctatctcacccatcttccactctccctctcccagtctctgccctccccaacactttctcccatctttatctcctctcatacaacactgatgaattctatcagccatgacagtcttgtcctgctgcactttaaaatggcagatcttaaatcatctttccagtttcttccataattgacatagtcaagttttctgcttcatcttgagtcaagcttgagcatttgctaagatataatcaattttctttagctttaaatgtttgtggccatagagttacttataatgttctcataaaaca

SEQ ID NO: 60858 - DNA, 980 bp, Homo sapiens
aatattaggataagggcttcagttctctgccgggtttccagaacagattcaattacccaaaatggaggcaaggctcccaaagtattttaacaacagataaccagaaccagagaccccactcattgccctagaaaatcccctcctgtcttcattaagctctttgaggctgtccacccaaagcattgggtctgattggggactgtcttttagccatgcttactggatccccaggagaggaaaactatttggatataaaaaattatttcagctgatttggacaagattatcgctttcttttcccaccaactccccccatctcccccacccctgccaactcttcacctcatctcacgagactggagagctcctggagtgatcttgtcccaccttccccagggcttccccacctcatctacctgctgaatgggtaggtaaaagatctctaaacttacagattcacagcaccaacatgaggttgcatgggggcaggccatgatgagagaagaagaagggtttggggacccatattctggcagtttttctaccatcaccccaaactacaagcaacagctcttggctgtacaaatgagagtgtctatgttgaacataaatatgcaatcattaaagatgtgtcagtttggagagaaagggactttagaggaggctgtgtctcaaactcttttcctatctcacccatcttccactctccctctcccagtctctgccctccccaacactttctcccatctttatctcctctcatacaacactgatgaattctatcagccatgacagtcttgtcctgctgcactttaaaatggcagatcttaaatcatctttccagtttcttccataattgacatagtcaagttttctgcttcatcttgagtcragcttgagcatttgctaagatataatcaattttctttagctttaaatgtttgtggccatagagttacttataatgttctcataaaaca

SEQ ID NO: 60859 - DNA, 980 bp, Homo sapiens
aatattaggataagggcttcagttctctgccgggtttccagaacagattcaattacccaaaatggaggcaaggctcccaaagtattttaacaacagataaccagaaccagagaccccactcattgccctagaaaatcccctcctgtcttcattaagctctttgaggctgtccacccaaagcattgggtctgattggggactgtcttttagccatgcttactggatccccaggagaggaaaactatttggatataaaaaattatttcagctgatttggacaagattatcgctttcttttcccaccaactccccccatctcccccacccctgccaactcttcacctcatctcacgagactggagagctcctggagtgatcttgtcccaccttccccagggcttccccacctcatctacctgctgaatgggtaggtaaaagatctctaaacttacagattcacagcaccaacatgaggttgcatgggggcaggccatgatgagagaagaagaagggtttggggacccatattctggcagtttttctaccatcaccccaaactacaagcaacagctcttggctgtacaaatgagagtgtctatgttgaacataaatatgcaatcattaaagatgtgtcagtttggagagaaagggactttagaggaggctgtgtctcaaactcttttcctatctcacccatcttccactctccctctcccagtctctgccctccccaacactttctcccatctttatctcctctcatacaacactgatgaattctatcagccatgacagtcttgtcctgctgcactttaaaatggcagatcttaaatcatctttccagtttcttccataattgacatagtcaagttttctgcttcatcttgagtcaagcttgagcatttgctaagatataatcaattttctttagctttaaatgtttgtggccataragttacttataatgttctcataaaaca

SEQ ID NO: 60860 - DNA, 1546 bp, Homo sapiens
ggatcctaccaacgtgtgatgtctcccccggacgcccagaaattaaaatttctctcttttgtactctgtccctttatttctcaagccagccgacacttaggaaaatagaaaagaacctacgtgattttcggggcaggtcccccgaaactttagaaattcagattcaggaggtctgagaagagatgggaataactgaagtttttcaaaggcccttaggcataattctgataaattcccctggttgtgaarcattgtagcgcattcataacagctgcctggaaatagaacttgcaaaaaggagcccacgaaagaaatccatctcccaaatgtgctttgtttggttagcatagtgttaaaaaaactgaatgcgaatacttttaggcgagagcatgcaatcttcaattggctacagtccccactattccctattgccttatgtccaggtacttcacttttttcatagcttatgactgatgagcacttgtacattcaggttagagttatcctgcacatggacacgtggagaggcagcctgtttgtcccagtagtgctgtctgagggccaagtgtttctgaggctgttctttaggtactgccttcagaataacttaatatcacatgcaggaaaaccagtctcctcactctgtagccatgttatgattattttaagaaatgacatcctcagggtgcacagcatttagccctcctggaaaagtacacagttttaccttaaattgacattaggaatctttgaactgatgaatttgatatagagaccccagaatcagtaagctctgtctccacaacgtgacagaagaaaggcttcatttccatgcattatttctgagggaggaatgaatgaattctccagaagtttgagttccaacagctcagtgccatctaagttgctatggagactttgtaaaccactaagaatcctgggctggggaactgtctagcccagtgctgttgaatagggatacaatgtgagccacaaatgcaagttatttgtataattttggattttcaaaagtggccatcttaaaaatgtatttaaaaaggtgaaattaattttaacaatatattttattgtcatttcaaaatttaatatagacaattattgagatattttttccttttttgttataagtgttgggaacccagtgtgcaatttacatgtagaacacatctcaatttggaccagctgcactgcaagtgctgcaccatggatagtggctactgtattcaatagtacagatctaccctctcattgagaggccagcattaggggggatctcagaatgtggaaagaccttcttgttgggttggccagttccatggcctgcctgtgtgtgctcttgttgcccccaaatgcacttgcacttggaccattgactcatgtcctagctgccattgttttctttggactgagggacttaattttagccaggtttcctggcactgtgccaacttttctctgcgtttcagttcttccccctctagtccttgcctgtcattgtaatataattcaaagctttgatgggcta

SEQ ID NO: 60861 - DNA, 612 bp, Homo sapiens
tgaacccttgatcaagagggaggcagtaattgtgctggttattagcgattactcctggatgggggttaggggtgtgagcaatagaattaaatgaaattcctttgaaagttctgctgtgcaaagtaagagatataaacgctacattatgtgtttaaaatgcctccagggtttggtttatagacttgtttatatttatatatttatttgaatgtttatgactttctctctgtcattttcacattggtatcttcatactcatcatggttttatggcctctttttggaaaccagtggctgcatataccggcacatgatttgatgagagaagaagattcagaaagagaamacgagtttaatattatacttgggaggaagagccttcccttggggtaagaaagttaaaaatgaagcaagcggtctgcgtgctttagttagaatattgaggaattattgcctgaaggcagctgaaagatgctccttagaaagataaggaaagaggagccttgagtggtggagggactgattggaggtctcagagcgaattgttagaaagtcaggacaagagtccaggtccctgatgcccaccgccaatgcagacccacctcttttcctt

SEQ ID NO: 60862 - DNA, 2969 bp, Homo sapiens
tttgtgtgtgtgaggaccttcttggaccagaaacaagaaaaggtgctgtgctggcagttcagcttcttaagctgcccgttcttagtctacccaattaatatcttttggagacaaacttgctctaagtggcatgctatggggaaatgatgtcagaaaatgcagattttagatattgcattctatatgtcacagtttcagttgagaagaaattttgaaattttatagaaatggaaaaaaatgaataatcctgtacaaacacttgagacccaccaccaccaccaccaccactccaccagtgttccaggaaagaaaaattcaattttgtggcattattctttaagaagtaactttctggccaactgaatggattatgacaatgactcatatgttttgtctttttgacctttaaaattagagccttgagtttctgataaataagtggtgaatttcagagggattgtctaaacttcccagcaatgttgagtccccacggcttcctctgctcttgtgaccactgagagccctctgaagggtgcaactggctgaggacaaaactgcccatgctgctgcttctgtatgtgcaactctctctcgcctgtcccctttgccctgcatggtgaggccagagccctcattctgttctctgccctgggtaacaggagactaagcccaaagcctaacccactcagcctgtctcctgtacacactcactgtggcgtgagggcccccgagctgcaggatctccctccccggccacgcgcagagggaagagttctctagagaagagcgtccttgccttaatctatatacagggactcgccccaggacactgcctctcctcagcttcctgcccatgggccttggctagaccctccaaaacacagtccctgtggctggggaagcccgcatttccaggatcctcttcccaaactctcggacctttgtgcaggtgcccacaaggcaccagactttttcaagtgtttttccattcacagacaggccccaccagccccagagatagatggagcacggaatcaagcagggtgccctgggggtttattaatcaaaatagcagatgctgggcgatactaccttctcctggccgctcctgtagatactagtcgagttcctcctccagaccttactaacaaaatcacaccccaaacatgttgtacttgaaaacacacagggccatttttttgtctaatatttcaccttctcatcatctttttagctttaaaaaaaaatcatggccaggcgtggtggctcacgcctgtaatcccagcactttgggagaccaaggcaggcggatcacctgaggtcaggagttcaagaccagcctgatcaacatggaaaaacctcatctctactaaaaatacaacattagccaggcatggcggcatatgcctgtaatcccagctactcgggaggctgaggcaagagaatctcttgaacccgggaggcggaggttgcagtgagccaagatcacgccattgcactccagcctgggcaacaagagcgaaactccatctcaaaaaaaaaaaaaaaattcacaaagggtttttaaaccccaactttgatcagacatatattacttttctaatcaatagtaccctaccttgaaaggttttcagtttctcttccctgagggataaatgcctcacgctcatatttctaaataaaggaaactcaacatcctaatccatcagtgttctaagaactcaagattaagataataaagcttttgttcctgttaaagttaacctatttgaatagaaacaaaaatcctggacatccattgcaaaatgttagtgggaagggttcagtgccaagtctcttgcagccaaggtcaagttgtctcttttgcctccataatgagcatgtaatcctgttatgcctacagcttttgagagccatccccgttggaattggccaagtgtacggctgtgataacccctggactggaggcatcttcctcatagctctgttcatatcctcacctctcatttgcttgcatgcagcaattggatccaccatggggatgctagcaggtctgtgtcctcacttccctgggctgtgagggggttagagcctggggccagctccaaataaaatggtgactctcatcttcaacactccacctgctgattcctgtgaactttccctccttctgttgtaccctgtttctccgtttttgatctagcccctttatcctcccctgagccacagctgccctcaagaaaggctttggtgttagtcattcacaccttagtataaatttaaagtttgggggaagtttcttccaggtatatttacatgttaagtgatctgcaatgacagcaagaaagattcgttctccattagagaattaaggtatcgatgaaggaggagaggttctytttcttggcaggggaaggatattctctggactgtttaaatcagacttctgtccttactcaaagaatctcttcaacccatgccagcttaactgctagtattcatgggactctatggccatttgtttcctttagatgttttttcacagaataaagccagaagtcctttttgtataactacctaagaagataactggctccgggctttgaggactgtggtaggtttcagggccagcagatgggccccataagaccctagacccaaccctgatgcctgccttctgtcacagcactcactattgcgacgccctttgactccatctacttcggcctgtgtggcttcaacagcaccctcgcatgcatagcgataggaggcatgttctacgtcatcacctggcagacgcacctcctcgccatcgcctgcggtaggtactccccacagaggatttgtttcctttataaaaggctttttacataaaactgtttttttatgttttttaatggttatttagtaattaatagattaaacactattttcactgaatactcaacgttcagtcacatgaagacggt

SEQ ID NO: 60863 - DNA, 671 bp, Homo sapiens
acttgtctttctccctggtagccacagagcaggggggggcatgaatctgtttctgttgtcatccaaaccaggacacccttgagagggaaagacggtagtattaataattatgccagaacaggcagaaactgggatgctgctggacaacctaggctgcatgcccactttagtgtcttgtggaagacattttccccacagcatgcaggtaagggggcatggagatggctgtgacagccgtccctgaagtcagtccccagaatctgacctcctgcgagtgttctgctggactttgggaagatgagcgccacttttcggaccctctctgctaagaagaggactcgaaaactctgctcactgcagaagcactggcgggacaggcgtcccaggctggcgagagtgggcactgccatgctgcccctcactccatctcgccccgggttcacacaggggacactgagcagcagctggacgtagacagagctaatggagtcttcccaggtggtccctcctttcagaaaggcccctctgtctgagctccttaactctgaaaccagataagaaggtgggagacaggggccccttttctcatgggattaaatgaactcaattgacagagctctggaaaacttcattgtcrcgtaacatagtgagaccagctttggcagtggtgc

SEQ ID NO: 60864 - DNA, 763 bp, Homo sapiens
ggcgcgatctcggctcactgcaagctctgcctcctgggttcacgccattctcctgactcagcctcctgagtagctgggactacaggtgcccaccaccacgcccagctaattttttgtattgttagtagagacggggtttcaccgtgttagccaggatggtcttgatctcctgacctcatgatccacccacctcagcctcccaaagtgctgggattacaggcgtgagccaccgcccctggcctgttgactttccttaattttttttttctctgttcctcaggttggataatttctattgctctaatttcaagttcacttattctttcttctgccttctcaaatattcttttgagcccctcacatgagttttgtatttcatttactgtactttccaactccagaatttttgcttgatccttttaaataaaaccttatttttgagattatctatttattacatccccattaccatatatcttttccttaagcatggttcctaatgtgatttcaacctatttataatagctattctgaagtctttgcctaatctaacatctggggacaatcagaagtttctatttactgctttttcctttgaatttggatagtattttcttgtatatttccatgtctcctaatttttgataatatatcagcaactctgaatttggctcttaacaaccttcaacctgatttgttgtttstttctaaatttgcctagactacatctgtgtaatttaggcaagtttataatgtaatccaa

SEQ ID NO: 60865 - DNA, 561 bp, Homo sapiens
tgtaaaaagagaagatgacaaaacaaccagaaacaaacagaatagcaggaggaagtctttacttataaataataatattgaatatgaagggactaaactctccaattaaaagacatagagtggctggctggatggattaaaaaaacaggacccaacagtctgtcacmcacaagaaacacatttcacctataaatacacaaatagtctgaaaataaatgatgggaaaaagatattccatgcaactggaaaccaaaaaagagcaggaatagctatatatatacatagcctgcagaattctgagtcaaacctctttttaaacaaatagactttaagataaaaactgtaaaaagagaccaagaaggtcatgatataataatgaaggaatcaattcagtaagaagacacaacaattgtaactgtatatgcactcaacaatggagaacccagatgtatgaagcaaacattactagagataaagagcaagaaaagccacatttcaatactatctggagacttcaatacctcactttcagcattggacacattatcaagatatgaagtc

SEQ ID NO: 60866 - DNA, 952 bp, Homo sapiens
ttaatctgaattcataacgagctttcaaaggagtaagaaaaagaaacaaaaaaaaagcacattacctaaaagacacacataataaaattgatttatttccacttagtaaaaatcaatgttaaaatctgttttcatattatggtaatatagaaattaatcaaatcaaatcttaactttgttaagaacaaagttttcccatggaaaatataaaatagcacttctttcatcaaagtataaagctcaagactgaaaatgaatgatttgtctggataataaccaggtttcgagctttaatcaaaaggttttagggccagaaaaagtatgttgtcacagagaattccatcatatatcctggggcccatttaagacacttggaatttaataatcctattgctttccttttgaactgaccacattccatccttttaaagcctcagtcatctcccacactgtcatctaaaatcaattcaacaagaattccttgctttcttaattgaagtaagccacaatttagccttctatgtcttaactagaaaagaagttaaaaaaacaaaaaactttaaaggtgattaacatctgcgtttaaaaattacatacatgttcccccataggatgttttatgtggcaatatcccctaaagattatctaaaaataaggtcctatgaacaagtccatttgaaagattctatattctctttctggcaaattcacaataatcattttaatgctaagggctcagaagttctacagtcaagaaaagtacattttttcaycattgaaattctacgatatatgagtataataaagacactgacatcagactattttttgacctttggctactgagagcttttaagccttatccctccttcttcgccttgtcgcccacatgtgggctgataaaaagcccatgtgctctttcctttgatgctggcgggagattcaaatccta

SEQ ID NO: 60867 - DNA, 572 bp, Homo sapiens
tcctgtgacacagagaaacagcagtcgaatctcactgggaacataaggaatgcttcagtgagtgactcctgccagagttagatttcgagaagcataggagatggttagacggagaggggttaatttcctagcaaagagtgctagcagtatatgaaaagtaggagaataggaaacaattctagaaacagtaggatgtgttgagaggtggaaaacaaggaccaatattgggagccacctaaaaatgggatgaattccctattaaccaagtgtgaaataaattcactttgaaatgacagagatgtcttcattaactgagaaagtaaaakcttcattttggggctcttatcggagtagaaggaagcctcctcagtttgaggcatggaagaaaggaaaacagtctcaatcacaagctctggatgtcaaaaacattagggtggtagacacacatcagggccttcctggcaccagggctctgcagtccaccttccagcttccatttaaaatagggtttctagagagggatcatggtggatgggagacagaactagattgcagctccaactcaggtggac

SEQ ID NO: 60868 - DNA, 711 bp, Homo sapiens
cattagataacaaatgtactgcgataagcaactaagttggggcagggggtaatttgttatgtaataatagataatcaatacagtacatatatttctaggagaatatccacaagaaaatgttaactgtggttacctctggaaatgagaaataatacagtggggataagaggtgggagacaggcttacttttcatactataccactcagttacattttacaccggggcaatttttcatgtattacctgaaaaaataaaaaagaacacatagtaagatgtgcccatatatgaagagagtgttcagagagggctcaacttcctgtggaacaggaggcaggaaaaagagctggagcttaaataaggtttgatamagtgtggaaaaatgaaaaaatcaccttcagtaaaaaacctctaaaatttttgaaagtgtgacacattttgctgaccaaaatttaatcctgatgtgatgatgactagagcaaattttgatcctccaatgacatgctattactatcccttaaaatggtgcagcacaaatgataccactactatgtcatttaattcatgtttgaggaaatcactcaggccagacaataacaaaaatatctgtcttgcctttatttggtggctgctatactctcagtaaagtcagatgggtcttgtgagtgttaagaaaaattttccacaacctgaaaataaggtcaagaataata

SEQ ID NO: 60869 - DNA, 861 bp, Homo sapiens
gcataagtgagggacccttcagaggattgcagccgcccatcttcggatcttccaggtgaggcttcagccatccatggagcagagacaagcagtccccactgtgtcctctccaaattcctgagtgaagaaatctgtgagcataaccaatggttgtttgatgccactttgtgtggtaatccgttgtgcagccacagtaactagaatagtcagatttttttaaggaagtacactccagacaatctatacaagatgttgttattctgtgtggtataaagagggttttttgtttgtttgtttgtttgttygtttgttttttgagacagagtctcactctgttgcccaggctggagtgcaatggcatgatctcagctcactgccacctctgcctcctggtttcaagcaattctcctgcctcagcctcccaagtagctgggattacaggcacacaccaccatgtccagctcatttttgtgtgtgtgagttgttagtagagacaaagtttcaccatgttggccaggctggtcttaaactcccaacctcaagtgatccacccacctcagcctcccaaagtgctgggattacaggtgtgagccaccgcacccagaaaaaaaaaaaatcatttaaagagttgcttcttgagacttcttgggagaagatggaaaatagattccaacaactgctttcaagaagttttcagccaagaaaaacaaaaacaacatataaatgtctcctttcaatttgtcaaaagtgggtgattccataccaggcaagtacagaggggagtcccctccaacaaggagaagcacattcagaattcctgcattatcctccagctccaagtggctcgaacagtaggaaaaa

SEQ ID NO: 60870 - DNA, 861 bp, Homo sapiens
gcataagtgagggacccttcagaggattgcagccgcccatcttcggatcttccaggtgaggcttcagccatccatggagcagagacaagcagtccccactgtgtcctctccaaattcctgagtgaagaaatctgtgagcataaccaatggttgtttgatgccactttgtgtggtaatccgttgtgcagccacagtaactagaatagtcagatttttttaaggaagtacactccagacaatctatacaagatgttgttattctgtgtggtataaagagggttttttgtttgtttgtttgtttgtttgtttgttttttgagacagagtctcactctgttgcccaggctggagtgcaatggcatgatctcagctcactgccacctctgcctcctggtttcaagcaattctcctgcctcagcctcccaagtagctgggattacaggcacacaccaccatgtccagctcatttttgtgtgtgtgagttgttagtagagacaaagtttcaccatgttggccaggctggtcttaaactcccracctcaagtgatccacccacctcagcctcccaaagtgctgggattacaggtgtgagccaccgcacccagaaaaaaaaaaaatcatttaaagagttgcttcttgagacttcttgggagaagatggaaaatagattccaacaactgctttcaagaagttttcagccaagaaaaacaaaaacaacatataaatgtctcctttcaatttgtcaaaagtgggtgattccataccaggcaagtacagaggggagtcccctccaacaaggagaagcacattcagaattcctgcattatcctccagctccaagtggctcgaacagtaggaaaaa

SEQ ID NO: 60871 - DNA, 1312 bp, Homo sapiens
aatcactcagcacgcgctgcagggggcggccaggtctcccgagtagcctttcatccacaaggtcctcttttaacatgacagcrttacgtcggaagagatcaggccagctatctttcggaagaaggcacatctcctttcaacatccacatttaattatggatgaaagagcgcatattctgtcagattcatctgagataaccgagcaccatttcctcctcattttaagaagtatcaattactcgcctgttatatcctggagagcaccagcttttaagtcaggctgccagggccccaaaccagctcccctaggcacctgctgtgcagccttgggagctaaccctctaggcctctgttccctggacaacaggcttaactgcagcacacacaccagcaactgtggcgaggcttaaataagatcacgtgggaaaggcacaagtaagaggcataatagaagctttccagtacacctgtgtggggtggccaagtctttaaaagatagaggctgactgtgctaccagccccgttccttcatgagccaatggcaccccaaggccaagagcctgggccttgagatccagccctgcagaaccattacggaacgcacgcacactgggcccatcttagtgtggtagctaaaaaagaaccagagctgggatagaagtccagcttgaccactcactacctacaggcagtaagaaagtgatctgtttttgtgcctgtttcctcatcagtaaagtggatctaagactcctgtgaggttcagatttcgtcacatatgtaaagcatacgccactgtacaaaaaacccagttccaattcagtacattagaaactatcatttctaacgtcattctaaggtgtctcctgactgtaacggatagccttacacaggcagagtgaaagctcacattcaaaggacaggcttttgaatcctggctcagtcacatacaagctgtgtaactttgggccaatgattaaacctctcaagcctcagtttcctcatcagtaaaatgggcaccgtacgtgtcatgtagactaagtagtcgtgtagacatgtagacatgtagcatacgtgtcatgtggactaaccagatactgtacttaggtacttagcaagcactgtgcctggtgcacagtaagctctcagtaaatgttcctaaaaaacaggcactcacagatacttaggcaaaagcctaagagtcgccttccctactgctcacatgccatggtttccatatctgaccctccaaacctcatgaagaaatgtgatccccagtgcttctcgtggggcctagtgtttgggtcatggggac

SEQ ID NO: 60872 - DNA, 511 bp, Homo sapiens
gccgaaggactcctgggggcaaatacgcccccattgagactcactggcttagaacaaggcaagctccagcctgtttcaggctttcccagagactgcccctacaccatctatggttgcatggctggcttctcatccttcaaccttccaccgaagtgttgacttcagagaaacatttttttcactagccygtccaaggcccgagtatcccattccatcatgttactcttttctccttattacctgttacattttttaatttattcgtttatctccccaacctgcatgtgttaacaggtgtaagcttcctgatggcaggattctcttgtgttttgttcctcactgtgccccctgcctctgggacagcgcctggcacatagtggagtgaaagagtgccgcccaaaaatggccctcagcatggcttcagaaattgagaccccggcctgggatggtggctcacgtctacaatcccagcactttgggaggccgaggcggacggatcacgaggtcaaga

SEQ ID NO: 60873 - DNA, 597 bp, Homo sapiens
tctattgcaagaagcgcaagatggtgtgaccacacctaagatcctattttaaccaccactttcacaattccttgtaagcaaccttagcctaaactgtaatcatataatagttcgttggtaattataagtgtatttgttttctagattaggccttacaggaaagatcaaggaagatgaatacaaagaacaagaacagaagcactaatacaaaataactgattgtatgaagtgaaatcagccaggcacagagagatacataccatgtgctctcactcatatatagaagctaaaaaagttgatctcatagaagtacatgtttcaaaatcctaccttatgccccataattatgaacaattattatatcaattaaaaataatgaggccaggcgtggtggctcacgtctgtaatcccagcactttgggagaccaaggccagtagatcacctgaggtcaggagtttacgaccagcctggacaacgtggtgaaaccctgtctctactaaaaatataaaaaattagccaggygtggtggcgggtgcctgtaatcccagctactccggaggctgaggcaggagaatctcttgaacccgggaggccaa

SEQ ID NO: 60874 - DNA, 651 bp, Homo sapiens
ctcttgccctagttaatatttttgtggtcttgacaccctgtctttaagaaaatgacacatcgcccttttcatttcccttctcttcacccccaactgtttgtgagcccaaggtgcttggaaaagataacagggtctttaatatgatataaatgtagggggtttttctaggtggacggctctgggatgttgtcagatcagtgaggtggggggtccgcatgtgctcacctgggcaatgctgaaatagtttataaaagctgtgttcagccttcatcagagcaaataacaacctctccaaacggaaagtaaatcaatagcagctgaagactgggttttcctggttcagagacagacaatgttaatrctatgctcctctctgattcccttttacatttctgcagacactggtttagaagagttagcagagaaaatggtgtgttttggagaaatgctcaccctgccccacagagacaggtgcatttaagaagatagttttacattctgaaccagcaggacttgagacacactttacactgtgttatcaggaaccaaaatggtataaaatctagctaatttttcaggaatttcctttgctaaatttatacacatgcaaacacacagacacacacacacacacacacacacacacacaca

SEQ ID NO: 60875 - DNA, 677 bp, Homo sapiens
ggattctaggccctaggctgtctcctttggaaggggcatctcttctgaattgctgcagttctggtggctcagaagaggcacacctataccctctccctggctggttagtgcattggcatcacctacctgggctgggcagggtctgagtgtctggccattgatgtgagagaagttaatagttggcagaaagtgctgagtaagctgctggcttcactatggcctttcaaaatgaaacaaaattgctgtgctttgaaaagtccagcatcaggggagaatagacccttcacttcagaacctttataatggtaggtcacaggttagaacagaacacctccatgaatttctgtcttgtgcagacaattcacattacagcaatttatatcaytccaattaagtaaagccattacttcccttactcattagttcagatggctcttatcttgttgagagaagttcatccaagacacagagactttatgtggtctaaccttgcctgaagtaaaaagaaagtctgtctgctgttgcatgtaaccctataaaggttcatcagtactggagagatagatttctatataaggttagaagcatcagaaatccaacacagtctggcttaagcatgataggaaactaattggtgcaagtaaatgaaagcctacatgtggatttcaggtatgggt

SEQ ID NO: 60876 - DNA, 543 bp, Homo sapiens
aggcacaaaatcacacaaattagaaatggttaaaaattgtcagtagaactagggaatgtttggggtggatacaaaagaatattgcttctcattaatacttcttctgaactgtaacaccacaaaccatgtgttagtttcttgttgctattataacaatactataaacctgctggcttagattatctgaccwttctggaagtagtgtgaaatgggtcacactgggctatatcaaggcattggcaggacagcattccttctaggggctccagggcaaaatctgtctccttgatgttttcagtgtccaaaggccacctgtactccttggcttatggccactttctccacctgtaaagccagcattgtcccatctgaagatttctccagactctgagctccttcctcttcaaagctagcaatgactggttaagtctgtctcactgtgaatcacactccttttctgctttcagcagcacatctctgactcttgtctcactctttcccgtgattacattagactcacacagaaaacctgataaagtaaca

SEQ ID NO: 60877 - DNA, 543 bp, Homo sapiens
aggcacaaaatcacacaaattagaaatggttaaaaattgtcagtagaactagggaatgtttggggtggatacaaaagaatattgcttctcattaatacttcttctgaactgtaacaccacaaaccatgtgttagtttcttgttgctattataacaatactataaacctgctggcttagattatctgacctttctggaagtagtgtgaaatgggtcacactgggctatatcaaggcattggcaggacagcattccttctaggggctccagggcaaaatctgtctccttgatgttttcagtgtccaaaggccacctgtactccttggcttatggccactttctccacctgyaaagccagcattgtcccatctgaagatttctccagactctgagctccttcctcttcaaagctagcaatgactggttaagtctgtctcactgtgaatcacactccttttctgctttcagcagcacatctctgactcttgtctcactctttcccgtgattacattagactcacacagaaaacctgataaagtaaca

SEQ ID NO: 60878 - DNA, 704 bp, Homo sapiens
  misc_feature (1)...(704): n = A,T,C or G
annnnnnnnnnnnnnnnnnnnnnnnnnnnnnnnnnnnnnnnnnnnnnnnnnnnnnnnnnnnnnnnnnnnnnnnnnnnnnnnnnnnnnnnnnnnnnnnnnnnttagaaaataccttaaatccagcactattcacaataggcaagctttagaatcaacctaactgtccgtcagtggatatatggatttaaaaaagtgatatgatatatgtatatgggaccatgaataacttagggtcactttcattgsatgtatacattatacacacacgcacgtatgcacaatggaatactattcagccatgaaaaagaatgaagtcttgtcatcaacatcaacatggttagaattggaagtcattatattaaatgaaataagccaggcacagaaagacaaatgatacatgttctcactcatatgtaggaactaaaaaagtggatctcatgtaggtagagagttgattggtggtaaccagaggctgggaaggaaagcgggagaagggggataaagagagattggttattgggtacaaacacgaagttagctagaaggaattagttctagtgttcgatagcacagtaaggcaacattctttaacaattatttgttccatagttcaaaatagctgtgggagacaacctggaatgcttccagcgtaagtaaaaggtgaatatttgtggtgatgatgctgcagttggcctgatttgatc

SEQ ID NO: 60879 - DNA, 744 bp, Homo sapiens
ttggtaagaaataggagcttatgctcttggtaataatccatgaatgtgattgtagaaggcaacatccatttgacattctaggaaattccataaggctgaaagacttcttggaaggaacttctacatttcttagacaataaagagattcagcaggtcatatatgggagagtgtgggagaaagtaattcacctcaattaggcttgatgatctcgtgtcatttctgaagctgatacacctgaaatgcaacacaccagagagaatctctggtaaatattaataggtcagcctcagagggtgatcttggagactctccttccacatttcttgtttcacttcaatatccaacatgctgaacaatacaagarcttctaagagtgcagccacatcattctcacttgaattactaaatagctttctgtctccctgtctatgcttttcactctctgttctcttcaatgccaccagttttcattttcaaaccaagtaacccttcaaaaaaattatcaaatagggccaggtgtggtggcttatgcctataatcctagcactttgggaggcaaaggtgggaggatcacttgagctcaggagttcaagaccagcctaagcaacatagtgagcatttacattagttgaccttacttgaattaggcacagaggtggccatctgatgtaaacttaccacatttggagttgagatggagatgcttattctagactgattgctggaaccaaggcaatgtgtaa

SEQ ID NO: 60880 - DNA, 1636 bp, Homo sapiens
tgctcctcattgcaaagttgctcaccaatctgcaaagggtctcaacttggaagcagctcctgcccgctccatccaaggccgttgagttcacgcagattttcttttgcagcggccccacaggtctggagggcaacatgggagtgcgttccagctctgcacccagggaaaagccactgaagagcacagacgattcaaactccccaacctgtccctcttgaaccgctccaggtagaactgttggacttagcaaacaaaaatacaggacgctctgtatgttgcttagcaaacctagccctagaagcccagagaggctggggcgttaaccatactggggagaggcgtgggcaactgagaatggaggggacctcggagggagggcccggaaaaaatttttaaaagccagtcccacaactccgcgacacgtcccagccaaggcgcggcggggagccttggacaggagtgcacttgaaggtgagggtgcagagtggccggtgggacttgtggctggtgttctcggccatgccctggccccagaagtcgttggtgaagatgccccagcagagcgaggcgctgggccgcacgtcggggttgttcacggtcgcccacgaactcgccctgcagggaacggccttagcacaggcagctcgcgcctgccagcagcgccgcggccccggctatcaacacctcctcctccccactgcgaatgccccgatcgtgctccccaaaacccaatacatccacgcccccaaaaaactgggaacccacgcgggtgccttctgtttaccgcagcgctctcactgcaggcgcttgagtaccagatggcgagagttcgcgcgcaggtggagtggggatcctggcgctaggctacccaggagaggaggggaagggcaacccgcggtcccgcctgtggtgcccggctgtgctcatccccacgccccagaccccaaaaggggctggggaggggcacatctggcggacccctcgcgggggacsaagcgggtttagcaggtgcgccgcctggaacccctacgcccaccttccagggagaaaagtgcctctgcttctcgggaagttcccggcttttcagcacccgggacaacagcagcggcacctggggagaggctctccaccccgccccgcgctcgcttccagtcgccagcttcgtgatcttctgcccggactttctctcacccgccgggcgctgcgtcctgcagtcccagcctcccttggggacagggagcaccttccccaaagccaggagaagaggtctccctggacaaggacatcctgcttgccctgcctgggtgtgtttagaggagccaccggcggtttaacttcacagcccatttattggcccgcacttacaaaaagccccaggtttaattcttggtttgggcctaggagctgaactggcttctaaaacacttctttcatttttatttatttcaactctttgggcaatccgggatatgacgagcaaattattcttatgcaaggcagtcacttgggtctgattattcatttctgggctttgcaggtgtttgaactgcttctgctcagtcaatatgcaaagaactgggtaaggcctttggttttggctcctaaacgtccctgtcttcttcaaaggttctcattt

SEQ ID NO: 60881 - DNA, 1636 bp, Homo sapiens
tgctcctcattgcaaagttgctcaccaatctgcaaagggtctcaacttggaagcagctcctgcccgctccatccaaggccgttgagttcacgcagattttcttttgcagcggccccacaggtctggagggcaacatgggagtgcgttccagctctgcacccagggaaaagccactgaagagcacagacgattcaaactccccaacctgtccctcttgaaccgctccaggtagaactgttggacttagcaaacaaaaatacaggacgctctgtatgttgcttagcaaacctagccctagaagcccagagaggctggggcgttaaccatactggggagaggcgtgggcaactgagaatggaggggacctcggagggagggcccggaaaaaatttttaaaagccagtcccacaactccgcgacacgtcccagccaaggcgcggcggggagccttggacaggagtgcacttgaaggtgagggtgcagagtggccggtgggacttgtggctggtgttctcggccatgccctggccccagaagtcgttggtgaagatgccccagcagagcgaggcgctgggccgcacgtcggggttgttcacggtcgcccacgaactcgccctgcagggaacggccttagcacaggcagctcgcgcctgccagcagcgccgcggccccggctatcaacacctcctcctccccactgcgaatgccccgatcgtgctccccaaaacccaatacatccacgcccccaaaaaactgggaacccacgcgggtgccttctgtttaccgcagcgctctcactgcaggcgcttgagtaccagatggcgagagttcgcgcgcaggtggagtggggatcctggcgctaggctacccaggagaggaggggaagggcaacccgcggtcccgcctgtggtgcccggctgtgctcatccccacgccccagaccccaaaaggggctggggaggggcacatctggcggacccctcgcgggggaccaagcgggtttagcaggtgcgccgcctggaacccctacgcccaccttccagggagaaaagtgcctctgcttctcgggaagttcccggcttttcagcacccgggacaacagcagcggcacctggggagaggctctccaccccgccccgcgctcgcttccagtcgccagcttcgtgmtcttctgcccggactttctctcacccgccgggcgctgcgtcctgcagtcccagcctcccttggggacagggagcaccttccccaaagccaggagaagaggtctccctggacaaggacatcctgcttgccctgcctgggtgtgtttagaggagccaccggcggtttaacttcacagcccatttattggcccgcacttacaaaaagccccaggtttaattcttggtttgggcctaggagctgaactggcttctaaaacacttctttcatttttatttatttcaactctttgggcaatccgggatatgacgagcaaattattcttatgcaaggcagtcacttgggtctgattattcatttctgggctttgcaggtgtttgaactgcttctgctcagtcaatatgcaaagaactgggtaaggcctttggttttggctcctaaacgtccctgtcttcttcaaaggttctcattt

SEQ ID NO: 60882 - DNA, 661 bp, Homo sapiens
catgatagcaagatataattttatatccagctttcattatactaagytttttaaaagaaatcattttaatgggggaaagaaagatacttccagtgatcatgtcaaaggaaactgcatggcaaagatgaaaaagttgatgaggcttgcctggaatatgaatgctttctgtacctagcaacaaacaaacacaaagaaaagaaaaccaacatcatctaatgtattatttccttttacttaagccacaaaattagaaccatatcgatactgagagtgagtgaaggccagcaagtaaagcccagcaagcaatccctgcttttcctgccataagacctttggcttatccaaagttaaatgctagccatctgtgttagattcccagccatccaaacccactaatattcataaaatatccccagagctggtcaagacagtagaccaaaatcaaaagcttctgccaagtaaaaaagatatatctgtagacaagtgtgatgctggaaggacataaacttcactgttctttgataaacaaaagtgaatgagtccatcagcctgcaccatgtacttggaggagtctgggatttcgtttttgtgtaggttgtgcctatacgacgtgtagccatctgtcccttccaagcaaaataggagctacttgggtaaacat

SEQ ID NO: 60883 - DNA, 661 bp, Homo sapiens
catgatagcaagatataattttatatccagctttcattatactaagttttttaaaagaaatcattttaatgggggaaagaaagatacttccagtgatcatgtcaaaggaaactgcatggcaaagatgaaaaagttgatgaggcttgcctggaatatgaatgctttctgtacctagcaacaaacaaacacaaagaaaagaaaaccaacatcatctaatgtattatttccttttacttaagccacaaaattagaaccatatcgatactgagagtgagtgaaggccagcaagtaaagcccagcaagcaatccctgcttttcctgccataagacctttggcttatccaaagttaaatgctagccatctgtgttagattcccagccatccaaacccactaatattcataaaatatccccagagctggtcaagacagtagaccaaaatcaaaagcttctgccaagtaaaaaagrtatatctgtagacaagtgtgatgctggaaggacataaacttcactgttctttgataaacaaaagtgaatgagtccatcagcctgcaccatgtacttggaggagtctgggatttcgtttttgtgtaggttgtgcctatacgacgtgtagccatctgtcccttccaagcaaaataggagctacttgggtaaacat

SEQ ID NO: 60884 - DNA, 661 bp, Homo sapiens
catgatagcaagatataattttatatccagctttcattatactaagttttttaaaagaaatcattttaatgggggaaagaaagatacttccagtgatcatgtcaaaggaaactgcatggcaaagatgaaaaagttgatgaggcttgcctggaatatgaatgctttctgtacctagcaacaaacaaacacaaagaaaagaaaaccaacatcatctaatgtattatttccttttacttaagccacaaaattagaaccatatcgatactgagagtgagtgaaggccagcaagtaaagcccagcaagcaatccctgcttttcctgccataagacctttggcttatccaaagttaaatgctagccatctgtgttagattcccagccatccaaacccactaatattcataaaatatccccagagctggtcaagacagtagaccaaaatcaaaagcttctgccaagtaaaaaagatatatctgtagacaagtgtgatgctggaaggacataaacttcactgttctttgataaacaaaagtgaatgagtccatcagcctgcamcatgtacttggaggagtctgggatttcgtttttgtgtaggttgtgcctatacgacgtgtagccatctgtcccttccaagcaaaataggagctacttgggtaaacat

SEQ ID NO: 60885 - DNA, 906 bp, Homo sapiens
tcagttacctmgtatgtaaaataagatctatgctatctgtcccaaagggtcgttgtgctggttacataagacaagatacttaagtgcctccaaaacccccggcacttaagaagctgtaccacatgtttgttcaagaaatattaatcatattggccacatatccctgttgcatgttcttatcctgcatgcttttttatggcagtcatcataattgtaatcaagtattcatgcacccgtttatgtgattctgtctctccactagattattagctcttcaacaacaggaaccacacctgttcgattctcagctatatccttaatactggaagagtgtgtcatacacaaaataaatatatgccaaatggatggctgagggaagaatgagtgaatgagtgttcccacttatgcagagatgctcaatgtgagggctgaaagtttcttaaagagtgcagaattggaaaatgagctttgagccttttaagctacatatcagcaaaataattccttccacagacttggaagcttgttaggatgaagctttgaaaaaagaagcctagctctatagagatgggatgaaaaagagaaaaagtgtaagcaacattggctggagagtcacaagaccatgagaaacagtaattcattgatgaaattaaaatagctgcaccaggcaagagagcattcgtagtcagttgtcacatccattgttgtcagtgagcaaagcagaagggagttaggaggcagctttgtttggttacattaaaagactttattttttagagcagttttaggttcacagcaaaattgaaaggaagatacagaaagttctcatatacccccttccccctcaatacagagcctagaggcaacttctgagttcctgtgagaaggtgcctttgagaagaggaa

SEQ ID NO: 60886 - DNA, 906 bp, Homo sapiens
tcagttacctagtatgtaaaataagatctatgctatctgtcccaaagggtcgttgtgctggttacataagacaagatacttaagtgcctccaaaacccccggcacttaagaagctgtaccacatgtttgttcaagaaatattaatcatattggccacatatccctgttgcatgttcttatcctgcatgcttttttatggcagtcatcataattgtaatcaagtattcatgcacccgtttatgtgattctgtctctccactagattattagctcttcaacaacaggaaccacacctgttcgattctcagctatatccttaatactggaagagtgtgtcatacacaaaataaatatawgccaaatggatggctgagggaagaatgagtgaatgagtgttcccacttatgcagagatgctcaatgtgagggctgaaagtttcttaaagagtgcagaattggaaaatgagctttgagccttttaagctacatatcagcaaaataattccttccacagacttggaagcttgttaggatgaagctttgaaaaaagaagcctagctctatagagatgggatgaaaaagagaaaaagtgtaagcaacattggctggagagtcacaagaccatgagaaacagtaattcattgatgaaattaaaatagctgcaccaggcaagagagcattcgtagtcagttgtcacatccattgttgtcagtgagcaaagcagaagggagttaggaggcagctttgtttggttacattaaaagactttattttttagagcagttttaggttcacagcaaaattgaaaggaagatacagaaagttctcatatacccccttccccctcaatacagagcctagaggcaacttctgagttcctgtgagaaggtgcctttgagaagaggaa

SEQ ID NO: 60887 - DNA, 906 bp, Homo sapiens
tcagttacctagtatgtaaaataagatctatgctatctgtcccaaagggtcgttgtgctggttacataagacaagatacttaagtgcctccaaaacccccggcacttaagaagctgtaccacatgtttgttcaagaaatattaatcatattggccacatatccctgttgcatgttcttatcctgcatgcttttttatggcagtcatcataattgtaatcaagtattcatgcacccgtttatgtgattctgtctctccactagattattagctcttcaacaacaggaaccacacctgttcgattctcagctatatccttaatactggaagagtgtgtcatacacaaaataaatatatgccaaatggatggctgagggaagaatgagtgaatgagtgttcccacttatrcagagatgctcaatgtgagggctgaaagtttcttaaagagtgcagaattggaaaatgagctttgagccttttaagctacatatcagcaaaataattccttccacagacttggaagcttgttaggatgaagctttgaaaaaagaagcctagctctatagagatgggatgaaaaagagaaaaagtgtaagcaacattggctggagagtcacaagaccatgagaaacagtaattcattgatgaaattaaaatagctgcaccaggcaagagagcattcgtagtcagttgtcacatccattgttgtcagtgagcaaagcagaagggagttaggaggcagctttgtttggttacattaaaagactttattttttagagcagttttaggttcacagcaaaattgaaaggaagatacagaaagttctcatatacccccttccccctcaatacagagcctagaggcaacttctgagttcctgtgagaaggtgcctttgagaagaggaa

SEQ ID NO: 60888 - DNA, 835 bp, Homo sapiens
tcagggcagcacctacctattgagagccaacaccagccaatctggataatcctggggcgagcatcctcaccggccccatgtggtcctagatcactgctccagtcaatggggtgcctctgttttttctctttcccatccccaatttctctcttcctctctttttgtatctcataccagtcaattgttagaaacacctgcaggcatggcctaagttcgctaaccacacttaggagcttgcagtttaggaagagcagttgtgccctcgaaagttcagaaagatgaccacagagctatggggtacacgccctgcgaataagtcactgtggtggtcactggtgcgcacccagaacttctttcaataggacctgctgtcccagctgttgggagtactgatggcttcttttgagattgcttcagtggagccaggctcagtggcacatggctgtagtcctagctactagggaggctgaggtgggaggattgtatgaggmcaggaatttgaggttacagtgagctacgtttttgccactgcactccagcctggacaacagagcgaggccctgtctctgaagaaaaaagagattgattcaatggcagagcactgcctcatccaaagtcacatcccaaggttatgtctctttccagagcggctaacaatcaatgactgagtaatgagggcaggtagaggtgttgttgatctcaagagcactctaccataagcatcatgcaggtgaaacatgcagattctgctctcagggacccaatttacaacacctggtaccataaatgatcccaggaaaaactgtcctaagatggggttttggagctggatcat

SEQ ID NO: 60889 - DNA, 835 bp, Homo sapiens
tcagggcagcacctacctattgagagccaacaccagccaatctggataatcctggggcgagcatcctcaccggccccatgtggtcctagatcactgctccagtcaatggggtgcctctgttttttctctttcccatccccaatttctctcttcctctctttttgtatctcataccagtcaattgttagaaacacctgcaggcatggcctaagttcgctaaccacacttaggagcttgcagtttaggaagagcagttgtgccctcgaaagttcagaaagatgaccacagagctatggggtacacgccctgcgaataagtcactgtggtggtcactggtgcgcacccagaacttctttcaataggacctgctgtcccagctgttgggagtactgatggcttcttttgagattgcttcagtggagccaggctcagtggcacatggctgtagtcctagctactagggaggctgaggtgggaggattgtatgaggccrggaatttgaggttacagtgagctacgtttttgccactgcactccagcctggacaacagagcgaggccctgtctctgaagaaaaaagagattgattcaatggcagagcactgcctcatccaaagtcacatcccaaggttatgtctctttccagagcggctaacaatcaatgactgagtaatgagggcaggtagaggtgttgttgatctcaagagcactctaccataagcatcatgcaggtgaaacatgcagattctgctctcagggacccaatttacaacacctggtaccataaatgatcccaggaaaaactgtcctaagatggggttttggagctggatcat

SEQ ID NO: 60890 - DNA, 835 bp, Homo sapiens
tcagggcagcacctacctattgagagccaacaccagccaatctggataatcctggggcgagcatcctcaccggccccatgtggtcctagatcactgctccagtcaatggggtgcctctgttttttctctttcccatccccaatttctctcttcctctctttttgtatctcataccagtcaattgttagaaacacctgcaggcatggcctaagttcgctaaccacacttaggagcttgcagtttaggaagagcagttgtgccctcgaaagttcagaaagatgaccacagagctatggggtacacgccctgcgaataagtcactgtggtggtcactggtgcgcacccagaacttctttcaataggacctgctgtcccagctgttgggagtactgatggcttcttttgagattgcttcagtggagccaggctcagtggcacatggctgtagtcctagctactagggaggctgaggtgggaggattgtatgaggccaggaatttgaggttacagtgagctacgtttttgccactgcactccagcctggacaacagagcgaggccctgtctctgaagaaaaaagagattgattcaatggcagagcactgcctcatccaaagtcacatcccaaggttatgtctctttccagagcggctaacaatcaatgactgagtaatgagggcaggyagaggtgttgttgatctcaagagcactctaccataagcatcatgcaggtgaaacatgcagattctgctctcagggacccaatttacaacacctggtaccataaatgatcccaggaaaaactgtcctaagatggggttttggagctggatcat

SEQ ID NO: 60891 - DNA, 835 bp, Homo sapiens
tcagggcagcacctacctattgagagccaacaccagccaatctggataatcctggggcgagcatcctcaccggccccatgtggtcctagatcactgctccagtcaatggggtgcctctgttttttctctttcccatccccaatttctctcttcctctctttttgtatctcataccagtcaattgttagaaacacctgcaggcatggcctaagttcgctaaccacacttaggagcttgcagtttaggaagagcagttgtgccctcgaaagttcagaaagatgaccacagagctatggggtacacgccctgcgaataagtcactgtggtggtcactggtgcgcacccagaacttctttcaataggacctgctgtcccagctgttgggagtactgatggcttcttttgagattgcttcagtggagccaggctcagtggcacatggctgtagtcctagctactagggaggctgaggtgggaggattgtatgaggccaggaatttgaggttacagtgagctacgtttttgccactgcactccagcctggacaacagagcgaggccctgtctctgaagaaaaaagagattgattcaatggcagagcactgcctcatccaaagtcacatcccaaggttatgtctctttccagagcggctaacaatcaatgactgagtaatgagggcaggtagaggtgttgttgatctcaagagcactctaccataagcatcatrcaggtgaaacatgcagattctgctctcagggacccaatttacaacacctggtaccataaatgatcccaggaaaaactgtcctaagatggggttttggagctggatcat

SEQ ID NO: 60892 - DNA, 718 bp, Homo sapiens
agcaagtctaggattctttttttttgtagcttttttttaatttttaatttttgtaggcacacagtagatgtatatatttatggtgtacctgagatgttttgatacaggcatgcaatgtgtaataatcacatcatggaagatgggatatccatttatcttttgtgttacaaacaatctaattatactcttgtagttatttttaaatgtacaatttagttattattgactatagtctccctgttgtgctatcaaatacaaatgcctattcattcattctattttcgaacccattagccatccccacctccccgtctccaccctgttgtgctatcaaatactaacgcttattcattcattctctttttttggacccgttaaccgttcccacctcccccccttcaccgtcccctccactatccttcctagcctytggtaaccatcaagtccgggattcttgaagccagttttgtcacaagtgcacatcagcatgagagttgctaagcagtgtaaaatgatatttactacatgaaaatacattagctaaaaacagaatatgtgattcttgtgttcagaggatgccaataaataccatgaggaaagcaaagggaatccattatttataatggtaagttacgcgattaataagttaaaaattacctccaacatctgcttttctatatatttgagtaaatatccctttttataccgaaccaaatgt

SEQ ID NO: 60893 - DNA, 1123 bp, Homo sapiens
aaaccaatagcaatcacctagtcacaacccttaggaaagaacagaagcctagaaaaattaagtggcttactcaaggttaagrctatagccaaaagagtcaagactaggactcagattgcctaggttctctcacaatccatgtagcctcccttttgtactatctgacttctccaagtatgactgctttactattttatatttagatggttaatatcctcaattgcagggcctttaaaaattttccttttaaaatttgtctttaacaaacaaatactaaaagtaccaacaagttcaaccaggaaaacaccatttccagttccaatatcaagcactgaagcatccagtggaatcttgtgtttctgcatccaccttattagtcgattcatactctcttctccaaacctgttagagagaatcagtcaaataactgagggatacagagcaaaagtcaccactatattccatttaagctatttataccatatgctcaaactcttatttgaaagtgaaaacatctgtgactgcttcagctttgtctctactgtaatttaggagaaaccacctccaggaatacaacagaatagacaaggtcagtatgttatttactaacatttctctatatcagcattaacagttgtatgtgttggtgtctcagaattttattgtttattgacaaaggacaactatagggtgaaatgctgtcatcaaacgtaaatgtgagatattaaaagagggctcacacccattctcccaacactttggaaggccacggtgggaggactgcttgaggccaggagttcgagaccaccctgggtaacacagtgagaccctgtctctacaaaaaagaaaatttgctgggcatgatggcatgcagctatagtcccagctacccaggaggctgtggcgggaggatcacctgggcccaggaggtccaggatgtaacgagttatgatgatcatgccactgtactccagcctggatgacagaatgacaccccacctctctaaaaaaaaaaaaaaagtaaaaaattaaaaaagaataaaagaagagacatactttaaatctacccactaaagccagacttaatccagggttcccaggatttttaggctttctttgggta

SEQ ID NO: 60894 - DNA, 746 bp, Homo sapiens
caggcacttcttcaagaagtcctctattgaagctaaactgagttaggcccttctgctctgtcccctgagcaccccacagctcccctctcaccttattgtaactctttgtttaatatctgtctttcagataaactataagcactgtgggtacaaggaaggcatcttcccttgcactgctatatgtctagtacccagcccaggccacctggtaggagctcaatatatatttattatataagtgagagatgagatgaatgactgcttctttaatgaaagttatttatcgattatgataaaatacttcatgggcactatttaaggtgaagcccttgaggaaaaccttaaggtcctctacattctaaaactcgttcaatgaatgcattctycataccaaaggagggtgcaagtcttgcacacgggttgctgggtctagcaacttcttttttattttattttttatttttttgagaaaaaagaagagaagaggaagagaagcaaagaggatcaatccttttttgttttttaagacagggtctcagtctgtggcccaggctggagtacagtggcacaatgatcacagctcactgcagccttgacctctcaggctgaagccatcctcccacctcagcctcctaagtagctgggactacaggcttgtgccaccatgcctgacttatttttttattttttatagagccagagtcttactgtgttgagcaggctggcctcaaactcttgagctcgag

SEQ ID NO: 60895 - DNA, 1898 bp, Homo sapiens
tgcatatttgtaatagaaacacatctgaacccattcgtcagtaacagagaccatacatttcagggcttttttttaatttggagtcagtttatcatcgctataaaagcatttcaaaggagaatggagtgcacagagaccctggggagcagtacagggagttcttggtttggacggctgaatggtttggacggctgactgcctggcctcggttgagtcactcccaaggtctggagtggagcactaatgctagtgtttaatctgtcacagacgccttggccttctccgtgagctttcccacctgttccgccgctgggacccgtggctgtctcctaacaaataaaatgtgtgtgttctgtactagacatgtcagttaagtcaagagaggactgggttccatatatagtcatgtttgtggtgttgagtttcttttttaaaaagtcctttaactagagatgaaaaattaggataataactaatgattaactactttatagggtccatatttaaatgatatggaaaatattgttcatattctaggataataggctcagatttctcttcaagaagagacagagacacattttagagtggaggaaaattaggacttctgccctgtttctttccagttttctgatgacattgggaagaaatgaacattttaggttttaagtcctggccagctggttgtggttaaagggaaggttaggctgggcgtggtggctcacgcctgtaatcccagtactttgagaggccaaggcaggtggrtcatgaggtcaggagttctagaccagcttggccaacatggtgaaaccccatctctactaaaaaaaaaaaaaatgcaaaaattagctgggtgtggtggcaggcacctgtaatcccaactacttgggaggttgaggcagaagaatcacttgaacccaggaggcagaggttgcagtgagccaagatcacgccactgcactccatcctgggcgacagcaatactccatctcaaaaaataagaataaataaataaataaagggaacgtctctctacaggaaagccatctgcaaggaaaacacacttgctgaaactctcctggaatagagaaatcactaaattttagatataaattggatgtttatgatccaaattaaaaccaaactcagtgaaggccttgggcctagctatggcattaagattgttcatcccttggatcctgtcttaccagaatcttctggattttctctgacatgcatcactggtgctccttatagttccttgaaaaggtcccccttctcattgctctaacatggcagtgagtcccagattcatctcatttttggaatatcactgggtggtctcattaaaacccatgcccttttctacttaaaaatgaaagccggcccctcccaattaaatctatagctccttttttactgtttgctggacctgagagtcatcttgaagtgtctattcaactttttctctcagaggaactcaaactcaacttgtccaaaattcaaatcttttgcttctttcccttcctctcccctctgttttggtgaagagcatccccacaatcgtcactcagggctcaaacctgagtgtcaccttccacgcctcccctcaaccaccacaagtacatatcaggtcagcaagtctcgtggatcacatcctccttactagcctcacatccaagtcctgtggaccacattggtatgttactctctcctgtttcttcctgcattatcacatggcagaaggagagaaggcagaagcaagcacatgagacagagagaaaaagaagtccaaacgcccaagataactaacccactctcacaatagtggcattaatccattcatgagggtagatccctcatgggtacatgaccagctcttgcatcgaaacccttgt

SEQ ID NO: 60896 - DNA, 1898 bp, Homo sapiens
tgcatatttgtaatagaaacacatctgaacccattcgtcagtaacagagaccatacatttcagggcttttttttaatttggagtcagtttatcatcgctataaaagcatttcaaaggagaatggagtgcacagagaccctggggagcagtacagggagttcttggtttggacggctgaatggtttggacggctgactgcctggcctcggttgagtcactcccaaggtctggagtggagcactaatgctagtgtttaatctgtcacagacgccttggccttctccgtgagctttcccacctgttccgccgctgggacccgtggctgtctcctaacaaataaaatgtgtgtgttctgtactagacatgtcagttaagtcaagagaggactgggttccatatatagtcatgtttgtggtgttgagtttcttttttaaaaagtcctttaactagagatgaaaaattaggataataactaatgattaactactttatagggtccatatttaaatgatatggaaaatattgttcatattctaggataataggctcagatttctcttcaagaagagacagagacacattttagagtggaggaaaattaggacttctgccctgtttctttccagttttctgatgacattgggaagaaatgaacattttaggttttaagtcctggccagctggttgtggttaaagggaaggttaggctgggcgtggtggctcacgcctgtaatcccagtactttgagaggccaaggcaggtggatcatgaggtcaggagttctagaccagcttggccaacatggtgaaaccccatctctactaaaaaaaaaaaaaatgcaaaaattagctgggtgtggtggcaggcacctgtaatcccaactacttgggaggttgaggcagaagaatcacttgaacccaggaggcagaggttgcagtgagccaagatcacgccactgcactccatcctgggygacagcaatactccatctcaaaaaataagaataaataaataaataaagggaacgtctctctacaggaaagccatctgcaaggaaaacacacttgctgaaactctcctggaatagagaaatcactaaattttagatataaattggatgtttatgatccaaattaaaaccaaactcagtgaaggccttgggcctagctatggcattaagattgttcatcccttggatcctgtcttaccagaatcttctggattttctctgacatgcatcactggtgctccttatagttccttgaaaaggtcccccttctcattgctctaacatggcagtgagtcccagattcatctcatttttggaatatcactgggtggtctcattaaaacccatgcccttttctacttaaaaatgaaagccggcccctcccaattaaatctatagctccttttttactgtttgctggacctgagagtcatcttgaagtgtctattcaactttttctctcagaggaactcaaactcaacttgtccaaaattcaaatcttttgcttctttcccttcctctcccctctgttttggtgaagagcatccccacaatcgtcactcagggctcaaacctgagtgtcaccttccacgcctcccctcaaccaccacaagtacatatcaggtcagcaagtctcgtggatcacatcctccttactagcctcacatccaagtcctgtggaccacattggtatgttactctctcctgtttcttcctgcattatcacatggcagaaggagagaaggcagaagcaagcacatgagacagagagaaaaagaagtccaaacgcccaagataactaacccactctcacaatagtggcattaatccattcatgagggtagatccctcatgggtacatgaccagctcttgcatcgaaacccttgt

SEQ ID NO: 60897 - DNA, 692 bp, Homo sapiens
ctcagctggaattcattccttctcctctgcatctgcggagaattttagtctaaccccttaccacagccaactttacttaagtagatggatgcctggctcccttgctggggctgggggtgcccctttctatatccacagaagcacgtagaataggggaagaggaagaaatttctctcctgtttagtcagatccattttccccacctggattttcaaaactttttaattttgaaatgctctgttcaattttcaatctggaatctaaagggatgtgacaaggccgaggtgattacttgggagtaaatgcaaggagagtttcyactgcgtaagggaatggacagcacgtggctgggtaaatttcaaaaaagacaatgctcagagtgagtactgtgttttccagtaagtgggagacttccccaccttaccccaccggagaaaggactctttgccttgaagcccctaggacgactaccctttcttcacctcctcttcctgaccaccccacatcaaagagctgcgtctataattctgtcttgcccagtccatatctctaagaaatccgaaggctgctctattaccatcacaacccatagggaggagagaaaaggtgcttcctagacacagggaccccagaatgagctgcgcaaaaggcaggaggagagaaaggtgggctggaagaaggagaccacggaa

SEQ ID NO: 60898 - DNA, 744 bp, Homo sapiens
aagtactttcccattcaccatgaataatgtggcatattgtatgcattattcaataggttatgtcataattatacaatataatagcaactttattattctacatcaatacatataataggtcctcatccttttaatgaccacatggatatttcatcattaaaataagtagtgcattattgttggaaaaataggttatttccacccttttgcagttgtaaatatactgaagtaaatatctttactcatagattattttgcacctgtgtaaagacagctgtaaaacaacgttcttaaataaccttttctctttctgccatggtaaattatttgtttagtatttccatctttccaaagttgttttcagtaatttataatcataaatatttattattctattcaaaatcatattaatatttttctatttatattttcacatttaatctcattcattacagtctcttctgacttttcagtttcttccaaatgcatggctacttgcctatttttatttattgattaggttggctaatatgtgatctcttattttcttcttgttaatattattaatattgtctttgttactaaaacagctctgggatttatttcattatggaacttttttgattttgtttttctctttttttgttttgttttgttttagagacaagatcttgctctgtcacttacactgtagtgagtaatgcaatccacggctcamtgcagcctcaaactcctggggttaag

SEQ ID NO: 60899 - DNA, 1571 bp, Homo sapiens
cccttaaatggtacaaagagtgttatcacagggatatgttgcataacctaggggaggggcccagttatatgttacaattagcccagggggcagggcacaggcatgagaagaatctcaccacatatgtgctggcctaagtgatacatcatcatccccactgtggacaggtcgcagtaagaacaggagagtcacatcattcttataatggtctcagatatacatcacaatgactcccctgggcagaaagaagggataagagtcacatcacctgtgggctaggcccagagatgtcactcttacttctgtgggcatgtctcaggctggagaggagaatcacattacctaagcactggaccaagaaatacgtcacagtctttctcatgggcaaagtccaggtaagagaatagagccacatcaaatagttcatgggctcagagatatgtcactatgctccctgtgggcagggttcargtaggacccttacattaccttggtgctggttcagcaatatgtcccaatgccttctaaggacagaacaaagacaaaagagtaaaatcattttgatgttttacccatcgatatgtcacaatcatccccgtgggcagaacctgaaaaaagggaagagtcatattagctaaatgctgtgcctagcgataagtcacaattcaccctgtaagcagggactagacagaagatagagttacatcatctggtggctggtgcagggatacgccaccatgccctctctaggcaggatccagacaggagagctatgtcgcctgtgttttcgacccagaaatatgtcacaaacgcccatggacagagcacaggaaagacaggcacataacctgaatatcaggttcagtggtatgtcccaatgcctcctgtgagcattccaagtcaggagaggagactcacattacctgtgtgcaagacccagtgatacgtcacacggaggagtaccactgtcttgcatattgtgtaaactatggtagagaaattgtcaccacagggctcgccacactggtgagattatacttctcagatgcacaccacaccaatattcaggatggtctctatcacacgtggagagagcccactcttgaggtcctgaattacacatgcagacatagtccacaactgggattctgactttcatatgtgaacatccagccacaggtgggatggtgactcatttttaaacgcagctcataggcagttaagaactcttatttggacccatccaagtagaaagatgttgactgtcataccacggcttaaagctaaaggtacaaggaggagtccgtgcctgcttaaggtttcagagagaattgttacactcatgcatactctataaaggcttcatatggtgaagagagtgtcctgctagggcccagaacaaatgtgagattgtgatactcatatgtacactgagccaagagcaaaaattgtcatcttttcacatgaacacagcccaatgttaaggttccgaatctcacacctgttgatctacctgctgatggaatagtctgtcaagagaaagcagagatgcatgagcatcaatctggaaa

SEQ ID NO: 60900 - DNA, 1571 bp, Homo sapiens
cccttaaatggtacaaagagtgttatcacagggatatgttgcataacctaggggaggggcccagttatatgttacaattagcccagggggcagggcacaggcatgagaagaatctcaccacatatgtgctggcctaagtgatacatcatcatccccactgtggacaggtcgcagtaagaacaggagagtcacatcattcttataatggtctcagatatacatcacaatgactcccctgggcagaaagaagggataagagtcacatcacctgtgggctaggcccagagatgtcactcttacttctgtgggcatgtctcaggctggagaggagaatcacattacctaagcactggaccaagaaatacgtcacagtctttctcatgggcaaagtccaggtaagagaatagagccacatcaaatagttcatgggctcagagatatgtcactatgctccctgtgggcagggttcaagtaggacccttacattaccttggtgctkgttcagcaatatgtcccaatgccttctaaggacagaacaaagacaaaagagtaaaatcattttgatgttttacccatcgatatgtcacaatcatccccgtgggcagaacctgaaaaaagggaagagtcatattagctaaatgctgtgcctagcgataagtcacaattcaccctgtaagcagggactagacagaagatagagttacatcatctggtggctggtgcagggatacgccaccatgccctctctaggcaggatccagacaggagagctatgtcgcctgtgttttcgacccagaaatatgtcacaaacgcccatggacagagcacaggaaagacaggcacataacctgaatatcaggttcagtggtatgtcccaatgcctcctgtgagcattccaagtcaggagaggagactcacattacctgtgtgcaagacccagtgatacgtcacacggaggagtaccactgtcttgcatattgtgtaaactatggtagagaaattgtcaccacagggctcgccacactggtgagattatacttctcagatgcacaccacaccaatattcaggatggtctctatcacacgtggagagagcccactcttgaggtcctgaattacacatgcagacatagtccacaactgggattctgactttcatatgtgaacatccagccacaggtgggatggtgactcatttttaaacgcagctcataggcagttaagaactcttatttggacccatccaagtagaaagatgttgactgtcataccacggcttaaagctaaaggtacaaggaggagtccgtgcctgcttaaggtttcagagagaattgttacactcatgcatactctataaaggcttcatatggtgaagagagtgtcctgctagggcccagaacaaatgtgagattgtgatactcatatgtacactgagccaagagcaaaaattgtcatcttttcacatgaacacagcccaatgttaaggttccgaatctcacacctgttgatctacctgctgatggaatagtctgtcaagagaaagcagagatgcatgagcatcaatctggaaa

SEQ ID NO: 60901 - DNA, 1571 bp, Homo sapiens
cccttaaatggtacaaagagtgttatcacagggatatgttgcataacctaggggaggggcccagttatatgttacaattagcccagggggcagggcacaggcatgagaagaatctcaccacatatgtgctggcctaagtgatacatcatcatccccactgtggacaggtcgcagtaagaacaggagagtcacatcattcttataatggtctcagatatacatcacaatgactcccctgggcagaaagaagggataagagtcacatcacctgtgggctaggcccagagatgtcactcttacttctgtgggcatgtctcaggctggagaggagaatcacattacctaagcactggaccaagaaatacgtcacagtctttctcatgggcaaagtccaggtaagagaatagagccacatcaaatagttcatgggctcagagatatgtcactatgctccctgtgggcagggttcaagtaggacccttacattaccttggtgctggttcagcaatatgtcccaatgccttctaaggacagarcaaagacaaaagagtaaaatcattttgatgttttacccatcgatatgtcacaatcatccccgtgggcagaacctgaaaaaagggaagagtcatattagctaaatgctgtgcctagcgataagtcacaattcaccctgtaagcagggactagacagaagatagagttacatcatctggtggctggtgcagggatacgccaccatgccctctctaggcaggatccagacaggagagctatgtcgcctgtgttttcgacccagaaatatgtcacaaacgcccatggacagagcacaggaaagacaggcacataacctgaatatcaggttcagtggtatgtcccaatgcctcctgtgagcattccaagtcaggagaggagactcacattacctgtgtgcaagacccagtgatacgtcacacggaggagtaccactgtcttgcatattgtgtaaactatggtagagaaattgtcaccacagggctcgccacactggtgagattatacttctcagatgcacaccacaccaatattcaggatggtctctatcacacgtggagagagcccactcttgaggtcctgaattacacatgcagacatagtccacaactgggattctgactttcatatgtgaacatccagccacaggtgggatggtgactcatttttaaacgcagctcataggcagttaagaactcttatttggacccatccaagtagaaagatgttgactgtcataccacggcttaaagctaaaggtacaaggaggagtccgtgcctgcttaaggtttcagagagaattgttacactcatgcatactctataaaggcttcatatggtgaagagagtgtcctgctagggcccagaacaaatgtgagattgtgatactcatatgtacactgagccaagagcaaaaattgtcatcttttcacatgaacacagcccaatgttaaggttccgaatctcacacctgttgatctacctgctgatggaatagtctgtcaagagaaagcagagatgcatgagcatcaatctggaaa

SEQ ID NO: 60902 - DNA, 1571 bp, Homo sapiens
cccttaaatggtacaaagagtgttatcacagggatatgttgcataacctaggggaggggcccagttatatgttacaattagcccagggggcagggcacaggcatgagaagaatctcaccacatatgtgctggcctaagtgatacatcatcatccccactgtggacaggtcgcagtaagaacaggagagtcacatcattcttataatggtctcagatatacatcacaatgactcccctgggcagaaagaagggataagagtcacatcacctgtgggctaggcccagagatgtcactcttacttctgtgggcatgtctcaggctggagaggagaatcacattacctaagcactggaccaagaaatacgtcacagtctttctcatgggcaaagtccaggtaagagaatagagccacatcaaatagttcatgggctcagagatatgtcactatgctccctgtgggcagggttcaagtaggacccttacattaccttggtgctggttcagcaatatgtcccaatgccttctaaggacagaacaaagacaaaagagtaaaatcattttgrtgttttacccatcgatatgtcacaatcatccccgtgggcagaacctgaaaaaagggaagagtcatattagctaaatgctgtgcctagcgataagtcacaattcaccctgtaagcagggactagacagaagatagagttacatcatctggtggctggtgcagggatacgccaccatgccctctctaggcaggatccagacaggagagctatgtcgcctgtgttttcgacccagaaatatgtcacaaacgcccatggacagagcacaggaaagacaggcacataacctgaatatcaggttcagtggtatgtcccaatgcctcctgtgagcattccaagtcaggagaggagactcacattacctgtgtgcaagacccagtgatacgtcacacggaggagtaccactgtcttgcatattgtgtaaactatggtagagaaattgtcaccacagggctcgccacactggtgagattatacttctcagatgcacaccacaccaatattcaggatggtctctatcacacgtggagagagcccactcttgaggtcctgaattacacatgcagacatagtccacaactgggattctgactttcatatgtgaacatccagccacaggtgggatggtgactcatttttaaacgcagctcataggcagttaagaactcttatttggacccatccaagtagaaagatgttgactgtcataccacggcttaaagctaaaggtacaaggaggagtccgtgcctgcttaaggtttcagagagaattgttacactcatgcatactctataaaggcttcatatggtgaagagagtgtcctgctagggcccagaacaaatgtgagattgtgatactcatatgtacactgagccaagagcaaaaattgtcatcttttcacatgaacacagcccaatgttaaggttccgaatctcacacctgttgatctacctgctgatggaatagtctgtcaagagaaagcagagatgcatgagcatcaatctggaaa

SEQ ID NO: 60903 - DNA, 1571 bp, Homo sapiens
cccttaaatggtacaaagagtgttatcacagggatatgttgcataacctaggggaggggcccagttatatgttacaattagcccagggggcagggcacaggcatgagaagaatctcaccacatatgtgctggcctaagtgatacatcatcatccccactgtggacaggtcgcagtaagaacaggagagtcacatcattcttataatggtctcagatatacatcacaatgactcccctgggcagaaagaagggataagagtcacatcacctgtgggctaggcccagagatgtcactcttacttctgtgggcatgtctcaggctggagaggagaatcacattacctaagcactggaccaagaaatacgtcacagtctttctcatgggcaaagtccaggtaagagaatagagccacatcaaatagttcatgggctcagagatatgtcactatgctccctgtgggcagggttcaagtaggacccttacattaccttggtgctggttcagcaatatgtcccaatgccttctaaggacagaacaaagacaaaagagtaaaatcattttgatgttttacccatcgatatgtcacaatcatccccgtgggcagaacctgaaaaaagggaagagtcatattagctaaatgctgygcctagcgataagtcacaattcaccctgtaagcagggactagacagaagatagagttacatcatctggtggctggtgcagggatacgccaccatgccctctctaggcaggatccagacaggagagctatgtcgcctgtgttttcgacccagaaatatgtcacaaacgcccatggacagagcacaggaaagacaggcacataacctgaatatcaggttcagtggtatgtcccaatgcctcctgtgagcattccaagtcaggagaggagactcacattacctgtgtgcaagacccagtgatacgtcacacggaggagtaccactgtcttgcatattgtgtaaactatggtagagaaattgtcaccacagggctcgccacactggtgagattatacttctcagatgcacaccacaccaatattcaggatggtctctatcacacgtggagagagcccactcttgaggtcctgaattacacatgcagacatagtccacaactgggattctgactttcatatgtgaacatccagccacaggtgggatggtgactcatttttaaacgcagctcataggcagttaagaactcttatttggacccatccaagtagaaagatgttgactgtcataccacggcttaaagctaaaggtacaaggaggagtccgtgcctgcttaaggtttcagagagaattgttacactcatgcatactctataaaggcttcatatggtgaagagagtgtcctgctagggcccagaacaaatgtgagattgtgatactcatatgtacactgagccaagagcaaaaattgtcatcttttcacatgaacacagcccaatgttaaggttccgaatctcacacctgttgatctacctgctgatggaatagtctgtcaagagaaagcagagatgcatgagcatcaatctggaaa

SEQ ID NO: 60904 - DNA, 1571 bp, Homo sapiens
cccttaaatggtacaaagagtgttatcacagggatatgttgcataacctaggggaggggcccagttatatgttacaattagcccagggggcagggcacaggcatgagaagaatctcaccacatatgtgctggcctaagtgatacatcatcatccccactgtggacaggtcgcagtaagaacaggagagtcacatcattcttataatggtctcagatatacatcacaatgactcccctgggcagaaagaagggataagagtcacatcacctgtgggctaggcccagagatgtcactcttacttctgtgggcatgtctcaggctggagaggagaatcacattacctaagcactggaccaagaaatacgtcacagtctttctcatgggcaaagtccaggtaagagaatagagccacatcaaatagttcatgggctcagagatatgtcactatgctccctgtgggcagggttcaagtaggacccttacattaccttggtgctggttcagcaatatgtcccaatgccttctaaggacagaacaaagacaaaagagtaaaatcattttgatgttttacccatcgatatgtcacaatcatccccgtgggcagaacctgaaaaaagggaagagtcatattagctaaatgctgtgcctagcgataagtcacaattcaccctrtaagcagggactagacagaagatagagttacatcatctggtggctggtgcagggatacgccaccatgccctctctaggcaggatccagacaggagagctatgtcgcctgtgttttcgacccagaaatatgtcacaaacgcccatggacagagcacaggaaagacaggcacataacctgaatatcaggttcagtggtatgtcccaatgcctcctgtgagcattccaagtcaggagaggagactcacattacctgtgtgcaagacccagtgatacgtcacacggaggagtaccactgtcttgcatattgtgtaaactatggtagagaaattgtcaccacagggctcgccacactggtgagattatacttctcagatgcacaccacaccaatattcaggatggtctctatcacacgtggagagagcccactcttgaggtcctgaattacacatgcagacatagtccacaactgggattctgactttcatatgtgaacatccagccacaggtgggatggtgactcatttttaaacgcagctcataggcagttaagaactcttatttggacccatccaagtagaaagatgttgactgtcataccacggcttaaagctaaaggtacaaggaggagtccgtgcctgcttaaggtttcagagagaattgttacactcatgcatactctataaaggcttcatatggtgaagagagtgtcctgctagggcccagaacaaatgtgagattgtgatactcatatgtacactgagccaagagcaaaaattgtcatcttttcacatgaacacagcccaatgttaaggttccgaatctcacacctgttgatctacctgctgatggaatagtctgtcaagagaaagcagagatgcatgagcatcaatctggaaa

SEQ ID NO: 60905 - DNA, 689 bp, Homo sapiens
tgttcgtgaagccaaaaatgttctgcrcaggaaatgctcaaggagagaaggaaacacacacacacacacacacacacacacacacacacacacacaatacctttaagggtaaacaaactgtatcccacataaatggcaatgcagatataataagcaaatgatataataagcaagttgcaatgggacggagagaagggaaaagagatatatatatttacactcatcagactatggaggattcaccaccagactgcgaagcaacagactgggctccagagttggccacttgtccgtgaacagatgagaagagatctcatgaagttttggcacagtctggaaccctagctctttttgtaatgagttatctggcatgacgtccagtcaggagggcccttcatttctgggctcaaggaaaagaaaaaggtcaagttgttttttgtgattgtctgttgtttttcagtaactaacatataggaataaattgaaatagagatttatctgaaacagcgctggatgaaagcctcaaggggctcacacaacctgttccaggacttggtgaccattgtttgagtccagattcaattgagttcaaatttaatatttaaattttactccacaaagtgtcaaaagtaattccttcaaatgcagaaaattatgtaactactcacaaactaaacttctcaaccaaa

SEQ ID NO: 60906 - DNA, 689 bp, Homo sapiens
tgttcgtgaagccaaaaatgttctgcgcaggaaatgctcaaggagagaaggaaacrcacacacacacacacacacacacacacacacacacacacaatacctttaagggtaaacaaactgtatcccacataaatggcaatgcagatataataagcaaatgatataataagcaagttgcaatgggacggagagaagggaaaagagatatatatatttacactcatcagactatggaggattcaccaccagactgcgaagcaacagactgggctccagagttggccacttgtccgtgaacagatgagaagagatctcatgaagttttggcacagtctggaaccctagctctttttgtaatgagttatctggcatgacgtccagtcaggagggcccttcatttctgggctcaaggaaaagaaaaaggtcaagttgttttttgtgattgtctgttgtttttcagtaactaacatataggaataaattgaaatagagatttatctgaaacagcgctggatgaaagcctcaaggggctcacacaacctgttccaggacttggtgaccattgtttgagtccagattcaattgagttcaaatttaatatttaaattttactccacaaagtgtcaaaagtaattccttcaaatgcagaaaattatgtaactactcacaaactaaacttctcaaccaaa

SEQ ID NO: 60907 - DNA, 689 bp, Homo sapiens
tgttcgtgaagccaaaaatgttctgcgcaggaaatgctcaaggagagaaggaaacacacacacacacacacacacacacacacacacacacacacaatacctttaagggtaaacaaactgtatcccacataaatggcaatgcagatataataagcaaatgatataataagcaagttgcaatgggacggagagaagggaaaagagatatatatatttacactcatcagactatggaggattcaccaccagactgcgaagcaacagactgggctccagagttggccacttgtccgtgaacagatgagaagagatctcatgaagttttggcacagtctggaaccctagctctttttgtaatgagttatctggcatgacgtccagtcaggagggcccttcatttctgggctcaaggaaaagaaaaaggtcaasttgttttttgtgattgtctgttgtttttcagtaactaacatataggaataaattgaaatagagatttatctgaaacagcgctggatgaaagcctcaaggggctcacacaacctgttccaggacttggtgaccattgtttgagtccagattcaattgagttcaaatttaatatttaaattttactccacaaagtgtcaaaagtaattccttcaaatgcagaaaattatgtaactactcacaaactaaacttctcaaccaaa

SEQ ID NO: 60908 - DNA, 689 bp, Homo sapiens
tgttcgtgaagccaaaaatgttctgcgcaggaaatgctcaaggagagaaggaaacacacacacacacacacacacacacacacacacacacacacaatacctttaagggtaaacaaactgtatcccacataaatggcaatgcagatataataagcaaatgatataataagcaagttgcaatgggacggagagaagggaaaagagatatatatatttacactcatcagactatggaggattcaccaccagactgcgaagcaacagactgggctccagagttggccacttgtccgtgaacagatgagaagagatctcatgaagttttggcacagtctggaaccctagctctttttgtaatgagttatctggcatgacgtccagtcaggagggcccttcatttctgggctcaaggaaaagaaaaaggtcaagttgttttttgtgattgtctgttgtttttcagtaactaacatataggaataaattgaaatagagatttatcygaaacagcgctggatgaaagcctcaaggggctcacacaacctgttccaggacttggtgaccattgtttgagtccagattcaattgagttcaaatttaatatttaaattttactccacaaagtgtcaaaagtaattccttcaaatgcagaaaattatgtaactactcacaaactaaacttctcaaccaaa

SEQ ID NO: 60909 - DNA, 651 bp, Homo sapiens
ccctcaggcatctctgtaggggccctcagctcaygtaaggcagcaggggagggagtcattgccccaccctcccaggggcacctgaggggaacgctggagttctgcctcctgcagccctttctcccggagtctcattccagaccagcagagcaggcgactcaggccggagctggagggccctgaccaggtcacgggggccttgaatgccaggccagtgggtttggatgtttttaagagcagtaagaaccactgagaggtcttaagtgaaggcgtgacatgagttgctgcatggtttctaaaaatccctctggctgcagagtggagaagggttgtcggggagagaccatggggcagtggggggtacaagagcacaaagcaggggttggcaccaggcgtggagggaagccgggccctgagagagctctagaattggagctggctaggggagggcgatcctggaagggtggggtctggaggagagtggggagagccacgtgacttgagtatggggtcatccagggaagggggttccagaggcagccgagcaggcaagcctggagcccaggaggacttctaagcccaacatggggtctggagtccaggagaagggtggccacaaccgtgttcaccaccctgcacaattctcctccc

SEQ ID NO: 60910 - DNA, 651 bp, Homo sapiens
ccctcaggcatctctgtaggggccctcagctcacgtaaggcagcaggggagggagtcattgccccaccctcccaggggcacctgaggggaacgctggagttctgcctcctgcagccctttctcccggagtctcattccagaccagcagagcaggcgactcaggccggagctggagggccctgaccaggtcacgggggccttgaatgccaggccagtgggtttggatgtttttaagagcagtaagaaccactgagaggtcttaagtgaaggcgtgacatgagttgctgcatggtttctaaaaatccctctggctgcagagtggagaagggttgtcggggagagaccatggggcagtggggggtacaagagcasaaagcaggggttggcaccaggcgtggagggaagccgggccctgagagagctctagaattggagctggctaggggagggcgatcctggaagggtggggtctggaggagagtggggagagccacgtgacttgagtatggggtcatccagggaagggggttccagaggcagccgagcaggcaagcctggagcccaggaggacttctaagcccaacatggggtctggagtccaggagaagggtggccacaaccgtgttcaccaccctgcacaattctcctccc

SEQ ID NO: 60911 - DNA, 813 bp, Homo sapiens
agacagatggttttagtattaatggcatcaaccatcctttgctggaagataaagagtcagactttctatttggaatgtaagctccttgagggcactgagcttgtttattcaaccttctattcctagtgcctagaacagtgcccagaacactgtagaagaagatgtgttgattaaaggaatgaaactttcctatagggactctcaagagatagctggcctaacttagaatagaaatgtgtgtgccaaggactcgtggtttcaagaaacagatactcaagtgggtgtggacacatttccaggatgttctccctctcacatgtacccaaccagaccctcgggccttgtcctttctgtctggttctagggaaaaagcccattgcctgtgctttctaaaataataaatctcacattcacaaaggatctggtttctgcatgtttttctgcatgttccaagctccrgccatgtgcaagtgatattaacaaatttatttatgatttgttcgtatcctcctccttccagagattggttgaaatattaaactgttcatttctattcttcacttcctttaagccttaattggagccacttcttctattggataaacgccttccctggttggcctcgtttctctcaggtcccttgtttcactttgtgtttcctcagttgccagtaggctgtgctgtgatgctttgcatttatttggttatatcatgtatacatttattctgtgtcctctattagatactcttgtcgttttttaagctaacattcattgaggtttattgtgtgtcaggtcctgtgtttagggcttt

SEQ ID NO: 60912 - DNA, 813 bp, Homo sapiens
agacagatggttttagtattaatggcatcaaccatcctttgctggaagataaagagtcagactttctatttggaatgtaagctccttgagggcactgagcttgtttattcaaccttctattcctagtgcctagaacagtgcccagaacactgtagaagaagatgtgttgattaaaggaatgaaactttcctatagggactctcaagagatagctggcctaacttagaatagaaatgtgtgtgccaaggactcgtggtttcaagaaacagatactcaagtgggtgtggacacatttccaggatgttctccctctcacatgtacccaaccagaccctcgggccttgtcctttctgtctggttctagggaaaaagcccattgcctgtgctttctaaaataataaatctcacattcacaaaggatctggtttctgcatgtttttctgcatgttccaagctccagccatgtgcaagtgatattaacaaatttatttatgatttgttcrtatcctcctccttccagagattggttgaaatattaaactgttcatttctattcttcacttcctttaagccttaattggagccacttcttctattggataaacgccttccctggttggcctcgtttctctcaggtcccttgtttcactttgtgtttcctcagttgccagtaggctgtgctgtgatgctttgcatttatttggttatatcatgtatacatttattctgtgtcctctattagatactcttgtcgttttttaagctaacattcattgaggtttattgtgtgtcaggtcctgtgtttagggcttt

SEQ ID NO: 60913 - DNA, 739 bp, Homo sapiens
tcagacagaaacctctaggcgccgcggttgtggcagtctggctgtgtctccagcatgcctggtaaattggtgggctcagagtcatgttcaataagcatctaatttaactttgttctccatgttaacctcagaatttgtacaaaatgaactcatgggtttgaatggcttgccagcagtgaaaattgtgattcctgccatttattcagtgtcaactgcatgccaggctctctactgggcacttttctcatatgatctctaatttctcayaacaattaatcttattttccccattttataagtgaggaacgtgtggctgtatattcaagcagatccattctcattgcgcatgtgttagcaaagggaagttttgtcttcttccagggcacgtgatgtctgaggcaggtgcaaggactccatggcaccatcagtgcccagggttccatctgtagtttgctcagctggtactacttagcatgtggctttcatctgtgtgggcactacctccagcctcatgttctaacaggtagaggaagcaggaagtgacagagaaaaagggctgggctcctatcaggaaggcaaagcttacttagaaatcctggcaggctctagccccactgcattgaccagtgctgttcacagggctctgcctagctgcaagggaggcaggaactgtaatttttaactactgacccaaacaacagaaacttctgttggtaaggtagacacagagaatggacat

SEQ ID NO: 60914 - DNA, 668 bp, Homo sapiens
tccttttatctggggtcccctctggatttggaagtatcctaatagccagccaggtgtgggatggaccatggcatctagcrgtctttgggaacagcaactctttcttttccatgccacagcctgtgcactttcctaatgagcccctagggctctgggcatggagaggaaacaggaggctttgtccctgcctttgcagaatgttcggtctgatggaaatctacttttgggagatgcccagcctaaaaataataggcaatacaaatactgccaatccctatcatttatgacacgcagagtgtcaggcatggtgctgaacacttagtagctcatttgaccctcataatctcccattaggtggctattgtctttttatttttcttcagatgagaaccttttatagataaggaaattgaggttcagagaagctaagtgacttgcttaaggttgcacagttaaaaagtggtatgatagggctccagtgctcgcactctgaactactactccaatagctcacaaacgtaggtgtgcaagaattccccaggaactccgtttaaaaatttgattcctgggcccctcgtcaagagagtctgattcagtgagtctggagtagagcccaggaatctgtatcccaaataggcaccccccgcaaattagaggcatgtgccctg

SEQ ID NO: 60915 - DNA, 513 bp, Homo sapiens
catgaaatgagatatcatgatgcctgctccccagagggttgtgtagagcattacmtgtgatgatataagcagagcacttagcacagggactgtacaaagccctcaataaatgacctggggtctgtcccaaatgtggatggtttgtacttttaaattcccacacattccaggagagcttgtgtttctctggactgcctgtatgtttggatggcagtaaacaggcaagaagaaaactgcactacctccaaaaagaagtggaagaagagctaggtcctgggtcatgggttttaccctcccctggccctgtccttattctggctgctggctaccaagtgaccagcacagaccttccaggagccaggctgcccctagaacctgactgggaccagcttgtaagctggggccagggctccctggggtgagtggtgtgaactggggggtgggctgggccaggtcctcctgaatctgggggtggctgcagctgagggaggctgtggcgaggtcagccctgtg

SEQ ID NO: 60916 - DNA, 478 bp, Homo sapiens
tttggagtttagaatgaagtctgtcttcagaaagaactcacagttattgtgacattattaaatttgttttctgcaaatagtttaatgtcatgacaacaaaaagatctcttgatttgagaaaatcaaagctatctttgataacactaccaaactccaaaaccaaaagtttctaatgctttaatatccctcaaaatgctttagaaaaaatatatcacaaagacttttagccaataagatcatcattgttttcacagaaagcatctgttaataatagcttacatgaactgtattgctttagcttttaaagtaatattcaatagtattagaattacagacttagaaaatgctgtgttataattgaggtagtgaattaccagggataaaaaagtggattattagggctactaaatgagcagagtagtagatttctgcttctgaattggttgagtgatctagtccrgtatgctagcttctggta

SEQ ID NO: 60917 - DNA, 626 bp, Homo sapiens
attcatttaatttgctaatttcacccttagaagttgtttaatgccagccaacatttggaatttttatctgcactttgcaaagcaaatgacatagtaaaatacattaatataggcaaatatctaattaggcttaaaaagttagattctacatgtaacaaagatttgcactcttaagaacaaagtagctgttgctcctttagaaattttattaactgtcttccctcattgtgtgaaggaatactttaatgaggttctcatctgtttatgaaataaatatttgttgagtcacagaggatatgaagacatggtccctgtcctcacaaaagtctcagtctagtggggagaccaacctgggtcaatacacctgtgctatgggacaggtwtatagaagtgttgtggaggcagaggggagggcttcttatcacacttggaagaaaagggaggtcagggaaggctttctggagcaacagagataaccctgcagttttacagaggaggaagaaacacactgggtatgttgagggatagtaaatggtattatgggtggggggcgggtgaaggaggcaaagcagaaaaaggctgaggtcccagacaagtggctagagtcagtccaagaagtgtggaca

SEQ ID NO: 60918 - DNA, 998 bp, Homo sapiens
attcagaacagtaataggcataatagtgamctgaatgtctataaatggggcagtgtttgaaaaactgtggtatatagacacaactgaatatgtgcagcagttgaaatatggtagacacaggtaaatagcaattagcctgagcagaataatattaagtggagaaaagctagtgccagaagattacatgcagcatgacaggctttttatacaaataaaaacaacttgaataaaatatgtacttcctaggaaagcgcatagataagatgaaactatatatctaaaagaaaaagataaacacagacttctgaatatttttctcaagtagaaggaggcaggaggataggaggtgtacagatcacatggaagagtataaattatttcaagatcctagttattctattaaatgatgggttcatggatgcttaccacattttaaaatcatgagattgactacacatggaccatgtgtgcaccagtggtgacagtgtgtcacaaataagcaattctttgcacccaagattcagtaaaaattaaataatataaaacgcgaaaaatataaaggtggtcaattttcctatgaggaaggttcttatgaacaaaacaacaattgcaaaaagcataaagatattattgtcacctaaactatgactacctaaaatttttaaaacttttcatatcaaaaaacataatttaaagtattaaaagctgaacaaattaatagaaatattttaaatctgagtgttgtggcacttagggaggctgaggcaggaggatcactttaggctaggagttcaagaccagcataggcaacacaggaaaccctgtctctacaaaaagtaaaaaaaaaaaaaaaaaattagctgggtgttacggtgtgttcttgcagtcccaaccacttgagaggctgagatgggagtactgcttaagcccaggagttaaaggctgcagtgagctatgatcacgccactgcactctagcctgggtgacagagtgagatc

SEQ ID NO: 60919 - DNA, 729 bp, Homo sapiens
aattataatgtataatctatacattataatgtaatatataaactaaaatttatggcacaaaagataaatatggctttgaaattaaagatattccactcaacagacaatatttcatatttgatattacaatcatttattttatgtcctattataataaaaggtgaggactccttgtaaaaaaggaaatgttccacagagtcaatctaatatatcagatattkgagattctatcttggtttctcttcctttacttagcctataaaactagttaaaaatggaatttcttttagcaattcagtttagtacaggagtgacattaactaatgacaataaattaaacaaagcctacattagttcaatttaagcctattcaacagaaatatagaaatatagtagctaaaaaaatactctggggaaggtaccacaaacattatctaccagggaacatagcataaattagtctgaaatttcctgagagtgactttgtcttagaacttaggtggtagtcatgaagagataatgtttttaggcagttaaaatacttctagaactccatctattttacctgtggtccactttcctacattgaaccaatgccttgggcttctctaattactatacattgtgctcatatgaataaaagaaattttaaaagaaaaaaaatcagattcaatataatcttgcttatcatttttatgattattaggaatcaagtttaaaacaattagt

SEQ ID NO: 60920 - DNA, 1713 bp, Homo sapiens
cagaaagagagagagaaaaggctgggcatggtggttcatgtctgtaatcccagcacttcgggaggctgaggtgggaggatctcttgagtccaggagttggagaccagcatgggcaatatagggagaacccgtctccagaaaaaaagttaaaaatgaagaaatttagctgggtgtggttgtgtgcacctgtggtcccagctacttgggaaacagagatgggaggattgcttaagcccaggaggtggaggttgcactgtgctataatcrtaacactgtggttgagcctgggagacagagcaagaacctatttcaacaaaaataaaaacaaaaaagggagggaagagagagaaatataacaatataatcaaaataataacagtgcctaactttgggtggtaggatttagttttttattattatttagctaccaaaaaaaaaaaaaaaagaaaaaaagaaaaagaaatcttcttgaaaaactgcaatggctaccactgcgtggtgctttggggtaaatactgttgtttggctgacccagcatttattttcaccctttcttcccgcagtaccttccctcttcagattggaaaaggaaaacactttcccagctttccttgcaactagagtgaccatgtgacacaattctggtggtaaggcaaagtgaaaacgtgtgggggcccacaggaacctaagaaggctcttcagtttgttgtctagtgaagcagcagccaacactccatcactgatctcacaggcataagggaaaaccaaaggcattccggagatgccagtcctgatagcatcaagccttgacactgaggcaagcagaagtctacttgtgagaaaaattaactcctccttgtttcccatttgtatggtatgtaagtacttgcagctaaaattattcttaattgatgaggaatgaaaaaataacatcaccttttaacccctccatcattccaaatgcccagagtttattattcaggaaagcacttttatttcttcctctttctgtctctgtctctgtctctatctctctttcacacacacacacacgtgtatatatgcattaatgtatgtgcacatgtacatatatttatctaccttgctttctgaaaatgaaaatatatatttaaatttttccttctataacttgtttttattttaaaagtaatggcatgattatctttattggttcatgtaattctatcatattctttttaacagctttattgagatataattcatgtagcataaaattcacccatttaaagtgtgtgattcaatgttttttgtatatgaaaagttgtgtaatcctcacaattggtcttagaacattttcatcaccactctccaagaaaaccctgcattcatgtgcagtcacttcccatttccccccaactttccagccctaggcaaccagtgccttattctttataacagcagcttagttttctgtagctggatttaacataaatcaatcacttctctactgataactatgtaggtcatgtgcagtttttcatcattacaaataatgctgtgatgaacactcttattacctcctcctttaccctttattacatggcttaacttttctacttgcatatattcatctttagaatcagggaaaggaatctattgacactaggaaatgcaggttgtggcctacagagaggcacttagtggcaatgactcagctgggggctggatcca

SEQ ID NO: 60921 - DNA, 516 bp, Homo sapiens
ttcaccaatcctgctttaagcgtttcagggataggattcatgtccctcactgaatttggcatcttcacaaagcaacagaacaagttgaagagatgttcatgtaagatctggataatattatgtcttggactttaccctctagccttatcaagaaatactcataaatgtcaatccatragaccataattcaccaagacaagaaacatgattgattagatagaaattatgaagaaataggccttgaaactccttctaataagcaaggagatacagacttccattattttctaacagtttttctttagttcaataaaatcttcctgggaggacataaaatccattgtcctttctaaacccacagcttattataagccacctattagaacaatacagataagttgggtgtctcatattacactaagcattttaaaccaaagatattgccactactagtttgcatttgtaaaagcagaacaataatagtaataggagttttgctgttgacatttctttaaa

SEQ ID NO: 60922 - DNA, 1538 bp, Homo sapiens
cattcactctgccaccataattttaacataaaacactcctaaactgtgtctgagacgattacaaatttctttatcttgcagtaaaagtaaaatctcaaaacttttacaattcttaatagtatttaggttaccctagccaagtgcaggcctaggaatgctaggaatgtcctagatgcaaatagttttttggtgaatggttatttatgcagaatattctggcccaagctgaaaatggcttttgattgtttagaaaggaaattacagcatttaaaacatattaaagtttaaaataacatttttgagcaattaggatataaaagaatagatggggaagaaattagttaaattgcaagacccgtaaacaaaactaacactactcatttcaattcagttcccagcctaagaaaattttcatttcagcaaggcttttcctgtcttttagactactggaaaaaatggttggttcatttcacatgaaagtaatggaccctggctttggtctagtattaataatgtagatgacagtgtgaggcaacactgggtctgggggttattccattggcaaatatgtatgaaaaacacaggaatatttattctgctgaactatttttataagcctgttatggcttctaaatcatcaagaggaaggttcctttacttgctactcttcacatttccaaaccctcccggtctttgaatagttgttgctgttcaaagtgtaggagtatatggaagagcaacatggatatcacctgggagctcattagaaatgcagaacttaggccccagacctgctgaagcaggatctgcatggtaacaagatcccaggccattcacaatcacaagaaagtcccacaggtgaccatctgcagagactgtctctaataattttggcccgcaatgtttaatgcctcttttctctgaacttttaccttaccttctgtctgctctatataatttagcagttgattatatgatcttatgtttcttaataattactggaggtatgcaaatcttatttacaagattatgcaagtctctgttacggaggtttgcaatcaatgctcattattccattgtttgttaaagccctattctattcctttctgccttatgttccaaaacattttgaggtcaggtttaggaaaaattataaaaaattatcctaatattaataaaagtaaatacatgctttagaaagaagctgttaataagagtggaagactgtaaataacttcatatatagtttttgttttcttatgaatgccaagacatgaaagtaaactgtgctcttggcaaatggtttagaatataaccaatccttgatttttcattaaaatcatatctgtagcctgtaatcccagcactttgggatgytgaggcaggaagattgcttgagaccagaagtcagagaccagcctgggcaacatagtgagatgcgtctctaccaaaaaaagtaaaaaaaaaaaaaaaaaaaaattagctggatatggtagtgcatgcctgtagtcctacctactcaggaggctaaggcggga

SEQ ID NO: 60923 - DNA, 882 bp, Homo sapiens
taccttagttctctccctctccagtcccatctctgtagaacatatggaatgttctttgtaaagtatgtcccccccaaaccccaaatattcttcccaatgtcaccacacagattgatctggttcaatttttatgtaacagagtcatgagttgtttgtcagttgccatggacccccatgttgaaggccacgtaactggagcattcccagagaaacaaggcaccagtggaacctaagtggtcaggcagaggagtgggactgaattaagaagccaacagggtataccaggatccaggatccaatcatatcaagcctrgcatctctccatggcagaatccagtcagatcatgcctcccagcaaaacctaattgcaagatccagtcagatcgcacctcattacctatgcttataaagctccaaacccagctcagagagacagagttgagcatttcctgctctcttctgtccaaacagcaatcaaacttccttgctgcaaaaactcagtgcttgggtgtttgactttccgttgtgtaggcaaattgatccagtttggttcggtgacagtaaaatccactagacagaattccatcttcttgacaaaatgcctaagttcctcactcccttccagcccctcagcccactatgctgattctcatccccctctctccactccagcgactctgcattactacaatttcctctctgccaaagcacctcacctctcaggcattcatcgtttcattcctgccagtggctgccttccacaacccctcttctctggacttactcctatgtatcttttaagaccctccatctgggctgctgaatgggtcccctggattccctggggcacttcctctgctccctccctgggtcatcgtgcca

SEQ ID NO: 60924 - DNA, 538 bp, Homo sapiens
tcctttcttccattccatcattccaggtgtccttcctttcagtgaaaatgttctcatcagggtcactaataaatttcacttgatcaaaactcatgggaaatttgcaatgttcactatacaggcctttcagcagcatttgacacagactttgtcatcacttttttaraaaaggctctgtgggctcagctgtcatcgcatcactccctctggctttcctcctgtgttgttccttcttctccccagttcccagaaaagttccggctcagtctgattctcccattctcactgcactcactgctctgaagctgcactatgtgctgatagcttcctaatgtttacatctcctgtcccaacatttcttctgcatggtattagcatgcacaactgcctctcgacctccatgcatttgaataccagctattcagccttgacatcccccaaactgaacacttgtttgcccaaacccctcaagtgtgttcctacctccaggtcctgagaccataaatggctttccccagttgatgatattgagagcttt

SEQ ID NO: 60925 - DNA, 538 bp, Homo sapiens
tcctttcttccattccatcattccaggtgtccttcctttcagtgaaaatgttctcatcagggtcactaataaatttcacttgatcaaaactcatgggaaatttgcaatgttcactatacaggcctttcagcagcatttgacacagactttgtcatcacttttttagaaaaggctctgtgggctcagctgtcatcgcatcactccctctggctttcctcctgtgttgttccttcttctccccagttcccagaaaagttccggctcagtctgattctcccattctcactgcactcactgctctgaagctgcactatgtgctgatagcttcctaatgtttacatctcctgtcccaacatttcttctgcatggtattagcatgcacaactgcctctcgacctccatgcatttgaataccagctattcagccttgacatcccccaaactgaacacttgtttgcccaaacccctcaagtgtgttcctacctccaggtcctgagaccataaatggctttccccagktgatgatattgagagcttt

SEQ ID NO: 60926 - DNA, 755 bp, Homo sapiens
ctcctgccacttattcttcaccatgatgtgttcatgtttttctgcctccctagactttaagggtgtgtgagcagagaccattttgcattcactgcagaagaggaagacgatgtaaagatggatgagcccagtcaccagggtaccatgggtctcaggctggcagctatgagccagagtgcttcactagctcagcaaatatttacacagttcctacaatgtgcsagctgcctttatcctaagtgctgggagtacaacagtgaacacagcaaagtctgcaccccagttgggaggaactcatgatcacatgtgaaagaaagcatgtcagcagataggacacagagaggaagtggatggaatggggccttgatggatgctcagacatgaagacagacacctccttgactgacacagaaagaaggccgagctcatctgcaataaaaacaccaacaaagaaaatgcgaaggtcacggaaggattataagtttgcatctgtccgtccgaggtggcagcagagccactgagtccaggaccaggacttggtgtccttgagctggagagtgagcagtgagggacagagtcagcctgctgccaccatcccaccctgacagagagtgcccctccatggaaacaaagggtgtgtgcttgaccccaggtgggaagaggcagaatcaagcagattaaaaagtccttgggagcagaattcctgcacttggcttctgtcccagacttacttctaagttgggccactttcaacc

SEQ ID NO: 60927 - DNA, 755 bp, Homo sapiens
ctcctgccacttattcttcaccatgatgtgttcatgtttttctgcctccctagactttaagggtgtgtgagcagagaccattttgcattcactgcagaagaggaagacgatgtaaagatggatgagcccagtcaccagggtaccatgggtctcaggctggcagctatgagccagagtgcttcactagctcagcaaatatttacacagttcctacaatgtgccagctgcctttatcctaagtgctgggagtacaacagtgaacacagcaaagtctgcaccccagttgggaggaactcatgatcacatgtgaaagaaagcatgtcagcagataggacacagagaggaagtggatggaatggggccttgatggatgctcagacatgaagacagacacctccttgactgacacagaaagaaggccgagctcatctgcaataaaaacaccaacaaagaaaatgcraaggtcacggaaggattataagtttgcatctgtccgtccgaggtggcagcagagccactgagtccaggaccaggacttggtgtccttgagctggagagtgagcagtgagggacagagtcagcctgctgccaccatcccaccctgacagagagtgcccctccatggaaacaaagggtgtgtgcttgaccccaggtgggaagaggcagaatcaagcagattaaaaagtccttgggagcagaattcctgcacttggcttctgtcccagacttacttctaagttgggccactttcaacc

SEQ ID NO: 60928 - DNA, 755 bp, Homo sapiens
ctcctgccacttattcttcaccatgatgtgttcatgtttttctgcctccctagactttaagggtgtgtgagcagagaccattttgcattcactgcagaagaggaagacgatgtaaagatggatgagcccagtcaccagggtaccatgggtctcaggctggcagctatgagccagagtgcttcactagctcagcaaatatttacacagttcctacaatgtgccagctgcctttatcctaagtgctgggagtacaacagtgaacacagcaaagtctgcaccccagttgggaggaactcatgatcacatgtgaaagaaagcatgtcagcagataggacacagagaggaagtggatggaatggggccttgatggatgctcagacatgaagacagacacctccttgactgacacagaaagaaggccgagctcatctgcaataaaaacaccaacaaagaaaatgcgaaggtcacggaaggattataagtttgcatctgtccgtycgaggtggcagcagagccactgagtccaggaccaggacttggtgtccttgagctggagagtgagcagtgagggacagagtcagcctgctgccaccatcccaccctgacagagagtgcccctccatggaaacaaagggtgtgtgcttgaccccaggtgggaagaggcagaatcaagcagattaaaaagtccttgggagcagaattcctgcacttggcttctgtcccagacttacttctaagttgggccactttcaacc

SEQ ID NO: 60929 - DNA, 3823 bp, Homo sapiens
caaacagacatctaacgtgataaacccacagacgctgaaacaacaatgacacgtggaagcccctgtgtcattcctccaaggtcacacatttacactgctactggggctttagtgtcctcagccaaagcaatgtggtcaggttccctgctctcatcatttatatttcacatgtgatgtaagcgacactcagaagggcttgtcccagatcacacacgcacagtcaggaagggagggagaagccctgagcgcaggtgtcctgcctccctgtgcaacgttctttccattaaagcattctttccattaaaattgcagggaggaaggaaactcccagggcaaccgtggacagcagtgcactagaccacatatgtccaagaagaccaggtccctctgtgactttatgatgacctgttctcttcctcggaatagagaggaaatttagttattagcttagaaaacaaaaagctgaaaaaaaaaccatttcaattatgtaaaaatcaaccaatgtttcaaaaggcttccctgtgcccatccatatactgcagggactgaactggaggctgcaacttccctccaactctcaacccaggaccccggaacttcaccgcaccatctcaagtgtctatccccactcccaaagcctcactctcatggatactgcgggctgcttcccatcaaagtgtagacccacataaacaacgtggaagcacagaaaaatgattcccaaacggtcattttccacatgggtctgtaggtctttctcggtgcaagtgtgctgtggcacccactgcagacaccaacgcccgaatggtggcaatgctttctccaattcctggtgctaacatctgagcataccactggggattctcccctacgtcgataatgagcctgagagtccgtgaataacttcaagagtatcccctctgcaccccaacaggccttctcgtagtcattaaaaatatagtaacccatcccaaggcaatgtggcttttactcctctctcggttcatgtcctgtcatccaaatagtaccatagcccttatttattaagaagtcccattttctgggtgctcctttgaaatttgaggatcctttccacataaatttatcctgaattgtgaattccaaacaactttaagttaaatgtccaatataacttatgggcagaaagcaaactgggtgggaggcagtgaggggctggatgggtcccctgcacagccaccccacgtgtgtgcagcgactttgcatgcagctgagatccagtggccaaaggtcaagagtgccttgctcactctgacaacagtatgttttaacagaacatttgggagctttttttgtgaattactgcacactttgagctagtttataaagacagaataagccatacacctacaaaaagaaggtaaggcaacagaggtaaaaactgacagcagcagaaaagaatttcaaactaaatgaaatgttttcaagccaggcagatctccatttgacacacagccccatcactcactaccactgtgattaggaatcaaccactgtacctctctaagcctcattttctttgcttgtaaaatgaagatgataataatatacctgccctcagggctgctatggggattatctattcttctagtttggcccatgatataaacgcagcattaaaaagtgccttaaatatactttcacaacatcattcttggtgattgcacagtattccactgtgttatgtactttaaattattaaatgaacctcctcttgttgaaatctaggctatgttaaatgtattgatattttcaacaacactgagattaactctttagatattcaccttctggcatgtctatgatttttttaagataaatatctagaacttgaattgtggactcaaaggaaagatatatgttgccaaatcatcctctagaaatgttataccactttgctctccaactagcactgtaactacttaaaaataatttttagctgacttcactccctaggatgggccttggacctctctggatagcctgtttgttttgttttgatttttttaactgtgcttttatgaccaccagagttccactggtctcacctctcagctgctgcagtggctgcggcattcatggcaaagtgtcggatggtgctctcctccaggtacttctgctcccactttgtcatgtcggcctccagggccaggatccgctcctccttctcccgcacaagttccaggagggctggggcattgtattccggcatgttggctggctggccatttccatgtttctgaaggagtagaaaaaaaatcttgatgctcaaaaccacatcaatgctgtctacacaactgcccatacagaacacatgaggttccccagatcctgcagcaattcacacaccatgctacttcacctccaaattcctctgttgtagttaattctcatggcgctctgcaaaacgacaatattatcccagttttacagatgagaaatgaagtttctgatggattaaattaatgatgcaatgtctctcagcttatcagtagtagggtcaggattcaaacctgggtctatctccacaggtcaaggtctttgcatgacaagaagtggcttgtctaatggcatgcagttaattacaccaaaagcaagaataggaattaagtcttggcctcctggtctagggtactttctccagaattccacaaagtgattccagttgtttgtttccgctaaggctggtgggggaaatggaaggcaaaggaagtgggagatgccccaaattgcatcctccctagctgcaatgctgggaaaggaggtattcacacctgccccactcagaggcctgagaatgagaatcaaactagataatgcatatgaaagcagaagacctctagcataaggcaagctcatttttcggccttttcatctgtgtcaataagagaaaataaagccattttctggattgctcacaaactgaggatgttcatacttcagaatctttttcctttaattaggtacactatttcctctaaagagcatgacacagaagaagatggcgctctgagaaagttctgccttcagagcagcagcagagataagtyatcttggagtctcagggttaggggcccagtcagagtgtggaccaggctccttagtactccagggagaatgatttcatcccagttagtctatgtcctggggtacacattcccctcctgttttccagtggttgcaaattttaaatgcagagctgggtgcaaggtgagaggcacatgaatgctttacccagaaccacataatcccctagattaagaaaaggactggggaattacccagagcaacagctgggcattcaagctgtactgacggaaactaatcctatcagagaggaaaaaagaaatgggtgtatgggttttttgtaaaccaaattttgtttttattcagttttttaaagctacaaatataaattattctaggaagtgttatcttgccagtgaccaacattataagtaggaacagagcagaagggcatacctgtcctcacctgacctgtgcataaagggcactgactccatctggccaggcacctagcctcaggcaggagaacaaatgaaccagtccagcgagatgagacgctcccttatttttagaaactttccaagaaaagtctcccatattcactaagctgccatctatgcttgtcagtttctatctaaatcccttttgttaccatctcagctggcttatttttgcagaatcctcttaacctcacgtgagatcatgacaactcttcatagccccccctaattcaggtcattaagagttatttacataa

SEQ ID NO: 60930 - DNA, 3823 bp, Homo sapiens
caaacagacatctaacgtgataaacccacagacgctgaaacaacaatgacacgtggaagcccctgtgtcattcctccaaggtcacacatttacactgctactggggctttagtgtcctcagccaaagcaatgtggtcaggttccctgctctcatcatttatatttcacatgtgatgtaagcgacactcagaagggcttgtcccagatcacacacgcacagtcaggaagggagggagaagccctgagcgcaggtgtcctgcctccctgtgcaacgttctttccattaaagcattctttccattaaaattgcagggaggaaggaaactcccagggcaaccgtggacagcagtgcactagaccacatatgtccaagaagaccaggtccctctgtgactttatgatgacctgttctcttcctcggaatagagaggaaatttagttattagcttagaaaacaaaaagctgaaaaaaaaaccatttcaattatgtaaaaatcaaccaatgtttcaaaaggcttccctgtgcccatccatatactgcagggactgaactggaggctgcaacttccctccaactctcaacccaggaccccggaacttcaccgcaccatctcaagtgtctatccccactcccaaagcctcactctcatggatactgcgggctgcttcccatcaaagtgtagacccacataaacaacgtggaagcacagaaaaatgattcccaaacggtcattttccacatgggtctgtaggtctttctcggtgcaagtgtgctgtggcacccactgcagacaccaacgcccgaatggtggcaatgctttctccaattcctggtgctaacatctgagcataccactggggattctcccctacgtcgataatgagcctgagagtccgtgaataacttcaagagtatcccctctgcaccccaacaggccttctcgtagtcattaaaaatatagtaacccatcccaaggcaatgtggcttttactcctctctcggttcatgtcctgtcatccaaatagtaccatagcccttatttattaagaagtcccattttctgggtgctcctttgaaatttgaggatcctttccacataaatttatcctgaattgtgaattccaaacaactttaagttaaatgtccaatataacttatgggcagaaagcaaactgggtgggaggcagtgaggggctggatgggtcccctgcacagccaccccacgtgtgtgcagcgactttgcatgcagctgagatccagtggccaaaggtcaagagtgccttgctcactctgacaacagtatgttttaacagaacatttgggagctttttttgtgaattactgcacactttgagctagtttataaagacagaataagccatacacctacaaaaagaaggtaaggcaacagaggtaaaaactgacagcagcagaaaagaatttcaaactaaatgaaatgttttcaagccaggcagatctccatttgacacacagccccatcactcactaccactgtgattaggaatcaaccactgtacctctctaagcctcattttctttgcttgtaaaatgaagatgataataatatacctgccctcagggctgctatggggattatctattcttctagtttggcccatgatataaacgcagcattaaaaagtgccttaaatatactttcacaacatcattcttggtgattgcacagtattccactgtgttatgtactttaaattattaaatgaacctcctcttgttgaaatctaggctatgttaaatgtattgatattttcaacaacactgagattaactctttagatattcaccttctggcatgtctatgatttttttaagataaatatctagaacttgaattgtggactcaaaggaaagatatatgttgccaaatcatcctctagaaatgttataccactttgctctccaactagcactgtaactacttaaaaataatttttagctgacttcactccctaggatgggccttggacctctctggatagcctgtttgttttgttttgatttttttaactgtgcttttatgaccaccagagttccactggtctcacctctcagctgctgcagtggctgcggcattcatggcaaagtgtcggatggtgctctcctccaggtacttctgctcccactttgtcatgtcggcctccagggccaggatccgctcctccttctcccgcacaagttccaggagggctggggcattgtattccggcatgttggctggctggccatttccatgtttctgaaggagtagaaaaaaaatcttgatgctcaaaaccacatcaatgctgtctacacaactgcccatacagaacacatgaggttccccagatcctgcagcaattcacacaccatgctacttcacctccaaattcctctgttgtagttaattctcatggcgctctgcaaaacgacaatattatcccagttttacagatgagaaatgaagtttctgatggattaaattaatgatgcaatgtctctcagcttatcagtagtagggtcaggattcaaacctgggtctatctccacaggtcaaggtctttgcatgacaagaagtggcttgtctaatggcatgcagttaattacaccaaaagcaagaataggaattaagtcttggcctcctggtctagggtactttctccagaattccacaaagtgattccagttgtttgtttccgctaaggctggtgggggaaatggaaggcaaaggaagtgggagatgccccaaattgcatcctccctagctgcaatgctgggaaaggaggtattcacacctgccccactcagaggcctgagaatgagaatcaaactagataatgcatatgaaagcagaagacctctagcataaggcaagctcatttttcggccttttcatctgtgtcaataagagaaaataaagccattttctggattgctcacaaactgaggatgttcatacttcagaatctttttcctttaattaggtacactatttcctctaaagagcatgacacagaagaagatggcgctctgagaaagttctgccttcagagcagcagcagagataagtcatcttggagtctcagggttaggggcccagtcagagtgtggaccaggctccttagtactccagggagaatgatttcatcccagttagtctatgtcctggggtacmcattcccctcctgttttccagtggttgcaaattttaaatgcagagctgggtgcaaggtgagaggcacatgaatgctttacccagaaccacataatcccctagattaagaaaaggactggggaattacccagagcaacagctgggcattcaagctgtactgacggaaactaatcctatcagagaggaaaaaagaaatgggtgtatgggttttttgtaaaccaaattttgtttttattcagttttttaaagctacaaatataaattattctaggaagtgttatcttgccagtgaccaacattataagtaggaacagagcagaagggcatacctgtcctcacctgacctgtgcataaagggcactgactccatctggccaggcacctagcctcaggcaggagaacaaatgaaccagtccagcgagatgagacgctcccttatttttagaaactttccaagaaaagtctcccatattcactaagctgccatctatgcttgtcagtttctatctaaatcccttttgttaccatctcagctggcttatttttgcagaatcctcttaacctcacgtgagatcatgacaactcttcatagccccccctaattcaggtcattaagagttatttacataa

SEQ ID NO: 60931 - DNA, 803 bp, Homo sapiens
ctgatcaaaagcaagcagaacaaagtcatcacaaaactagagtgcgggcttagggagagccacgatcttgccatgagcacaataggagctttatgcaaagggtatcagggagaaacaaacctcctgagcaacaagataataatatttgctacataaaatgaattttgattaataatggatgcaaaacttcatttagtaacacgggctctgctacagggaaatagctgcccagggcatgccagtgggggcaatagggcagaactcagaggaaagaatccatagagcctgtccaagaaatcaattagaattgacttggaaatcaataccacaatgttatggtattcatagttatttttatgagctgcttgaacagttgtacagaatacaaacatgttttagctttaattatccccatctctgccttcactggtgtaccatgaaatccaactttcccatctgttaacagcatgctaggcagattctgtggtgtagctgtgaatttgaggcattcaaagtccagtccagcctagtcctgtggaaaactccatctcatatgatttaaaactttcctcatccaactgatgattcagagaaaatacagagaacatgttaaacacataccttgggcatgcaatcagcaaaatccagactttaaggaaaygacataaaacaaatgacccagtctcttcaaaacataaattgcaggggttgcgggaagggaagagaatggtagaagatggaagaggaatctatagattaaaagacatttaaaagatataccaactaattacagtgagcgaacc

SEQ ID NO: 60932 - DNA, 528 bp, Homo sapiens
ctggtcctgtgtacttttctggaaccttgccattttcatgtaaagagatgaagtttatccccttaccctcacctctcaaacccaggcaggcctttgtaactatcttggcagtagatgtggcagaagtgaggctgagtgacctctgaggctaggtcatgaaaggagaaatctcctgccttgtgttctcaacatgtccctttgacatcctgagctatcatgcagcaagtccagcttccctggactatgccagagggaccctgagaagagaccacaatgaaatgaagatgccccaggaccccccactgttctagcccctggtctttgagccaccccagtggggcccagcagagatgaactacccccatcaagccctgctcaaattgcagttataagcaaaataaatgcatctgggcatgctgttccctcgctctctagcttcagccccatttcccttctcattcttccaagttcaactcaaatgtcacctgcttttctatttccccactcttttagascaatagaacagtc

SEQ ID NO: 60933 - DNA, 820 bp, Homo sapiens
agccataaaaagggatgaaatgattgcatttgcagcaacctggatggaactggagaccatttttctaagtgaagtaactcaggaatggaaaaccaaacatcgtatgttctcactcctgtgtgggagctaagctatgaggacacaaagacataagaatgatacaatagacttcggagacttgggggaaagagtgggaggagggtgagggataaaagacttcacattgggctcagtgtacactgcttggataatgagtgccaaatctcagaaatcaccaccaaagaacttatacatgtaaccaaacacgacctgttccccaaaaaacaactgaaatataaaaatatttttaaaatagaaatataatgttttcattactgagataaagttggtaatttttttcttttttcaaaaatcagattgatataattttaaaacaataattatttttcctttttgtaatacaatatttgtttaatttttttaattttttggcataattatacatatataatacaataatagaaacattctcagtctgcatttcttttcttatcttcattatgattagtttcattccatgattattactgaaaatttttttgcagtatagaggaggacagggtgttataaaaccagtaaaaagacacycaaatggtttcaaacagctagaattggccttgaacagtgtaatctgaagcactgagctttaaaattgttccttgaaggttggcgcacagaaattgtgacactattgggcacatgtcagcatgtatcagctctagaactaccacggacagaaagagaaaagtgggtgaccaaa

SEQ ID NO: 60934 - DNA, 2911 bp, Homo sapiens
cactaccatctctgtccttcaagtcctttcaggcagatacctaacactgctccctaaccacagcagaaagcatctttagttttctttttatttgttctttgtttcattcttctttttttttttttttttacaagttataataagcaccaccagaattcaacagaaaaaaaatgggctaaacatcctatgctgaggatagaattaacagtcatacctcagcttactcactatttatacattatagctgttccctcttcaaaatcgagactgaaagaatgggaaaatgttagactctaaaccatcatctattcaaagttacaatggaatataattgctactatagagcaagaacataaaccttaaaaatgtacccagggtaggggcagggagaaaagacatcatgatacatgctagtttaaagattttatttggaatgaattacataaactaccatatttcaaagactgggcttcattatctattgatagtataataaaactatgtaaaaatgttctgctaggcagttttatttattagatgtaaaaatcttccccatacaatctaaataaaatttgtcttctatcatccttttgatgaaaaactattgctgatattacaagtaaaaattaaaatgaattctggtaaattatatattcacctcacaccctaacgtgacactggtaaatttacctatttatctagagaattataaccaacatcagtataggtaaacacaatgtatctttcatgtaagcaagtttcctaacaaaattttattttaaaaggaacactttaaaattgtaagtatatcgtcaagaagctgttactgttggttactggccactttttaaaaaactgtctgcagacaatttcattcctgaggtagacagatacttctcacactattttcttgaaatgcagacagtgtttgttcctataaaaaattttcttagttatttctaaagtacatttaactcagcaattaaagttgaaggtataacattgaaacattgaaatctagtactaaaaatataagtgaagattgataattaaaatacattacagcatgagaaaaattaagaaattagggattgagatttttctcttttctaatgaaaagataatgaagccaattactaaacagactagttttcagttttatgctaactaaaatgtaataaatactcacttttattggcaatgttattttaattacattaaacttgcttgcttttaaacagatgtttgtatgttataattcaagcagagttaaggaaagaaaggcattctgaattctgtgctaggtagaggagtgaggaggaaaagtggtttaactgatgagcttctattttccagcccagtggttctcaatgtgtgtttccggaccagcagcatctatatcacctggaaacttggtagaaatgcaaattctcaggtattaaccccagacctacagaatcagaagttccgtgggtggggtccatcaatttgtgctcaactaaacctccaagagattataaagcctactcaagcatgagacccactgctccagcctataaatccatgtcctttcatcactcccttaaccatggcactgcacatattgttcccctagtgttcacccttccaacaggattaatatccagaagatagagccgaaaagttccaaaatgcattaaggaaagtagagagaggagtttaaaaaagaaaaaaaaagttaaacaaaggtatgcacatgtatgtgtacatgtacagacgtgggaagtcagtggcagagagaagaggcagtggcaactagggctgtatgcagctgggaatacaatgctgcactcaggaaattcaaaacagttccagatgagaaggacaacgaatcctataaatttacaagcatttaaaattaaaagcaccttacagcaataataagatgtcagctacaagagctatagttattggtaacatttagcaaaaggtcaaataaagtccaattcattctcatgtaagtaataaatayctcatgaagatatgcacacacacatgcgaggaaaaccctgccccactgttaatacagtaaaagttaaacagaatattgtattgtagcccatataacagtggtgatcttctcaaatggaggtcctcacttctccagagttgactatcactactttaaattccagggctggttgttcccccaactcttaccagctatttaatcctgaagctggtgcatggctttacataatcttgttttctatgaaaatgatcttacaaaaaaccaaaaaacaaaagttttcctcttttactttatgcttacaagaaggcagctgaagttttaaaaatcactttaaagaagccaaggaaaccaaacagaagcatatgagatgaaagcattcactgaagataggcatttgaaaagctagactctaatccaagttagtcacaagtccagccacaaggcaaatgttaacaaaggcctctgactttgcgtggtttcttagaatatcccatattgtataaaatacataatggaattcacacaacattaactgtgtgtaaattaacaaaattactatgtggcattttatatgcaataattcaaaaattaacaagtaaaataatctgatttacaacacacatatttccccaactaaccaaatcaaagcttttaagctccaatattttgagttctgccaaaggaatgcaaaacagagttaccaaggaaccagtgatttcaggggttcttgtaactaggaacaagttcacgataatcaggaagcaggaaaaaaaaaagggggacaggtttacaatctctttaaaaagaagactcatcttattaccaatctatcccacatttcatttctaaatagcgaaatgaaggttattaaagcagccagcagcttttgcaatgacctat

SEQ ID NO: 60935 - DNA, 773 bp, Homo sapiens
tctctcaagctgttctacctcatggatcacctcataatgacctggtagcaatgactgtacaaggcaaaaagaaaactcttggctgccagargctgggaggaatttctaaggctcatggggattagaaacctctgtgtcactgcaggagggggaacaatgccttctgtcagtttttattcaagtgtttcattttgagccccaaccacactgactttgatgtgagaataaattaattccagagccccgacttgaaatttcctgactctgcctgtctattgtctatccacccacacaaaagagaaacagcggaaccttgtcagttttcaagtgagcagcttgcaatacacattcttctagggagctttttaaaaggagcattggagtttttcaatcctccttcttcttccttaagtatttgcccattttaatgttgagctgctttctttatatggaaaaaagaattgctccactgagctgtagaaatttgattttcttggtcagttggggtcaatcttactctattaaaaattttaaaacaatcacttatgatgattcttcatgtaactcttaaggtttcatatcttatatcttatttttatattgaatctgcatttttgagggaacaaaaaatgctccccagactttgtctggctcacaaagggataaaagctttacaagatatacatgccactctgactatagtctctgcattttgcatgtgaggcgatcaggaaatggagacgttcagcagcttcttccagatcatccactaa

SEQ ID NO: 60936 - DNA, 1590 bp, Homo sapiens
gattgctctaattgttttaacagtcctattaatgtctgtcttcaataagtagatgacatttatataaaaattaaataatataaagcatatcttgaatccgttgaggggaaagaatgttcctctagagttgcagtgaccccagcagttgcacataagagacattctagtttttgctatacagtctgaggaagcaaccagaacttcagcaagttctggggcttctcccacatcactgccatatgctcccagatgggaacataaataagcaatgaaaagggagtgttgaaatgagagatctggtaacaggtcatttgaaaagacagagcaaagacttgtagccattttctagcaatttcacaactactactgaaatcagcataacatttgcaacctggcctatgttagaaaaaaaaggcatgtaatataccaccaatgaaattgtggtttgaattctctctgaatgtgcgtttatttctcttttatcccagctgcatctatacctaccttgctgtgaaacagcataattaaccggtaggtttcagggagaagtgataattttcagcttattctaggtcattttcagtcaacattttagcttgaaaatgcttttcccttctccctttggcagcagctttcagaagtggattttgctgaagccttctattttcatcactctgattgctttatttatgcagcaaatcactgatttggtgtttaggaaattgtcatgtttgggcagcaaagctttttagttaatggattgaggagttctaaacttgtttataaaatacatgtattttttaaaaggcccataaagttccaactcatcattcattatattcagggtagtgattaacagtaagttcttttaccatttacttcaactcttcctgtcaaatcaacactgaagaacatatttatctaaacttaagaatatcttggtacttgtcttaataactaggttggataaatcagtcttttctttaaacagcactcttagtactttcttccctgaatatctaatctcgttgaatagaatccttcaggaaagtaraaagatagcctggaaagatagcctcgctatgacacttcccatctggaaaatgactaggaacacctctattgaaatgacaacagtgaatgatagagagtaatagatgcataggccatagattttggaattaagtagaaatcaaggttatgtgctagtcttggctctgccatgacttggttatgtcactgtctgcacctttcatggcttgtttctccgtcaatgaattaagaaagttggattagactattataattttttgttgttgatagtgttttaagcaagagtttttcaaatgaaaatttacttgaaatttagatatataatgaaatatattggttttctagtgctgtataacaaatctccccaaaatttagtaccttaaagcaaaggtagtaatttattaatctctcacagttccatgggttgggaaatggagattgacttggctgtgttaccaaactaaacttggctctacttgccctgtgtgcagaaaaagccaaacactaatattaagatctgcagcaagagaaattatt

SEQ ID NO: 60937 - DNA, 686 bp, Homo sapiens
aaggcaggacaaaagggggagacaagtcttttctgttattcttgattaaatgtcattgataaataggactccactgacttggagccctcagtttatgggattccaaatgctctggcatcacactcattggcccttgacttgttttccacagaggtgttgttagcacgctagcagtcactccccactgccccatctcagctctacacagacactaatctgctttctgtctgtatagatttgcctattttggacatttcatataaatggaatcatacaatatatgtgttttttgcaactgacatttttacttgggacaatgttttcaaggtccatccatgttgtgtagcacgtgtcaatacttcatttaattttatggcgtaaataacattccattatatggaaatgccacattttgttcatccgtttagcagttgatgaatatttcacctgtttctacttttgggctattatgaataatgcttttgtgaacagctgtatccacgtttttgtgtagagaagtacgctataatttacarttagtttttagaatacaaatggtaacctttccctatctgcatggcacacttgcttatccatgaatgttactgaagtccatttgaatcctttaaggtaaaatggatgaggatttctagtttaacccttatgcttttgagatttaaaaaact

SEQ ID NO: 60938 - DNA, 1138 bp, Homo sapiens
atgattataccactgtactccagtctgggtcacagagtgagaccctgtctsaaaagaaaagaaaagaagagaaaaaaagaagagaaaagcaaaaaagaaagagaagagaaggaaaagagaaaagaaaagaaaaaagaaaagaaaagaaggaaaagaaaagaaaagaaaagagaaaagtataagtaatctcccaaatgtcaaaagatggtaagttctggagtcaggattttaacacagactttcttttccaaaagctcatcttaatcacttcagtgtggcttgaagcttcaagaaagtagccatccaatcactgcacttggttcagcccctgtaggcagggatgagtcttgggcatccagccttctgagctcatagtaggtgttagtctctggctgcgctgcggttatgttctcagctcaggagctgggaagctctgcaaataactggcttcaatatacatggatggattccatccagctttttgtatggagtgcctttttctttcctggattccctcactacccacatccagctccctagcccagcatctttcagcttcatctgcattcagtatttggcattttgatttaacttctgctgaatggggctgtttgtaaatcttgttttttgttgtttttttcttcccccttgaagcaagagcttattgtgctatttggattgaaagtcttcacgatctctctctcctaggccttttctacaccaccagataatcaccatttggagaacttccagaatctttcattacagattttctagttatacccttgtcgtactattttatagagcagaacacagcaaaaacaaaatttttcaatgcctcaaacaatttggcatgctggcatttgtgctgcagggttttgtgctggggaaggacagtgccagggattctatgcttactgagcagaatgactttctggagttgaaccatcatgattttttttttctctatttttgaggactcttctgaggattctcctgcagtttttcccttgtccaatgggtaaaaggagacataactgaagttctctctatgcagcttgtccacagggcagggctttcctcatccttcctacacctctctgtggcattatccactaatcaactttcatttcaggtt

SEQ ID NO: 60939 - DNA, 1138 bp, Homo sapiens
atgattataccactgtactccagtctgggtcacagagtgagaccctgtctgaaaagaaaagaaaagaagagaaaaaaagaagagaaaagcaaaaaagaaagagaagagaaggaaaagagaaaagaaaagaaaaaagaaaagaaaagaaggaaaagaaaagaaaagaaaagagaaaagtataagtaatctcccaaatgtcaaaagatggtaagttctggagtcaggattttaacacagactttcttttccaaaagctcatcttaatcacttcagtgtggcttgaagcttcaagaaagtagccatccaatcactgcacttggttcagcccctgtaggcagggatgagtcttgggcatccagccttctgagctcatagtaggtgttagtctctggctgcgctgcggttatgttctcagctcaggagctgggaagctctgcaaataactggcttcaatatacatggatggattccatccagctttttgtatggagtgcctttttctttcctggattccctcactacccacatccagctccctagcccagcatctttcagcttcatctgcattcagtatttggcattttgatttaacttctgctgaatggggctgtttgtaaatcttgttttttgttgtttttttcttcccccttgaagcaagagcttattgtgctatttggattgaaagtcttcacgatctctctctcctaggccttttctacaccaccagataatcaccatttggagaacttccagaatctttcattacagattttctagttatacccttgycgtactattttatagagcagaacacagcaaaaacaaaatttttcaatgcctcaaacaatttggcatgctggcatttgtgctgcagggttttgtgctggggaaggacagtgccagggattctatgcttactgagcagaatgactttctggagttgaaccatcatgattttttttttctctatttttgaggactcttctgaggattctcctgcagtttttcccttgtccaatgggtaaaaggagacataactgaagttctctctatgcagcttgtccacagggcagggctttcctcatccttcctacacctctctgtggcattatccactaatcaactttcatttcaggtt

SEQ ID NO: 60940 - DNA, 579 bp, Homo sapiens
cttcctaagaaggttgtataaatcaaatacactgatatttgtggaattactctacaaaccataagttttgctgcaaactcgctgtttaaccttgaacaagctatgaggtctctgggtatgacatggcacactttagcagagtgctacttcctgattctcagagggaagttattggtgcacttcaccaagcagtaaccaattcacagaagyttagaactgcaagataacttaatgctttaatttcacaacaatatacagtctgatgtatacagaggagttgaaaatccacgaaactctgaaagttgttggtgcctccacagttccaatgagccagaggtatgtaagacaatagatgatgagtgttctctccttgactgaactctagccaggctcctctgggccctcttttgacaaggcctcactcttgtcctataaagacttcagtaaacactaatatagtttctagcagttcaaggccaccttcctaggctcaccataagccccctaaaagtgctgtcctgagaaaactcaaggctgcccaaagagtttactgtttgtttcagccgacacctgaagaca

SEQ ID NO: 60941 - DNA, 725 bp, Homo sapiens
atcaagctttttctatgtcgacaaatagacttaagtatcatcttgctagtttaaccagtgttagttatccagaaatataatcgagtgcttccaaaaatacatgggaaaatgcttggcaagttatgtttccatacaaatattatagtcattggtccaatatttttagtaatgtattttgaatgaacaaataccaagtcatttgaaagaatttttataataatttctaaaaaaaataagactatcatttatacgttacattttccaatacattccacattttccagtactatgtaattttatagataatgttaatgtatgaacatttgaaaaagtggaaatcaacattttcatcaactaatgctgaattcaaaggacattgttgtatttcatcrgactcaaaagtctaggtcagtgattcatcagatccactctcctgaattgctctccccagttgacatccccaacactgaaggtcattgtgcaggccgaaatctgagcattaacacagcaccaagtctgggccaccgggcttccagaaaaaagcagcatgttcacctgaaaccttcgaatggctttgttttgaaataatacaatacagtttcaatagtgtttggaacaacttcatgcatacagatctgaaataaacacctagccattaagattttgaaagttatgatctgaaatgtcatggagggcattaccatcacatcatctgggggctcctg

SEQ ID NO: 60942 - DNA, 725 bp, Homo sapiens
atcaagctttttctatgtcgacaaatagacttaagtatcatcttgctagtttaaccagtgttagttatccagaaatataatcgagtgcttccaaaaatacatgggaaaatgcttggcaagttatgtttccatacaaatattatagtcattggtccaatatttttagtaatgtattttgaatgaacaaataccaagtcatttgaaagaatttttataataatttctaaaaaaaataagactatcatttatacgttacattttccaatacattccacattttccagtactatgtaattttatagataatgttaatgtatgaacatttgaaaaagtggaaatcaacattttcatcaactaatgctgaattcaaaggacattgttgtatttcatcagactcaaaagtctaggtcagtgattcatcagatccactctcctgaattgctctccccagttgacatccccaacactgawggtcattgtgcaggccgaaatctgagcattaacacagcaccaagtctgggccaccgggcttccagaaaaaagcagcatgttcacctgaaaccttcgaatggctttgttttgaaataatacaatacagtttcaatagtgtttggaacaacttcatgcatacagatctgaaataaacacctagccattaagattttgaaagttatgatctgaaatgtcatggagggcattaccatcacatcatctgggggctcctg

SEQ ID NO: 60943 - DNA, 725 bp, Homo sapiens
atcaagctttttctatgtcgacaaatagacttaagtatcatcttgctagtttaaccagtgttagttatccagaaatataatcgagtgcttccaaaaatacatgggaaaatgcttggcaagttatgtttccatacaaatattatagtcattggtccaatatttttagtaatgtattttgaatgaacaaataccaagtcatttgaaagaatttttataataatttctaaaaaaaataagactatcatttatacgttacattttccaatacattccacattttccagtactatgtaattttatagataatgttaatgtatgaacatttgaaaaagtggaaatcaacattttcatcaactaatgctgaattcaaaggacattgttgtatttcatcagactcaaaagtctaggtcagtgattcatcagatccactctcctgaattgctctccccagttgacatccccaacactgaaggtcattgtgcagrccgaaatctgagcattaacacagcaccaagtctgggccaccgggcttccagaaaaaagcagcatgttcacctgaaaccttcgaatggctttgttttgaaataatacaatacagtttcaatagtgtttggaacaacttcatgcatacagatctgaaataaacacctagccattaagattttgaaagttatgatctgaaatgtcatggagggcattaccatcacatcatctgggggctcctg

SEQ ID NO: 60944 - DNA, 664 bp, Homo sapiens
gtaattgcaacctcacttcttaaaatctagatcttgctgcaagtgagcatatcaaagaactgtgttccctatgaaaattttgatctatataaaaatcatgccatcgttaaaattgagatggagcagtgttatcattcatctcttgagatttaaatataacaaaagtcacctttaccttttttggaattacgacctatagggacacatcacatagttattgcattgtttctgtctaactcaatattaactgtgaattttgtggaaattaaaattagaacagggtgaactagttgaagtcctaaaagactatattgayagtttggcttccatagaatgtgcacatttaccttccagaaaacagcaggatgctcctctactacatttcctcttctttactttgctcagctttccaggaagttgaaggttcaaagtggatctaaaggtagacaaagatgtatgtgaaagtagcaaatagagtgagacagttgagtgagatggagcagacgtcagcagccagacacacatttgaggatgagcctagagctcttccaccacccctttcccaaaacaagatactgaaaacagaaacactttgcagctgtgctcatcatggtcagacagactctccaggaatatcatgaatatggtggcagcgctggtggga

SEQ ID NO: 60945 - DNA, 664 bp, Homo sapiens
gtaattgcaacctcacttcttaaaatctagatcttgctgcaagtgagcatatcaaagaactgtgttccctatgaaaattttgatctatataaaaatcatgccatcgttaaaattgagatggagcagtgttatcattcatctcttgagatttaaatataacaaaagtcacctttaccttttttggaattacgacctatagggacacatcacatagttattgcattgtttctgtctaactcaatattaactgtgaattttgtggaaattaaaattagaacagggtgaactagttgaagtcctaaaagactatattgacagttyggcttccatagaatgtgcacatttaccttccagaaaacagcaggatgctcctctactacatttcctcttctttactttgctcagctttccaggaagttgaaggttcaaagtggatctaaaggtagacaaagatgtatgtgaaagtagcaaatagagtgagacagttgagtgagatggagcagacgtcagcagccagacacacatttgaggatgagcctagagctcttccaccacccctttcccaaaacaagatactgaaaacagaaacactttgcagctgtgctcatcatggtcagacagactctccaggaatatcatgaatatggtggcagcgctggtggga

SEQ ID NO: 60946 - DNA, 664 bp, Homo sapiens
gtaattgcaacctcacttcttaaaatctagatcttgctgcaagtgagcatatcaaagaactgtgttccctatgaaaattttgatctatataaaaatcatgccatcgttaaaattgagatggagcagtgttatcattcatctcttgagatttaaatataacaaaagtcacctttaccttttttggaattacgacctatagggacacatcacatagttattgcattgtttctgtctaactcaatattaactgtgaattttgtggaaattaaaattagaacagggtgaactagttgaagtcctaaaagactatattgacagtttggcttccatagaatgtgcacatttaccttccagaaaacagcaggatgctcctctactacatttcctcttctttactttgctcagctttccaggaagytgaaggttcaaagtggatctaaaggtagacaaagatgtatgtgaaagtagcaaatagagtgagacagttgagtgagatggagcagacgtcagcagccagacacacatttgaggatgagcctagagctcttccaccacccctttcccaaaacaagatactgaaaacagaaacactttgcagctgtgctcatcatggtcagacagactctccaggaatatcatgaatatggtggcagcgctggtggga

SEQ ID NO: 60947 - DNA, 664 bp, Homo sapiens
gtaattgcaacctcacttcttaaaatctagatcttgctgcaagtgagcatatcaaagaactgtgttccctatgaaaattttgatctatataaaaatcatgccatcgttaaaattgagatggagcagtgttatcattcatctcttgagatttaaatataacaaaagtcacctttaccttttttggaattacgacctatagggacacatcacatagttattgcattgtttctgtctaactcaatattaactgtgaattttgtggaaattaaaattagaacagggtgaactagttgaagtcctaaaagactatattgacagtttggcttccatagaatgtgcacatttaccttccagaaaacagcaggatgctcctctactacatttcctcttctttactttgctcagctttccaggaagttgaaggttcaaagtggatctaaaggtagacaaagatgtatgtgaaagtagcaaatagagtgagacagttgartgagatggagcagacgtcagcagccagacacacatttgaggatgagcctagagctcttccaccacccctttcccaaaacaagatactgaaaacagaaacactttgcagctgtgctcatcatggtcagacagactctccaggaatatcatgaatatggtggcagcgctggtggga

SEQ ID NO: 60948 - DNA, 708 bp, Homo sapiens
cagtgccttaaacgttgctccatcaaacatatgttgattttatcagttaaagttttttaaacttagaatatcagctaagagatcatttcctcagagcagtcattcctgacccctgagactaaagtattcacataagcagtatcctgtctcatgatgtttttgcaacatgtgttctattttcacatgtatgattacatacttaaaatattcaatatttctgtgtttaatatttggtatctctctctaccatctgactacaagttctgtgaggacagggtcataactgtgttgagttctctgttgttagtacaatattgggcacatgtgaggtcctcaataagtatttacaaaacgtcatttggtgaaagagactgtacagaaatgtcatctgttgaacacattgtctctccttgagcaaacctgagaggaagccaaatgttatgaaagtttgcttcataaaaaacagagtcaaaataaaggatttttttacatgaatttcatattgtatataatcaagttaagagataaagcaggtagaaataaagatacacctgccactgtgactgaattagccattccccttttcactgagacagtatttcccaggaaaatctactttttcgctaagctawccaaccaccacccaccccaagagtgggcacagccattcctcagatatgtgattacaataccgcctgggtgctggga

SEQ ID NO: 60949 - DNA, 547 bp, Homo sapiens
agcatggtggctcatgcctgtaatcccagcactttgggaggccgaggcagatggatcacctgaggtcaggagttcaagaccagcttggccaacctagtgaaaccctgtgtctactaaaaatacaaaaagtagctgggcatggtgrcgggtgcctgtagtcccagctacttgggaagctgaggcaggagaatcactggagcccaggaggtggaggttgcagtgagccaagatcatgccattgcactccagcctaggctacagagtgagactccatctcaaaaaaagaaaaaagaaattaacgttttagtattttaatatacaaatgactcatagattttatgactattattaaattaacatagtatcactttaagattctaaattattgaaaaagattttgaaactatgacatgggtactcttcctaatatctttcccagtcatcctgagtctctagtaggcatatgacacataaaatggctctgaaggtcaggacctgcaagactcctacatttacatactaggtgtagagctcaggataaaagctg

SEQ ID NO: 60950 - DNA, 1010 bp, Homo sapiens
aatatcaaggtcagctataaaatcatttatcttttaattctaggtctaatctttgtaaacattgcaaaagagttgaattaagttcaactgtaaaagatcagagtctaccaaacaagataattataaaatagccaacaggccaggcatggtgactcatatgcctaattctagcactttgggaggccgaggcaggcggattgcttgatcccaggagtttgagacaaatccagacaacattggcaaaatcctatcgctataaaaaatacaaaaattagccgggcatgttggtgtgggcctgtagtcccagctactgaggaggytgaggtgggaggatcacttgagcccaggaggcggaggctgcagtgggctgaggttcaccattgcactccagcctgggcaataaagcaagactcaaaaaaatacaagccaacaaaagttatcacatctattcaaaaggtacaagtggaagtgctttatcaagcattcttaactaattttcaagaatgacttactaagggacagagcaagactccgtcttaaaaaaaaaaaaaaaaaaaaaaaagagacctcacacctgtaatcccagccctttgggaggctgagatgggtggatcacttgaggtcaggagttcaagaccagcctggccaacatggtgaaaccccatctctactaaaattacaaaaattagccaggcgtggtggcacatgcctgtaatcccagctccagctacttggaaggctaaggcaggaaaatcgcttgaacctgggaggcagaggttgcagtgagccaacatcacaccactgcacttcagcctgagcgacagaacgagactccgtctcaaaaaaaaaaaaaaagaatgacttattaaaagtaaaaaatatgctgttctgtcataaataagtatggtttacaccttctttatcacaattactagtttttcagtggcttattagtggtaagaagtattggataaaagtaaaatagtacgggtaatgcgtatgttaattag

SEQ ID NO: 60951 - DNA, 603 bp, Homo sapiens
ctggctcatcaaacgtttgatttatcggtttcctagcatataaactagctgcgaagatgtgtatttttttgagaagccatgtggagagagtaggggacacagaatctgctcttcaggcatgctgacagcaaaaagtgactactagtaggccatgagggatggaagagagaaatactataaaaagcatagttgtctggggctatttaaggaagacacaataacacactgcacatcccaggacccctttcaggcatcactataatagcatggtgtaagaactgtgtcctctcagtcctgttcagcttcagccactactatcctttgtctattaatacagcaccaaccacttggtcccaaaggaacgttctggcgagaaatgtgcagagwgaatcagttcgccagcaggtgcgattctggaattgtttggctgccagagacccggtatttggtgtgtccgtcattactgggtgtttgtgtccccaagccagagtcatcatgttgaccatcctcctgaactggggctctggttggattcccacctgtttacctggtgccttaacgttcttctccacttatcttgccatacccttcctggagaggaaa

SEQ ID NO: 60952 - DNA, 743 bp, Homo sapiens
ttttctacctcaagtccgaggtggcatatgtcttcttggaaaagaatttcctctttgagctcaacagtgacaggaaccatatttttgttattctttagactgcttaaattgctgagacttttaaaggttaataatatttttatccaccttcaatttttcaatttactgttgttatattgcataacatgtgctgttctctttttgagttaatatattgtaagttaacttacattaataaataaaacatctcctttttcaagaagcaaaaatgtgattatttcatagatccccaaatcatccaaccataagacttctcaagagatctttaaaattattactttgcactgtgtttcaaatagctaccctcaccccccttccccttcagatgatgagatagttcctctggtgtggtctgtgtggcctgcctagagagccctgatgccccacagtggctgtagacctggccccaagtcctgaaggcttctaccttcccaggtgcatgtcttatcctgtttcctatatttcatatttgtggttgagcctttagaaactaggcaccattcggccaggcatggtggatcatgcctgtaatgctagcactttgggaggccaagatgggcagatcayttgaggtcaggagtttgagatcagcctggccaacatggtgcaatcccgtctctactaaaaatacaaaaagttagcctggcatggtggcacgtgcctgcagtcctagctactcggga

SEQ ID NO: 60953 - DNA, 743 bp, Homo sapiens
ttttctacctcaagtccgaggtggcatatgtcttcttggaaaagaatttcctctttgagctcaacagtgacaggaaccatatttttgttattctttagactgcttaaattgctgagacttttaaaggttaataatatttttatccaccttcaatttttcaatttactgttgttatattgcataacatgtgctgttctctttttgagttaatatattgtaagttaacttacattaataaataaaacatctcctttttcaagaagcaaaaatgtgattatttcatagatccccaaatcatccaaccataagacttctcaagagatctttaaaattattactttgcactgtgtttcaaatagctaccctcaccccccttccccttcagatgatgagatagttcctctggtgtggtctgtgtggcctgcctagagagccctgatgccccacagtggctgtagacctggccccaagtcctgaaggcttctaccttcccaggtgcatgtcttatcctgtttcctatatttcatatttgtggttgagcctttagaaactaggcaccattcggccaggcatggtggatcatgcctgtaatgctagcactttgggaggccaagatgggcagatcatttgaggtcaggagttygagatcagcctggccaacatggtgcaatcccgtctctactaaaaatacaaaaagttagcctggcatggtggcacgtgcctgcagtcctagctactcggga

SEQ ID NO: 60954 - DNA, 525 bp, Homo sapiens
ttttataaaaataaagactgaaagtataaattaaaatcatgcaatgagtagaatacttaaaatcaataaaatgacacattcaagaggtacatttttcactttgctttttatatctttggtttgattataagaaataagagcatagaggcagctctaggaactagggcatttcataaaagacctgttatggggactacagaagtaatgttagctggtttattcctgtagtagctaggcagagatggacttcctagaagagctggacttttgtttatagccattgtcaagagactttctgtccatccaattcctccattttaatagtcattcgtggacaaatcaatcaatctgttacatcttcctttttgacaaagcaactggatttaaggtacaccacatatgagcacttgatcttgctcacatattaacattaagtagcaagtgttgagttgttatgaacaatgagatttatgtaatcatttgatacctgaactgtcttctgccatagggtggctaagacrcttc

SEQ ID NO: 60955 - DNA, 939 bp, Homo sapiens
aaatatataggtttgtatgggctgttttaatttattatataatgtaaaaacatattctgcagcatagtttttttaagttaatgatgtggcttgtagacgtttttatgaagctacactagatcagttgtattcttatgaagtgatacataaktattcataatagggatctaccataatttaaccattcgtctaatgatagtgtaagtttcaatttcctcataggtaaatagtaaataaaaataaaagatgtgcctttgagagttaaatgagcttagtacattgccctacaacttaagcacttaatgagtgtgagttaataaaaattaaagggctttggagtcagacagacatgggttccacattccatctcttccctccctagctgtgagacttcactgaattactgaatctctttctgtgtaaaagaggtagatgaagaacaaaaatagtaataaccttaagattattgaatctctctaagtcatctcatctgaaactggagattataatacttcattgtttgtgtgacaatgaaatgtaatcatacctaaagtacctaccacacaggaactcagtgttttttccttcttagataatttgatctcaagaaaatggtgttactttataaagagtagcattacagaatcaatatcttcttttaaaaatataacacagcattgtacttctacatactcagaacgtaagagaaagaactaagccattttagtacagtgcttagactgtatactttcagtgaggtatagtctacaaacaaaagcaaagaaatgttgagtttggttggtagtggtacatatatagcaaatctagaactcttatgtattttaagttgagcaaatgagtacatatgatgttgctgggagtcagggttttcttggtggaagaaaggagatatggaatggaataagagaaggaagaatc

SEQ ID NO: 60956 - DNA, 972 bp, Homo sapiens
tttaatgtaaaagaacttcctgcaactttcgcaacctaaaaacaaagagttgacacctctgcatcccaaataatctccatgctccctattatttctaattcttgcaaacgcttgctaataaggccttttgccttggtaggcttgctttagatatataattcagcaaaagtcagcctctctattgaaacaatgatattctcatctataaaaatatgacatccattacactgtttgaaaatcttagaaacaaattagtaaataagaaatttaaagatgcctgtgaaccatgtgagttcaaaaattatttctgtttaaagaagaagtcaggcagttgctaatatttctgtaagtctatttttgacaaaaatctaaagcaagagatcagcacagtcagataaaattaaaactatccaaaagaaattaaaatatcactaggagaaagcacactaagaactagttgttaataatttttaaactatttaactagagtctccaggtccaatatcacttcattttttctcctataattatgactataataaatatatttcayacagtcctcactgagcacaagctgttcttttctccaataatagtggatactctcttaaaaaagcacatgatggcccagcctggtggctcacacctgtaatcctagggttttgggaggctaaggcaggaggatcattcaaggccaggagttcaaaaccagtctgggcaacacagaaatcctgcctgcacacacatgcccacatacacatacaacatgatttaaaaaacatgatttaggaagctttcaccaaaaggggaaaaaatttcaaatctcttgcccagaattaaaaagaaaacaaaaccaaaaaaatccacatagattatagtactgctgcctagttgtatgtatttatatttggtaaactcaaacttttatcaaatttgattttgcaccaaaatagagattacatacaaaagaaa

SEQ ID NO: 60957 - DNA, 500 bp, Homo sapiens
cttttttaacttaaaagttgaaaagaaagaaagaagcaatatgaccatatatacttgcagggaatttgggaactgtgatctttatctggagtttctgtattttctacaacgacgaaagaagaaggaaaggaaccagatcccaaacactaagaaagagtaaattccacctgttgctctaaatcatggcatattgactttacatttggagcttgtaagtcttgtaaaacgccccagctctgtcctctggatcttgaaacaagaatcattatgggttttctgtagaagttttagccatcacttccatacccaaggtcaagaatgatacgtgccctcaggctggaagcagtgaatacaaaaataactttcagtatcatttccttccttstagggtcaacctcaacttaattcttccttgtttccattgctttccaatgccttcagggaattgttttttgtattttgtctagaatttatagctgttatctgtaggacagttagtc

SEQ ID NO: 60958 - DNA, 884 bp, Homo sapiens
gaaagtcagtcctcattcctgccccagggttcagcttaacttgacaggtagtggggcgatatgatgaccttcaaacttgtaccttcagctggaatttcagactgaacactgtggggttagaggtgaccagaggcatctgtcagctggaccttgagtcgaggccttttctggtcaccaggggttgtgctctgacacttaagttttgtgggggagactgcaccgtattgtttgtttccaggctatagttagcaggaatatgcctccttccttccctgggaccccttctaggctgagcaaggccacagtacctcctggaagggcacttggtaacctgtgacttagtccacatcctaactcgaccactcttgagctgtgtgatgttgatctaacagccaaacctctcagcctgtctttcctcaactgcgaaatgaggatgttaagtcttcaaattaargtgaggaacatcattcatgaaacgtccaccacactcccttgctgtgccagtgcttgaggggaaatatctcactgaggcttctcaatagtatttatgagtgaggtgctttgatttgttctattttacagatgcagaaactggggcgccgagaggttaaatcactcatctggagacacacagccagggaggatagtaagcagccaggatccaagcccacatccataggacctgaggctacagtgtaccatccctcacctgctccccactgtgcttcataacaccaggtgcagaggacagtggggccagaggcggtggtggataagaagtgactaggatgaggatgtgaaaagggcaaatattcacttgcctctcttgtgacatattcacataccatagaaagctatttctccatctctagctcctcagagaa

SEQ ID NO: 60959 - DNA, 720 bp, Homo sapiens
tgttaagattcagttttgcagtctaaaaagagtttgaaggtggacgatggtgatggttgtacaaccatgtgaatatacttaatgccactgaactctactgcttaaaaatggttaaagcggtcctgggctgcggtggcacggcggtcgccatgatggtcactgggcttggcggctgacccccgggctakgagagggcccagcgccccggatctcggtggccgctgctagagcgcggcctgtgccatggccaccttcaccgcctcctcagagcatttcgagaagctgtacgagatcttccgcggcctccatgaagacctacaaggggtgcccgagcggctgctgggggcggcggggaccgaagagaagaagaagttaatcagggattttgatgaaaagcaacacgaagcaaatgaaacgttggcagagatggaggaggagctacgttatgcacccctgtctttctgtaaccccatgatgtctaagcttcgaaactaccaaaaggaccttgccaaactccatcgggaggtgagaagcacacctttgacagccacacctggaggccgaggagacatgaaatatggcatatatgctgtagagactgagcatatgaatcagcttacagtctcaaagggcaacgcttccgcaaggcactgaaagccaaaaacaggccacccaaagtattgaacattctcatcagattgccacggagactgaccagat

SEQ ID NO: 60960 - DNA, 1260 bp, Homo sapiens
  misc_feature (1)...(1260): n = A,T,C or G
attatttggtgttctgagccatataattatgtaatttatactgtattacatgtacttaatttgtaccatgcctatgacacatagtagaatctccataaatatttgtaaaatgaactagggaattttttgtagtacttttgtaatggattaagctattcacctatatagaaatggctggttgggttcagggacaggtaaggattatgaactcatctgcatagtcatagttgttatgtgagtagaatttaattcagttttcattgtaatattattttagcatttgttaaaaagagatggagaaataacatagctcttgatcatttattccatattcgtgcagccttttcttgactttcgtgcattcttagwtaaagacaaagacctagtaagatgttttaatctactgctgcacaacaaattaccccaaaactcaatgtcttaaagcaataaacacttaactcataatttctgtgcatcaggaatctagaagcagcttagctagatgttctggcttagggtctcttgaggtcagaggcaagatgttggccagggttgcagtcatgcagtcatctaaaggcttcagtggggctggaggatccagttccgtggtggctcactcacatgcctgatgagttggtgttgactgttagcaggaggcctcagatactccccaaatgagcctctccatgggctgcttgaacatcctcttgacatagtggctggcttcccgcagagtaagagttcaacagagaccaagattgaagctacaacattttttttattacctaccctcagaagtcgtaaattctgcaatatcttattggtaagccttattcaatgtgggaaggaaccacaacaaagacttgaatacccaaagacaagaatcactgggggccatctcagaggctggctgccacatgaagtaatattaaatcctacacattcttcattgttcagtgaaactttcccctgagattcctgctcatatcatctcagcccttcttacattctgtcgcctctgacctagtttaggaccatcaacaggcactctcatctgggcactacagcatcttatattctttaactctgagaatgacaactatttttaagttcccctgtagcctccagtgcaccaaatgcagggcagaacatatagnnnnnnnnnnnnnnnnnnnnnnnnnnnnnnnnnnnnnnnnnnnnnnnnnnnnnnnnnnnnnnnnnnnnnnnnnnnnnnnnnnnnnnnnnnnnnnnnnnnntttt

SEQ ID NO: 60961 - DNA, 3524 bp, Homo sapiens
tatgcatgtatacataccatatatatgagatagttttgctatctttcttaaatatacatttaaacatgtggtctctgctctcaattatctttcttagaaaatgaataaagtccaaatatccaacattagtgagaatattaaataaattacagtactttcctactgtgaaatattatacggtcattaacatgaatgaggcacatacagtaatatggaaagatgtccatcacatgtagttgagtgaaaggagccagttacaaaacaatatgatccagcaaataaatattagaaactcatgtatgcagaagcttatgggaaaatatctggaaagatatatgtcaaacagtagagaaaaggattggaaagtggggaaaattttttttaagtttctattttattttatatctgtgaattgtctaaatgtttataatgaactcatgctatttttataataatattaaatgatatgctgactatctaatcatatttgatggtgtccattatttagctagatgccctcccatgccattatttactccatttgatttttctaattttacttcccattctctctcccattacactggattttaccttttctaaacactgcctgttttgtttaatgcttccacctcaacccagagtatctgtgtttcccctaaattccatctccaaagaaaattgtgcatatattagatttccatatacattaaaatactccataaaaggagaaaagtaaatattcaagaaattatatatatatataagatttcttttttgagacaaggtctcactctcttgcccaggctggagagcactggtgggatcaaggctcaatgaaacctcaaacactggggctcaagcaatcctcctgcctcagccttcctagtagctgggactacaggtgtgtaccaccacacctggcttttttatttatttatttactgtagaaacggggtctccttatgtttcgcaggctggtcttaaaatcctgggttcaagtggtcttcctaccttgacctcccaaagtgctgggattacaggcatgagtcacagtgcttggcctgtattttgaatcaacaagctttaatatgttttaatacattacttcctgaattgtaaggtgtcaaaaaataataaagagtagttacaaagttcttgagcagataactattttccttgtaaaaagatggcttacttaaacatcaagaatactatgatagccttgaataccttttagaatgagataggacacaaaaaaagaaaaagatgcatagcaccctacaaatgtgaaaaagcacgagatatgtttcttaccattgtgagggtaaatggatgattttctaatgcagatatactgggacaatgtagagtaatatactaaaaagcaaaaaacggataagttttaaatgaccaattaagaattgcaactatttcaacgatgctatgtttgctaaattccaaaaattacataaggataaaggctatttaaaaagttgctgaccactgactcacctgaccaggtcttgctttaaaattttctttgaccatycggatttccatgacatctgagggatgacttatgaccaaaatgatggtgactggcttattgctccgcatatacctgtaaagtctttcagcacagtacaggcacaaaggtccagaaatccaaagccaagtctaagacaaatttttgaaaatatacttcaagaaatactcgtattgtagaaatctacaccctgcccaattgctcattgcatacattacagtaatagtattttaatttgtattttaaataagaaaatataataaatgagtaaaaaacaatagatgctcactatcattcaaacaaacaaaagtataaaataaaacacaaagtaatatcaagaccctgccctcattctcatgctctgggtgtaactatccatgaacaaacaagtgtatattctttcatacacctttctatgcctacagatatgtaatgtatatacacaacatatttaataaaagaatacagggaagttaacaatctccgataaatatggggataattttagaaataaagtaacagtctaatgtttattaataagaaaaccctagatttttaatgtacataatgtatatgcataatatacatacatatgtgtatatatgttagatatgtatagcacatatggtttagaatgcattatgctaggcatgttgtttaccacttacttttatataatataataagaacataaaataatatttataatttggaaacctgacaattttgaatatgtgttgcatggttagccctgatcccaggacacatgcaaactttgggacgtgcagaagcctatgtggcttactgttctcttaaaattacacactttatctttcacatccctttgaggcctccaactaaaacttgtcttaatggtcactttttaaagcctcactctagttgtttcaaatcttctttctttcatgcagacagatcatgcctcttctgcatataataacatttagccccacactgtgttatgagtagcattgcaagacaaggtctgcaatgtagcagccttgcacctttgagataatcacttactctttgagtgtcaggtcccacatgagcaaaacgggagtcaccatacctgccctgtctaatatttgtgaatattatgtgaaactcagaaaagttctgaaaattatagagactagtagggatctagaggattattattaataataataaacacatcactaatacactattccaaagtcatctacaaattcattctagcttttgacttctctttcttctcttccaatagagacatttgacatcactatttcctacttccactttttatagatgaggaataaacagtgtaatttgcatgggggtagttctcacaggcacagaggaagataagggcccttattgaactaattgctgaatacttatggacgtttaccaggagcaagcatattagtcaaagacctgtgtttacatgcttcctctgccacttactggtttggagactttgattaaggtaagtacaatttctttatcagaaaatcgagggtgatattaattacctcaaatagtcattgcgaatattgcaagaaacattctgtatgtctcataagtgttctgtattaggcatacgggacattttagcacaatgcttggcagataatattaagcattcaatcaactgattttgctatttactatttacaatattatacataatattataatacaataaaataataatttgtgatattggtggtagtttttttactactatttttattattaaatcagcttttctcaaatgatgggaaaaatatttgtcatctcttggctgcaagcaccagtgctgttgtatgcaaagctcatatggtcagttaagtagaaatgttatatatcctctaataccatagatcttttgcattcaactgtcaagtacctgtaatggaataataggtactaacttactgttgaaacatcctgaaatatcctattatgc

SEQ ID NO: 60962 - DNA, 3524 bp, Homo sapiens
tatgcatgtatacataccatatatatgagatagttttgctatctttcttaaatatacatttaaacatgtggtctctgctctcaattatctttcttagaaaatgaataaagtccaaatatccaacattagtgagaatattaaataaattacagtactttcctactgtgaaatattatacggtcattaacatgaatgaggcacatacagtaatatggaaagatgtccatcacatgtagttgagtgaaaggagccagttacaaaacaatatgatccagcaaataaatattagaaactcatgtatgcagaagcttatgggaaaatatctggaaagatatatgtcaaacagtagagaaaaggattggaaagtggggaaaattttttttaagtttctattttattttatatctgtgaattgtctaaatgtttataatgaactcatgctatttttataataatattaaatgatatgctgactatctaatcatatttgatggtgtccattatttagctagatgccctcccatgccattatttactccatttgatttttctaattttacttcccattctctctcccattacactggattttaccttttctaaacactgcctgttttgtttaatgcttccacctcaacccagagtatctgtgtttcccctaaattccatctccaaagaaaattgtgcatatattagatttccatatacattaaaatactccataaaaggagaaaagtaaatattcaagaaattatatatatatataagatttcttttttgagacaaggtctcactctcttgcccaggctggagagcactggtgggatcaaggctcaatgaaacctcaaacactggggctcaagcaatcctcctgcctcagccttcctagtagctgggactacaggtgtgtaccaccacacctggcttttttatttatttatttactgtagaaacggggtctccttatgtttcgcaggctggtcttaaaatcctgggttcaagtggtcttcctaccttgacctcccaaagtgctgggattacaggcatgagtcacagtgcttggcctgtattttgaatcaacaagctttaatatgttttaatacattacttcctgaattgtaaggtgtcaaaaaataataaagagtagttacaaagttcttgagcagataactattttccttgtaaaaagatggcttacttaaacatcaagaatactatgatagccttgaataccttttagaatgagataggacacaaaaaaagaaaaagatgcatagcaccctacaaatgtgaaaaagcacgagatatgtttcttaccattgtgagggtaaatggatgattttctaatgcagatatactgggacaatgtagagtaatatactaaaaagcaaaaaacggataagttttaaatgaccaattaagaattgcaactatttcaacgatgctatgtttgctaaattccaaaaattacataaggataaaggctatttaaaaagttgctgaccactgactcacctgaccaggtcttgctttaaaattttctttgaccatccggatttccatgacatctgagggatgacttrtgaccaaaatgatggtgactggcttattgctccgcatatacctgtaaagtctttcagcacagtacaggcacaaaggtccagaaatccaaagccaagtctaagacaaatttttgaaaatatacttcaagaaatactcgtattgtagaaatctacaccctgcccaattgctcattgcatacattacagtaatagtattttaatttgtattttaaataagaaaatataataaatgagtaaaaaacaatagatgctcactatcattcaaacaaacaaaagtataaaataaaacacaaagtaatatcaagaccctgccctcattctcatgctctgggtgtaactatccatgaacaaacaagtgtatattctttcatacacctttctatgcctacagatatgtaatgtatatacacaacatatttaataaaagaatacagggaagttaacaatctccgataaatatggggataattttagaaataaagtaacagtctaatgtttattaataagaaaaccctagatttttaatgtacataatgtatatgcataatatacatacatatgtgtatatatgttagatatgtatagcacatatggtttagaatgcattatgctaggcatgttgtttaccacttacttttatataatataataagaacataaaataatatttataatttggaaacctgacaattttgaatatgtgttgcatggttagccctgatcccaggacacatgcaaactttgggacgtgcagaagcctatgtggcttactgttctcttaaaattacacactttatctttcacatccctttgaggcctccaactaaaacttgtcttaatggtcactttttaaagcctcactctagttgtttcaaatcttctttctttcatgcagacagatcatgcctcttctgcatataataacatttagccccacactgtgttatgagtagcattgcaagacaaggtctgcaatgtagcagccttgcacctttgagataatcacttactctttgagtgtcaggtcccacatgagcaaaacgggagtcaccatacctgccctgtctaatatttgtgaatattatgtgaaactcagaaaagttctgaaaattatagagactagtagggatctagaggattattattaataataataaacacatcactaatacactattccaaagtcatctacaaattcattctagcttttgacttctctttcttctcttccaatagagacatttgacatcactatttcctacttccactttttatagatgaggaataaacagtgtaatttgcatgggggtagttctcacaggcacagaggaagataagggcccttattgaactaattgctgaatacttatggacgtttaccaggagcaagcatattagtcaaagacctgtgtttacatgcttcctctgccacttactggtttggagactttgattaaggtaagtacaatttctttatcagaaaatcgagggtgatattaattacctcaaatagtcattgcgaatattgcaagaaacattctgtatgtctcataagtgttctgtattaggcatacgggacattttagcacaatgcttggcagataatattaagcattcaatcaactgattttgctatttactatttacaatattatacataatattataatacaataaaataataatttgtgatattggtggtagtttttttactactatttttattattaaatcagcttttctcaaatgatgggaaaaatatttgtcatctcttggctgcaagcaccagtgctgttgtatgcaaagctcatatggtcagttaagtagaaatgttatatatcctctaataccatagatcttttgcattcaactgtcaagtacctgtaatggaataataggtactaacttactgttgaaacatcctgaaatatcctattatgc

SEQ ID NO: 60963 - DNA, 3524 bp, Homo sapiens
tatgcatgtatacataccatatatatgagatagttttgctatctttcttaaatatacatttaaacatgtggtctctgctctcaattatctttcttagaaaatgaataaagtccaaatatccaacattagtgagaatattaaataaattacagtactttcctactgtgaaatattatacggtcattaacatgaatgaggcacatacagtaatatggaaagatgtccatcacatgtagttgagtgaaaggagccagttacaaaacaatatgatccagcaaataaatattagaaactcatgtatgcagaagcttatgggaaaatatctggaaagatatatgtcaaacagtagagaaaaggattggaaagtggggaaaattttttttaagtttctattttattttatatctgtgaattgtctaaatgtttataatgaactcatgctatttttataataatattaaatgatatgctgactatctaatcatatttgatggtgtccattatttagctagatgccctcccatgccattatttactccatttgatttttctaattttacttcccattctctctcccattacactggattttaccttttctaaacactgcctgttttgtttaatgcttccacctcaacccagagtatctgtgtttcccctaaattccatctccaaagaaaattgtgcatatattagatttccatatacattaaaatactccataaaaggagaaaagtaaatattcaagaaattatatatatatataagatttcttttttgagacaaggtctcactctcttgcccaggctggagagcactggtgggatcaaggctcaatgaaacctcaaacactggggctcaagcaatcctcctgcctcagccttcctagtagctgggactacaggtgtgtaccaccacacctggcttttttatttatttatttactgtagaaacggggtctccttatgtttcgcaggctggtcttaaaatcctgggttcaagtggtcttcctaccttgacctcccaaagtgctgggattacaggcatgagtcacagtgcttggcctgtattttgaatcaacaagctttaatatgttttaatacattacttcctgaattgtaaggtgtcaaaaaataataaagagtagttacaaagttcttgagcagataactattttccttgtaaaaagatggcttacttaaacatcaagaatactatgatagccttgaataccttttagaatgagataggacacaaaaaaagaaaaagatgcatagcaccctacaaatgtgaaaaagcacgagatatgtttcttaccattgtgagggtaaatggatgattttctaatgcagatatactgggacaatgtagagtaatatactaaaaagcaaaaaacggataagttttaaatgaccaattaagaattgcaactatttcaacgatgctatgtttgctaaattccaaaaattacataaggataaaggctatttaaaaagttgctgaccactgactcacctgaccaggtcttgctttaaaattttctttgaccatccggatttccatgacatctgagggatgacttatgaccaaaatgatggtgactggcttattgctccgcatatacctgtaaagtctttcagcacagtacaggcacaaaggtccagaaatccaaagccaagtctaagacaaatttttgaaaatatacttcaagaaatactcgtattgtagaaatctacaccctgcccaattgctcattgcatacattacagtaatagtattttaatttgtattttaaataagaaaatataataaatgagtaaaaaacaatagatgctcactatcattcaaacaaacaaaagtataaaataaaacacaaagtaatatcaagaccctgccctcattctyatgctctgggtgtaactatccatgaacaaacaagtgtatattctttcatacacctttctatgcctacagatatgtaatgtatatacacaacatatttaataaaagaatacagggaagttaacaatctccgataaatatggggataattttagaaataaagtaacagtctaatgtttattaataagaaaaccctagatttttaatgtacataatgtatatgcataatatacatacatatgtgtatatatgttagatatgtatagcacatatggtttagaatgcattatgctaggcatgttgtttaccacttacttttatataatataataagaacataaaataatatttataatttggaaacctgacaattttgaatatgtgttgcatggttagccctgatcccaggacacatgcaaactttgggacgtgcagaagcctatgtggcttactgttctcttaaaattacacactttatctttcacatccctttgaggcctccaactaaaacttgtcttaatggtcactttttaaagcctcactctagttgtttcaaatcttctttctttcatgcagacagatcatgcctcttctgcatataataacatttagccccacactgtgttatgagtagcattgcaagacaaggtctgcaatgtagcagccttgcacctttgagataatcacttactctttgagtgtcaggtcccacatgagcaaaacgggagtcaccatacctgccctgtctaatatttgtgaatattatgtgaaactcagaaaagttctgaaaattatagagactagtagggatctagaggattattattaataataataaacacatcactaatacactattccaaagtcatctacaaattcattctagcttttgacttctctttcttctcttccaatagagacatttgacatcactatttcctacttccactttttatagatgaggaataaacagtgtaatttgcatgggggtagttctcacaggcacagaggaagataagggcccttattgaactaattgctgaatacttatggacgtttaccaggagcaagcatattagtcaaagacctgtgtttacatgcttcctctgccacttactggtttggagactttgattaaggtaagtacaatttctttatcagaaaatcgagggtgatattaattacctcaaatagtcattgcgaatattgcaagaaacattctgtatgtctcataagtgttctgtattaggcatacgggacattttagcacaatgcttggcagataatattaagcattcaatcaactgattttgctatttactatttacaatattatacataatattataatacaataaaataataatttgtgatattggtggtagtttttttactactatttttattattaaatcagcttttctcaaatgatgggaaaaatatttgtcatctcttggctgcaagcaccagtgctgttgtatgcaaagctcatatggtcagttaagtagaaatgttatatatcctctaataccatagatcttttgcattcaactgtcaagtacctgtaatggaataataggtactaacttactgttgaaacatcctgaaatatcctattatgc

SEQ ID NO: 60964 - DNA, 1285 bp, Homo sapiens
gaaaatcttgctttagcaactcttgaggtcttttgtgttcttatgccccaaggctgtggtgttattactccctggagtattagttgtaggaactggttggggttcccatagtccagtccatgggcctgtttggcaggcagcttggccctgagccctgaggtatgcttgatgcttttttaggcccagatatagtaggcatgtgttctttcatgtgatgtgggttttaagaaaatgttcacttgcgtctacggccataccaccctgaacgcgcccgatctcgtctgatctcggaagctaagcagggtcgggcctggttagtacttggatgggagaaaatgttcacttgcgtttttccttgtctccttcttgccctttcttcttccctccacccaaaatactatttttagtttttgcattaggtacaagttgtttttatatagctctttttggctcccctgtaattggggtcctgagactgctgtcctgtttgggctactgtgttatgttcctgtagttaacatccccactgttttctttgtttgtttttttgtttgtttgtttgtttttttgagacggagttttgctcttcttgcccaggctggagtgcaattgtgtgatctcggctcaccgcaacctccgcctcctgggttcaagcaattctcctgcctcaacctcccgagtagctgggattacaggcatgcaccacaatgcccagctaattttgtatttttagtagagacagggtttctccatgttggtcaggctggtctggaactcccgacctcaggtgatcgcctgccttggcctcccaaagtgctgggattacaggcatgagccactgcgtctggccccaacatccccactgttttcatgtgtgaggaagtcaggttggagtggtggctgagagcatgagacaggctcgggttcaaatccagtctttacctaattagttacttaatctctttaagctttagtttcctcatctgtaacaataacattattatggaacattcactctatsccacacattctactacatatttacctcctagggttatctgaaatagtaaaggagatggatgtacttaggaggtctagtaacctctgacatatgttaattagtcagtaagtgttagctgttgtcatcagcagtgtgctcatttatgaatgtgatacctgaaggaaggcttgatgtaatagtgagctattgacagatctcagcagtcttgttatgaaagagcagtttcgctaagctcaagaaggaaagatgtttggctcacatgca

SEQ ID NO: 60965 - DNA, 1285 bp, Homo sapiens
gaaaatcttgctttagcaactcttgaggtcttttgtgttcttatgccccaaggctgtggtgttattactccctggagtattagttgtaggaactggttggggttcccatagtccagtccatgggcctgtttggcaggcagcttggccctgagccctgaggtatgcttgatgcttttttaggcccagatatagtaggcatgtgttctttcatgtgatgtgggttttaagaaaatgttcacttgcgtctacggccataccaccctgaacgcgcccgatctcgtctgatctcggaagctaagcagggtcgggcctggttagtacttggatgggagaaaatgttcacttgcgtttttccttgtctccttcttgccctttcttcttccctccacccaaaatactatttttagtttttgcattaggtacaagttgtttttatatagctctttttggctcccctgtaattggggtcctgagactgctgtcctgtttgggctactgtgttatgttcctgtagttaacatccccactgttttctttgtttgtttttttgtttgtttgtttgtttttttgagacggagttttgctcttcttgcccaggctggagtgcaattgtgtgatctcggctcaccgcaacctccgcctcctgggttcaagcaattctcctgcctcaacctcccgagtagctgggattacaggcatgcaccacaatgcccagctaattttgtatttttagtagagacagggtttctccatgttggtcaggctggtctggaactcccgacctcaggtgatcgcctgccttggcctcccaaagtgctgggattacaggcatgagccactgcgtctggccccaacatccccactgttttcatgtgtgaggaagtcaggttggagtggtggctgagagcatgagacaggctcgggttcaaatccagtctttacctaattagttacttaatctctttaagctttagtttcctcatctgtaacaataacattattatggaacattcactctatgccacacattctactwcatatttacctcctagggttatctgaaatagtaaaggagatggatgtacttaggaggtctagtaacctctgacatatgttaattagtcagtaagtgttagctgttgtcatcagcagtgtgctcatttatgaatgtgatacctgaaggaaggcttgatgtaatagtgagctattgacagatctcagcagtcttgttatgaaagagcagtttcgctaagctcaagaaggaaagatgtttggctcacatgca

SEQ ID NO: 60966 - DNA, 290 bp, Homo sapiens
aaagcatttgtaacatggctcttttctttttgtagttatttatagaagactacacttgagacttatcttgcccaataccctcattttattataggaggggtcttcaaaaagttcatggaaatgcagattatgaaaaaactatgcaaggacttcaaaattttttttgcaccaraggaaactcatactaacttgttataacatgcctgaacaggagctagtctgaggcaccaagaagggtaagatatcagtttgaaaacagcccctatcaaagtaacacaaattctgccaaa

SEQ ID NO: 60967 - DNA, 651 bp, Homo sapiens
ctggaactccctctttgagatgtaaactcaccaaacagattctaaatggcctaaaaatgactgctcagcattgtagacaggtgggtctcagaagccacaatcccattagcaacaggtggctctccaggagatgacagggaaacaggatgtcatctgtctgtccctctgggccacaccacatcctgcccttctccagggctctgtacctgaagctgacctgcagcactgcatcaacagattcccttgccctctcttgttggcatatggatggwtttagccaagtaggggacagcagcaggagaatggaatgaggaagaaaataaggtcaagcatttgtgcccctggctcccaccctctcagtttgcagcagacacactgacttctctacttgtggctgaagctccttgggcaaccctctccttagagttccctgttccattttcagccatcactccccgccactgcccttcaagttcagagatagaaatgggcaccccacaattcctagcctgaggggactgcagaggttgtttccctaaaacttgcccacactgttattaggctcttttcaaatcattcactgtgaaggtcctgttgccatccaaggaagagaagaagaaaagtgcaatgtccaaatgaggaagagacaca

SEQ ID NO: 60968 - DNA, 651 bp, Homo sapiens
ctggaactccctctttgagatgtaaactcaccaaacagattctaaatggcctaaaaatgactgctcagcattgtagacaggtgggtctcagaagccacaatcccattagcaacaggtggctctccaggagatgacagggaaacaggatgtcatctgtctgtccctctgggccacaccacatcctgcccttctccagggctctgtacctgaagctgacctgcagcactgcatcaacagattcccttgccctctcttgttggcatatggatggttttagccaagtaggggacagcagcaggagaatggaatgaggaagaaaataaggtcaagcatttgtgcccctggctcccaccctctcagtttgcagcagacacactgacttctctacttgtggctgaagctccttgggcaaccctctccttagagttccctgttccattttcagccatcactcyccgccactgcccttcaagttcagagatagaaatgggcaccccacaattcctagcctgaggggactgcagaggttgtttccctaaaacttgcccacactgttattaggctcttttcaaatcattcactgtgaaggtcctgttgccatccaaggaagagaagaagaaaagtgcaatgtccaaatgaggaagagacaca

SEQ ID NO: 60969 - DNA, 651 bp, Homo sapiens
ctggaactccctctttgagatgtaaactcaccaaacagattctaaatggcctaaaaatgactgctcagcattgtagacaggtgggtctcagaagccacaatcccattagcaacaggtggctctccaggagatgacagggaaacaggatgtcatctgtctgtccctctgggccacaccacatcctgcccttctccagggctctgtacctgaagctgacctgcagcactgcatcaacagattcccttgccctctcttgttggcatatggatggttttagccaagtaggggacagcagcaggagaatggaatgaggaagaaaataaggtcaagcatttgtgcccctggctcccaccctctcagtttgcagcagacacactgacttctctacttgtggctgaagctccttgggcaaccctctccttagagttccctgttccattttcagccatcactccycgccactgcccttcaagttcagagatagaaatgggcaccccacaattcctagcctgaggggactgcagaggttgtttccctaaaacttgcccacactgttattaggctcttttcaaatcattcactgtgaaggtcctgttgccatccaaggaagagaagaagaaaagtgcaatgtccaaatgaggaagagacaca

SEQ ID NO: 60970 - DNA, 651 bp, Homo sapiens
ctggaactccctctttgagatgtaaactcaccaaacagattctaaatggcctaaaaatgactgctcagcattgtagacaggtgggtctcagaagccacaatcccattagcaacaggtggctctccaggagatgacagggaaacaggatgtcatctgtctgtccctctgggccacaccacatcctgcccttctccagggctctgtacctgaagctgacctgcagcactgcatcaacagattcccttgccctctcttgttggcatatggatggttttagccaagtaggggacagcagcaggagaatggaatgaggaagaaaataaggtcaagcatttgtgcccctggctcccaccctctcagtttgcagcagacacactgacttctctacttgtggctgaagctccttgggcaaccctctccttagagttccctgttccattttcagccatcactccccgccmctgcccttcaagttcagagatagaaatgggcaccccacaattcctagcctgaggggactgcagaggttgtttccctaaaacttgcccacactgttattaggctcttttcaaatcattcactgtgaaggtcctgttgccatccaaggaagagaagaagaaaagtgcaatgtccaaatgaggaagagacaca

SEQ ID NO: 60971 - DNA, 811 bp, Homo sapiens
ccaagcaaaatcttcacttcagcacctcatgttcagaaatgccatgtgcaaaaatcagtctgctattggattctggagctggaaaggttccttgttgagtccaaaccctttatttcacaatatgcttaataggttcagaagatgatataacttgccaaagccaagtaatagcaaaatgagaaccagaacccaccccttctaattttttctactatactaccctaggaggatggacaaaggatgttaactccatttgaaatgagtccagagagccaacagggcttgcttgatgactcgcagtggttagggcagagtgagagcagggatccaggtttcctgactccacaggccatctgtaagcacttctcttatactttcttctcttttttatcagtctttgtctttttccctcaatcttccctccctgatcatttcctgcttctctctttatctttcttcttcagacactgcttaaactctgagagtcaaataccagagactctgcctgcctctggcaacatggacaactaatgctggtaatgatgaagataacaatgatgccaggggtggttatttactgagctcttgctcagcaccaggcactatgctgagggcctccatcgattatctcatttaacctacaaagcaaccttatggaataatattatgtgctcatgcacaaacagctatttattagatgtccaccatgccaaacattgggctaggagccgataacaggttagtgarttagttctctattgttgcaaagcagatattcccaagacttagtggcttaaaataatagccattt

SEQ ID NO: 60972 - DNA, 859 bp, Homo sapiens
gtgtgggctgattgattgatgaactgattgattctttaacatttgttgagcacctactgtaggccaaattctgcatggaatggaattttaagtatgacaagtggcacatgccagcctttgtatggaaacaacatcctgggtttcatccacttcctatgataaaccttcttcaaaactcatctagggaaacttcctcccaatctatacattccataatttaccacctggttgatatttttattggttttgctccaagagagcctagttgcagttgttcaaacagttttgcttagtcagcctgcaaatgaatttttaaaaatatcttggcaagtgtacaacttgcattggagaattctgcatgactttattgtgcttttacagagggtaggagtatatagaatggaatatatcacaaaacctttgtagtagttttggaagatgggggacaaattgctttgctcaggacatataaccacactaccacctggtggtaatgttgtacctgaaacccttgaataaaggtggccctgagcccaaatttttggtgaaatttatgaattggagagagatttttcatgtatgaaattaaaagggccaagcatccatgtaaaaccatatctcagaaatctgatgaaaattcagatcaatacttcccaattatcatctttaactgycatatttatggtgaatcataactgttctcagaagcaaagtgcttttcatgtgcctgacttgagataacattactattgcttccatttcacagctgagaaaacggaggctcaaagaggccatggaactgcccagggtgtagagttagcaaaatagggaagccaggactcaaacccacattttctga

SEQ ID NO: 60973 - DNA, 665 bp, Homo sapiens
agcagtagttctagtaaccttgattcaccctgtatctccctcagagagagagggaaagagagagaatctgatgacggaaataatttgtcatcagccaatatggcatgacagtgactatcctcaagataacttayagatggctgacttttattatgaagccctcttttcaattacatttacattgaatggcaactctttaatccaagggtcagcaaactttaatgaaaagggccagagaataaaaattttcagctttgcaggccatgcagtctaaaaacagtgactcagttccattgttgtagcacaaaagtaaccatagataatacacaaaccaatgagtgttgctgtgttccaataaaactttatttacccaaacaggtgcctgtggcctaaagtttccaactgttttaaccaatcgactgtggccagggtagtgggatcacagaatacaataatgacatcattatgcagaaggaactgtgttcttctcagaagaagaccacatgcttcatgctctgcaggtgttgagtgtttagtggactctctggggtggcactggagtcagtagctggggctatgcttgtcagaaacaggttctaaaaggtatctggtggtttttagtaaactaaattgcatttagttttgatactttttttctgatgtct

SEQ ID NO: 60974 - DNA, 736 bp, Homo sapiens
ccatgttataatgtagcatgaggccttcaccagacacagagcagattttagtgctatgcttcttagacttcccagtctcaagaatcatgagccaagtaaaccttttttttttaataaattacccaatttcaggtattctgttatagcaacacaaaacagactaagataagggattggagggatagagaaatgaataggtggagtccagaggatctttaggatcctatcatactatctatcatattctgtatgatactataaaggtaaatacacatcactttaaatttattcaaacccacagaatgtacaccaccaagagtgaacctcgatgtaaagtattaactttgtatgataatgaagcgtctatgtaggttgatcaggtagaacagatgtaccgctttgktgggggatgttgataatggagaatctgtgcatgtgttgaggaagaatgggatatctttatgccttcctctcaatttttctgtcactctaaagctgctctaaaaaagtaaattcttctaatgatacagtggactttggggacttgggggaaaggatgaggcataaaagactacacattgggtacagtgtacattgcttgggctatgggtgcaccaaagtctcagaaatcaccactaaagaacttattcatgtaaccaaacaccacctgtttcccaaaaacctattgaaattaaaaataaattaaacaacaacaacaaaatggcagtttattaat

SEQ ID NO: 60975 - DNA, 736 bp, Homo sapiens
ccatgttataatgtagcatgaggccttcaccagacacagagcagattttagtgctatgcttcttagacttcccagtctcaagaatcatgagccaagtaaaccttttttttttaataaattacccaatttcaggtattctgttatagcaacacaaaacagactaagataagggattggagggatagagaaatgaataggtggagtccagaggatctttaggatcctatcatactatctatcatattctgtatgatactataaaggtaaatacacatcactttaaatttattcaaacccacagaatgtacaccaccaagagtgaacctcgatgtaaagtattaactttgtatgataatgaagcgtctatgtaggttgatcaggtagaacagatgtaccgctttggtgggggatgttgataatggagaatctgtgcatgtgttgaggaagaatgggatatctttatgccttcctctcaatttttctgtcactctaaagctgctctaaaaaagtaaattcttctaatgatacagtggactttggggacttgggggaaaggatgaggcataaaagactacacattgggtacagtgtacattgcktgggctatgggtgcaccaaagtctcagaaatcaccactaaagaacttattcatgtaaccaaacaccacctgtttcccaaaaacctattgaaattaaaaataaattaaacaacaacaacaaaatggcagtttattaat

SEQ ID NO: 60976 - DNA, 3292 bp, Homo sapiens
ttttttttgagatggagtctcactttgtcacccaggcttgagtgcagtggcacgatcttggctcactgcaaactctgcctcccgggttcaagcaattcttgtgcctcagcctcccaaataggtgggattacaggcacacaccaccacgtccagctaatttattgtattttttagaagagacggggtttcactatgttgatcaggctggtcttgaactcctaacctcagatgatccrcccatcttggcctcccaaagtgctgggattacaggtgtaagccactgagcccagctgagtcaacaaattttaattgaaaatttagtagatggagaagactttaaagtattatgaataatataaagatacatttaacataatgtcaatccttaaggaagcctaagtctatcatataaataagacatgaacacaaaaactatactgcaaagaacaaagtgataataaataccgtagagaagaggaaatacattgccaattgttttcagaatattaaaagattaaatatggatagagggatggaaggatgagaaagtcaatttcatggagtttctctatttgagcttgtcttgcaaaatcaagagatcagtgaaaaagcctggtgggaagacaagacttgaactggacctgtaggatgaatttgaatggcagaatgagagtctctctagagggatccgtctcacccacctcctgttacccacctctcatgtggctcacttctctttggttgtctggtcactgattggacagtaatttctctgggaagccttcactgctcattcatacctcccacttcactaccgtgtattcctatagtgccccctatttatatctacttatctcaaccccttccttgttaatttggtgtaattttgaaaatgtggaaatgatgggaaagacccttacagactacatgaacctggatatacttgggagacctgataattcagtaagcctaattatttcaggaaatggagaaaagtgaatgatggaaattatttcaaaattcaatgccaccaataggtatcactgagaaaataagtagtcatattgcaatagctatataaataaaggcactaatgcttaagagacacctatactaaaaatgtgtagggcacacatcaaggtgatcccagccaacagttgatatttttctgagttgtcattgcttatactttgcaagctagagaagcttgcaaaactcttgctcctggggcatattttggcagatgtgttactttaaacttatagatgtgctttatctaacttttacatcttaaattagagagaaggaaacagtaagttttctgaacaggctgataatagactaccctgcaggaccaattttcctgaacaaattaactgatacataattattaggacatctccaaaatagtggaattttcaaccatgtgtttacaatgtcaaaatgagtgagcaccaccaacttctaacaaaaaatcctgtaattccagaatctaatgagcccatgcagctgactgtcacagggaagtactctttagcagatctgtgaagcatcctctacatcataaacttcctgttttcactgcgttgggtgattctataccaaatggcaaagtataacaattcactttagaaaagcaaaacccacctcctcagctttgagcagaggataactgaatgtcttgaagcacagtgaaatggatttcatgttcctaatgagaaaaatgaggcctcctgtgttgtttcttttgtttggactttctggaaataaaatgggaactccctttttagaatcagtcatctgccacctgagaagaggcttgaaaaagtgctctactccccttcttcacctgcgcttttgtttttttctacagtcatcccctgaaaacctgtgctctgcatttaccaccatgctgtgaatgtttaatgaacaactgttttctgtgttaggccacaggctagccttgaactcttgtgactgctgccagcagctgcctagcagctgtgcttaatgagaaggagcatgacaatatagactttaaggaaagtagaaggcactagaggattaacgaaccttttacttctggatttctcactcaaaaacagcttcaaataatgggaaatgttacatgtctgactgcagtttaaggggtgctgttgtatggcatttgactaagacacccaggaatgacaaaatcccaccccaaatctgtgatattccccctgagaggtttataaagaaatgcataaacaagcaaacagaaaataaggtaccactatggatttatgcccgtaatatctgatgaaccagactgaagcacgtgaattatgcccaaacctaaagggactgtgtctcctctcccaaggctatatcttcctatcagctggccaccaaaagtgaggagagccctgggaccttcatcagtgaggaaaagatagagagagaaaaactatacctttcctatgatgtcaatcaagagaccagtgaaaacgcctgatgggaagacaagacttgaagtggaactttaggatgaattttaatggcagaatgagattctctctagagggatccgtctcacccatctcatgttacccatctctcatctggctcacttctcctcgtctgtcttgtcactgattggacagtactttctctgggaagccttcactgctcatttatacttcccacctcattaccatgtattcccatagtgccctctatttatatctacttatctcagccccttccttgtttatctcccccattagacattgagtttttagatggcagagactttgcataagtcccctctacttactacaactgcatggtaaacatatgaaagtgaatgaatgaaaggaattctaggtgaaaggagtgctacacaggagcagttggtgaggacccagaacactgaggagaccaatctaacagtcatctggggttcagaaagatcttaaaagctagaaagatgcaaacaaaaattcaccagttttttgtttgtttgtttgttttgagacaaagtctcactctgtagcccaggatggagtgcagtgatgcaatctcagctcactgcaacttccgcttcccgggttcaagcaattctcctgtcttagcctcccgagtaactgggactacagtcatctgccaccatgcccagctaatttttgtatttttagtagagacagggtttcaccatattagccaggctggacgcgaactcctgccctcaggtgatctacccacctcagcctccaacgtgtgggattacaggcttgaaccaccactccca

SEQ ID NO: 60977 - DNA, 3292 bp, Homo sapiens
ttttttttgagatggagtctcactttgtcacccaggcttgagtgcagtggcacgatcttggctcactgcaaactctgcctcccgggttcaagcaattcttgtgcctcagcctcccaaataggtgggattacaggcacacaccaccacgtccagctaatttattgtattttttagaagagacggggtttcactatgttgatcaggctggtcttgaactcctaacctcagatgatccacccatcttggcctcccaaagtgctgggattacaggtgtragccactgagcccagctgagtcaacaaattttaattgaaaatttagtagatggagaagactttaaagtattatgaataatataaagatacatttaacataatgtcaatccttaaggaagcctaagtctatcatataaataagacatgaacacaaaaactatactgcaaagaacaaagtgataataaataccgtagagaagaggaaatacattgccaattgttttcagaatattaaaagattaaatatggatagagggatggaaggatgagaaagtcaatttcatggagtttctctatttgagcttgtcttgcaaaatcaagagatcagtgaaaaagcctggtgggaagacaagacttgaactggacctgtaggatgaatttgaatggcagaatgagagtctctctagagggatccgtctcacccacctcctgttacccacctctcatgtggctcacttctctttggttgtctggtcactgattggacagtaatttctctgggaagccttcactgctcattcatacctcccacttcactaccgtgtattcctatagtgccccctatttatatctacttatctcaaccccttccttgttaatttggtgtaattttgaaaatgtggaaatgatgggaaagacccttacagactacatgaacctggatatacttgggagacctgataattcagtaagcctaattatttcaggaaatggagaaaagtgaatgatggaaattatttcaaaattcaatgccaccaataggtatcactgagaaaataagtagtcatattgcaatagctatataaataaaggcactaatgcttaagagacacctatactaaaaatgtgtagggcacacatcaaggtgatcccagccaacagttgatatttttctgagttgtcattgcttatactttgcaagctagagaagcttgcaaaactcttgctcctggggcatattttggcagatgtgttactttaaacttatagatgtgctttatctaacttttacatcttaaattagagagaaggaaacagtaagttttctgaacaggctgataatagactaccctgcaggaccaattttcctgaacaaattaactgatacataattattaggacatctccaaaatagtggaattttcaaccatgtgtttacaatgtcaaaatgagtgagcaccaccaacttctaacaaaaaatcctgtaattccagaatctaatgagcccatgcagctgactgtcacagggaagtactctttagcagatctgtgaagcatcctctacatcataaacttcctgttttcactgcgttgggtgattctataccaaatggcaaagtataacaattcactttagaaaagcaaaacccacctcctcagctttgagcagaggataactgaatgtcttgaagcacagtgaaatggatttcatgttcctaatgagaaaaatgaggcctcctgtgttgtttcttttgtttggactttctggaaataaaatgggaactccctttttagaatcagtcatctgccacctgagaagaggcttgaaaaagtgctctactccccttcttcacctgcgcttttgtttttttctacagtcatcccctgaaaacctgtgctctgcatttaccaccatgctgtgaatgtttaatgaacaactgttttctgtgttaggccacaggctagccttgaactcttgtgactgctgccagcagctgcctagcagctgtgcttaatgagaaggagcatgacaatatagactttaaggaaagtagaaggcactagaggattaacgaaccttttacttctggatttctcactcaaaaacagcttcaaataatgggaaatgttacatgtctgactgcagtttaaggggtgctgttgtatggcatttgactaagacacccaggaatgacaaaatcccaccccaaatctgtgatattccccctgagaggtttataaagaaatgcataaacaagcaaacagaaaataaggtaccactatggatttatgcccgtaatatctgatgaaccagactgaagcacgtgaattatgcccaaacctaaagggactgtgtctcctctcccaaggctatatcttcctatcagctggccaccaaaagtgaggagagccctgggaccttcatcagtgaggaaaagatagagagagaaaaactatacctttcctatgatgtcaatcaagagaccagtgaaaacgcctgatgggaagacaagacttgaagtggaactttaggatgaattttaatggcagaatgagattctctctagagggatccgtctcacccatctcatgttacccatctctcatctggctcacttctcctcgtctgtcttgtcactgattggacagtactttctctgggaagccttcactgctcatttatacttcccacctcattaccatgtattcccatagtgccctctatttatatctacttatctcagccccttccttgtttatctcccccattagacattgagtttttagatggcagagactttgcataagtcccctctacttactacaactgcatggtaaacatatgaaagtgaatgaatgaaaggaattctaggtgaaaggagtgctacacaggagcagttggtgaggacccagaacactgaggagaccaatctaacagtcatctggggttcagaaagatcttaaaagctagaaagatgcaaacaaaaattcaccagttttttgtttgtttgtttgttttgagacaaagtctcactctgtagcccaggatggagtgcagtgatgcaatctcagctcactgcaacttccgcttcccgggttcaagcaattctcctgtcttagcctcccgagtaactgggactacagtcatctgccaccatgcccagctaatttttgtatttttagtagagacagggtttcaccatattagccaggctggacgcgaactcctgccctcaggtgatctacccacctcagcctccaacgtgtgggattacaggcttgaaccaccactccca

SEQ ID NO: 60978 - DNA, 1596 bp, Homo sapiens
ggaactcatttattgcagtggaggtaacttcagagactgttgactatttcttgctatttagatctgtagggttatcttgtcttctgacttttccaaattcagacctctggactatctgttgattctgtgagtacttccatattcttccagaaaactctcttttttattagagaaatgatttctattgtttgcaataaaatttttaattaagtcaccatttttaaggccccacttgaactcttcctgccacacaaagtccttcctgagcaccccaggtcacagtgatcaacccatcaggtgagcatggatagattttaacatctgatccattcctttaacatgtctcggtcagtcattcaaatacttactgaccatgaactatgaatcccattctgtgctaccatataatttttaaaaagtctgttatctctcttgctctgcctttttaggagaatagcttagttttataagtagacaattgctttcttcaaagtcagtgctgtcacaaacataaatgtttctcccttggtgcctgacatgtgcagaaaacacatttttttcttactgattgacaaaagttgtctctcctatcaaagatgtttaaggagaatatcactacaataacaggactacttggtactaactaaattaataaaaaaacaataactaagaacataaaatgtagttctaaagaactcttcatcacattctaacttgcttgcttagatagttttaatagcaaaccatcggttaatgtgctaatttccagaagttgagtgtggaatctcatcttttagtagatagcactgccattttcctgaattaatttgaaagattcccaagacttcaacttatccctaagttaaagggatgttatcccttcaacatattatccctaagagctgtcattagcatcattcaagcacactgtcacctagttcatttgaaaatgtaagagccaggcagtgcagtagatttatttaactctcaactccacatyctattttaaatataattgggagtgggaggtagggggagaattaatgtaagcttctgtatttagcaatgacaacaaaaacctcaaataactaccaagcagccattcatagaatcattgggatcctggctgttattctatctatggggcagtcatggatataaagcaatggggaatattaggtaacaatatcttgaagagtggaagagagaataaagaaaagaaagcacctaccttcttttccagtctatcaattaatttctggagtctatttatctgggtcatccactggttgtcttcttctaataagcctggggccagggggaatcatgagggcaatatgttaaactttagacagagaagaaatgcttggttatatcagagctttccttcaaccctgaaggaaagatgcagtgtcactgactggtcatttttttaaaatgtattcacgagtgctttctaaggtattgatttccatagatccatgcatcccaggggttcacttccacaggcctgttttttaatgtaattgcccatatggcctctgatattcaaagaaaagatcctgctgagccatttacaaaaccccgcgatgtagt

SEQ ID NO: 60979 - DNA, 771 bp, Homo sapiens
tatttagtgactgacagtcagcttatttatccatgaaataaatactatctgacatctgtaatcttgtataatcaagtagctgtaggtagttgactcaaactaacaagtaagttgtaggttggctccttagttttaaaaagtattagtaacatggatcttactctaaataaatttttagaaattgattattactaaagcttgacttaccgcaatcttcaattctgtaataacagttatgtgaggaaagaatgagtctactgaaatggatactagctgaagaagtagttcaaattccaacctggccgcaagctgcaagtaataggaccttgggcagattattctctgaaactctgatctttatgtagtttcttcatcagcatgttagaaacatttggattcagtggatttgtaaggccctttttgtccctgacattctgtgattctgtggggtggactttgagcaggtccttgaagagtgagtaggagttaagcaaattaaaacagagaagaagaatattccaggcagagggcaatgaagaatgtctttatgaggaattaaggaaggaacaattggtgcaagagagggttacttcaccatygctttttcctttgccctagccccctttagtacatttttaaaaagataattttacaaggtatttctaaggtatgttgggaaatgttatatatatatatatatatatatatatatatatatatatatatatatatatatataaaagtgtagctaccaaagggatatatatatcc

SEQ ID NO: 60980 - DNA, 680 bp, Homo sapiens
ggtgggtgttgtaccatgtggagttagttgtatgtttgtgggaagaaagctgtgggaggctggtgtgatgtgtctggaactcacatcagtgtatgagttaaggatgagtcaaatgtgtacctaacaggcggcaacatctttatatgtgcataagtgcagcaaaatttattctctgtatacctggaattagatttgagcctacccattgaaaaacccaaggaatcacttccattattaccttcacagttaaatataaaccaaaagtagtcatggtagcacaagaggtaccaattttcaaaactatggaaactctatttccatcactaccaaggaatgcaagcaaactttctaatttrcttccagtttagaatcagtggtgcatttcaacatgctgtgcacaaaagaatgtcagagaaaaaattaaaatatataggacagactcagaatttagcatagaattatgtttatcttaaatgtttaaaatttgttcttaataatatgatacatagtgcagagtttaaataaattgaaaacatacttttaattactcattactactaataatattgctttgagagtttattaatcaatgtattgcacattagttgaagcctattaattattcctaggtgtacaaagtgaataacatcttcttctggccctgcaatctactctaaatt

SEQ ID NO: 60981 - DNA, 1315 bp, Homo sapiens
catttgcttctgttatgtattgtctcttcctttcctctatcttcttgaatttctgattttgataatattccctttactataatctccgtgggattttggagrcagcaaacagaaatatacttattcaatccagcatgtttgatcttaatgtgtaattcctcagaaataagtcaacacggtaaaaataaaacaactttgggctaaggagacttagttcaaatactgagtctatgtcacactgatgacagcataataatgacgttacatattttctctgaagcattgtttcctcaatggggaaacatacataataatatctatttcataaatgagaaaagacagagacagtgcttttttggcttgcttctttgtggctgtattcatcaacatcatcatcatccaggctcgaaataaaaacaatatggtccaaagtgtctattgttctacctttccaatcagaaagaatttgctttgaagagaacacgaatcacaattttggagttgattacatctgaaatatagatgagaaggctgaattcagttttgaagattgagtgggatgaggtgatagtgaatagagggagcataaaatcgcagtggtataataagtatttaaatccatagaaatgagatttgtgggctgcacatgttggttcaccccataacctcagccctttggtaggctgagatggaaggatcacctgaggtcaggagtttgagaccagcttggccaacatagtgaaaccccgtctctactaaaaatacaaaatttatccaagcatggtggcgtgcctatagtcccagctacttgggaggctgaggcagaagaattgcttgaacccaggtggcagagttttcagtgagccaagatcgtgccactgtattccagcctaggagacagagtgagactctgtctcaaaaagaaaaaaaaaatgagatttgtggtttaattagagtgtattaaactacaaatctattgtttaataagagttttcacaacagttatatcattcctttaatactagcagtattggaaggctgagtcaggaggatcaattgagccctaggagtttgagaaatgacatttgtgaggtgtcacaagttatttatgatacttaaggagaaattacatatatatatatacacacacacacatatcctatcatatgtatatacacatacatatcctatgtatgtatatatgtatatatgtttatgtatatatgtatatgtatatatgtacatgtatatgtatatatgtatacatgtaaatgtatatatgtatatgtatatatgtatatacatatatgtatat

SEQ ID NO: 60982 - DNA, 1315 bp, Homo sapiens
catttgcttctgttatgtattgtctcttcctttcctctatcttcttgaatttctgattttgataatattccctttactataatctccgtgggattttggaggcagcaaacagaaatatacttattcaatccagcatgtttgatcttaatgtgtaattcctcagaaataagtcaayacggtaaaaataaaacaactttgggctaaggagacttagttcaaatactgagtctatgtcacactgatgacagcataataatgacgttacatattttctctgaagcattgtttcctcaatggggaaacatacataataatatctatttcataaatgagaaaagacagagacagtgcttttttggcttgcttctttgtggctgtattcatcaacatcatcatcatccaggctcgaaataaaaacaatatggtccaaagtgtctattgttctacctttccaatcagaaagaatttgctttgaagagaacacgaatcacaattttggagttgattacatctgaaatatagatgagaaggctgaattcagttttgaagattgagtgggatgaggtgatagtgaatagagggagcataaaatcgcagtggtataataagtatttaaatccatagaaatgagatttgtgggctgcacatgttggttcaccccataacctcagccctttggtaggctgagatggaaggatcacctgaggtcaggagtttgagaccagcttggccaacatagtgaaaccccgtctctactaaaaatacaaaatttatccaagcatggtggcgtgcctatagtcccagctacttgggaggctgaggcagaagaattgcttgaacccaggtggcagagttttcagtgagccaagatcgtgccactgtattccagcctaggagacagagtgagactctgtctcaaaaagaaaaaaaaaatgagatttgtggtttaattagagtgtattaaactacaaatctattgtttaataagagttttcacaacagttatatcattcctttaatactagcagtattggaaggctgagtcaggaggatcaattgagccctaggagtttgagaaatgacatttgtgaggtgtcacaagttatttatgatacttaaggagaaattacatatatatatatacacacacacacatatcctatcatatgtatatacacatacatatcctatgtatgtatatatgtatatatgtttatgtatatatgtatatgtatatatgtacatgtatatgtatatatgtatacatgtaaatgtatatatgtatatgtatatatgtatatacatatatgtatat

SEQ ID NO: 60983 - DNA, 1315 bp, Homo sapiens
catttgcttctgttatgtattgtctcttcctttcctctatcttcttgaatttctgattttgataatattccctttactataatctccgtgggattttggaggcagcaaacagaaatatacttattcaatccagcatgtttgatcttaatgtgtaattcctcagaaataagtcaacacggtaaaaatraaacaactttgggctaaggagacttagttcaaatactgagtctatgtcacactgatgacagcataataatgacgttacatattttctctgaagcattgtttcctcaatggggaaacatacataataatatctatttcataaatgagaaaagacagagacagtgcttttttggcttgcttctttgtggctgtattcatcaacatcatcatcatccaggctcgaaataaaaacaatatggtccaaagtgtctattgttctacctttccaatcagaaagaatttgctttgaagagaacacgaatcacaattttggagttgattacatctgaaatatagatgagaaggctgaattcagttttgaagattgagtgggatgaggtgatagtgaatagagggagcataaaatcgcagtggtataataagtatttaaatccatagaaatgagatttgtgggctgcacatgttggttcaccccataacctcagccctttggtaggctgagatggaaggatcacctgaggtcaggagtttgagaccagcttggccaacatagtgaaaccccgtctctactaaaaatacaaaatttatccaagcatggtggcgtgcctatagtcccagctacttgggaggctgaggcagaagaattgcttgaacccaggtggcagagttttcagtgagccaagatcgtgccactgtattccagcctaggagacagagtgagactctgtctcaaaaagaaaaaaaaaatgagatttgtggtttaattagagtgtattaaactacaaatctattgtttaataagagttttcacaacagttatatcattcctttaatactagcagtattggaaggctgagtcaggaggatcaattgagccctaggagtttgagaaatgacatttgtgaggtgtcacaagttatttatgatacttaaggagaaattacatatatatatatacacacacacacatatcctatcatatgtatatacacatacatatcctatgtatgtatatatgtatatatgtttatgtatatatgtatatgtatatatgtacatgtatatgtatatatgtatacatgtaaatgtatatatgtatatgtatatatgtatatacatatatgtatat

SEQ ID NO: 60984 - DNA, 339 bp, Homo sapiens
aaaagggtacaatctctcaactgtttaactcagaggcttttgtgatcttggaataggataatttattaaaaagtgtcatgtctagcataatatataaagaattttagacccatgaaatagatagaaatgagtaaatctgataggtcagatgataaaataatttaataataaaagacagatatttttcccttccctgtagttttcttttccttctcccatcyagataccagtagaatttaaaagttgcttccttatttttgttcttatagaattatatgtatatatatttctctttttctgcaacaatagtcttacattatagtttagtcatgggtttat

SEQ ID NO: 60985 - DNA, 958 bp, Homo sapiens
atttacacagcatctcagaattttccaccacaacagaggaaagcagtatttatccacagattcccatgtcttacagattaacagttgtccttggatcattatatcccaaacacttctgggctgtcctgcagtgggctcagcaaatttccatgctgccagagtcagcccttgggcagagaagcaagaggccagatacacaagcttttgcagtgcaatcatgctagtcagcatagaaaayacccatcaccatagctgtaagtgaattcagaggtaggtcaatatgatatgagatggggcatcaacagtgtctgctgcaagcagtgagaacaagaggaatggagaaaaacaggaggaggcttcaggaaagggaagccttataaaagcattgtacatcttgtaatgattttaagttaaatgtggaaccattagagggttatggaatcatatatatggctgtggtattgaagatagactgtggttgatggagtagaagcaaacttagggacaggaagaactgtagaaagctgttaaagtaattctggcaagagataaagatgacttagatcagggtggtgctgggcaagtggtgataagtggatcagattctgcatatattgcttaaggtgaagacttttccattttaaactgtactagaagtacttaacattcattaagaggagaaaaataaacaaatacctaaggattagaaagaatataaagctattttccaatactgatgacttgattgtctacctggaaaattccaaatacactgcagcctaattatgagaaataaccagaaagtttggcaaggtgggttgctctgaaattaatatttaaaaaatcaattgcattttatacatccacaacacatagaatatataattctttgaaaatgcagtatgtacattagcaactgatgtggtacctaggaatatatccaatagaagatgtgtaa

SEQ ID NO: 60986 - DNA, 646 bp, Homo sapiens
gtactttttctttgtagttatctcatattattgttagtgaaaattgaaaatgtcyctgtgctctgataaattacccagttgtttgcttcttgagggccaccattacttaaaattagaaaacttgctggatcttaagatttttagtattttaaaatgaaaatgtttacattggtgaccatattttaatatttaactattcaggggaaatataataattctgctgtaattacctgttgaaatagaacaatttctaaattacatttgatgatgatttttagctcaattaccagaaatttgaggttatattcttccttagccctgtttacatacaaatcttttcactgtagtacaaggagaaatgagggtccctgaagaagctcttaaggtaacagtttttacttaacttcttttgcaaatctactattcactatggttgattttacttcttgatgtttcacttccatttttaaatgttttatagcatgagaagtttaccattcagcttcagttgtcccaaaaatcttcagaatcagaattatccaaatctgcaagtgccaaaagcatagattcaaaggtagcagacgctgctactgaagtgcagcacaaaactactgaagcactgaaatccgaggaaaaagccatgggt

SEQ ID NO: 60987 - DNA, 646 bp, Homo sapiens
gtactttttctttgtagttatctcatattattgttagtgaaaattgaaaatgtccctgtgctctgataaattacccagttgtttgcttcttgagggccaccattacttaaaattagaaaacttgctggatcttaagatttttagtattttaaaatgaaaatgtttacattggtgaccatattttaatatttaactattcaggggaaatataataattctgctgtarttacctgttgaaatagaacaatttctaaattacatttgatgatgatttttagctcaattaccagaaatttgaggttatattcttccttagccctgtttacatacaaatcttttcactgtagtacaaggagaaatgagggtccctgaagaagctcttaaggtaacagtttttacttaacttcttttgcaaatctactattcactatggttgattttacttcttgatgtttcacttccatttttaaatgttttatagcatgagaagtttaccattcagcttcagttgtcccaaaaatcttcagaatcagaattatccaaatctgcaagtgccaaaagcatagattcaaaggtagcagacgctgctactgaagtgcagcacaaaactactgaagcactgaaatccgaggaaaaagccatgggt

SEQ ID NO: 60988 - DNA, 646 bp, Homo sapiens
gtactttttctttgtagttatctcatattattgttagtgaaaattgaaaatgtccctgtgctctgataaattacccagttgtttgcttcttgagggccaccattacttaaaattagaaaacttgctggatcttaagatttttagtattttaaaatgaaaatgtttacattggtgaccatattttaatatttaactattcaggggaaatataataattctgctgtaattacctgttgaaatagaacaatttctaaattacatttgatgaygatttttagctcaattaccagaaatttgaggttatattcttccttagccctgtttacatacaaatcttttcactgtagtacaaggagaaatgagggtccctgaagaagctcttaaggtaacagtttttacttaacttcttttgcaaatctactattcactatggttgattttacttcttgatgtttcacttccatttttaaatgttttatagcatgagaagtttaccattcagcttcagttgtcccaaaaatcttcagaatcagaattatccaaatctgcaagtgccaaaagcatagattcaaaggtagcagacgctgctactgaagtgcagcacaaaactactgaagcactgaaatccgaggaaaaagccatgggt

SEQ ID NO: 60989 - DNA, 646 bp, Homo sapiens
gtactttttctttgtagttatctcatattattgttagtgaaaattgaaaatgtccctgtgctctgataaattacccagttgtttgcttcttgagggccaccattacttaaaattagaaaacttgctggatcttaagatttttagtattttaaaatgaaaatgtttacattggtgaccatattttaatatttaactattcaggggaaatataataattctgctgtaattacctgttgaaatagaacaatttctaaattacatttgatgatgatttttagctcaattaycagaaatttgaggttatattcttccttagccctgtttacatacaaatcttttcactgtagtacaaggagaaatgagggtccctgaagaagctcttaaggtaacagtttttacttaacttcttttgcaaatctactattcactatggttgattttacttcttgatgtttcacttccatttttaaatgttttatagcatgagaagtttaccattcagcttcagttgtcccaaaaatcttcagaatcagaattatccaaatctgcaagtgccaaaagcatagattcaaaggtagcagacgctgctactgaagtgcagcacaaaactactgaagcactgaaatccgaggaaaaagccatgggt

SEQ ID NO: 60990 - DNA, 646 bp, Homo sapiens
gtactttttctttgtagttatctcatattattgttagtgaaaattgaaaatgtccctgtgctctgataaattacccagttgtttgcttcttgagggccaccattacttaaaattagaaaacttgctggatcttaagatttttagtattttaaaatgaaaatgtttacattggtgaccatattttaatatttaactattcaggggaaatataataattctgctgtaattacctgttgaaatagaacaatttctaaattacatttgatgatgatttttagctcaattaccagaaatttgaggttatattcttccttagcccygtttacatacaaatcttttcactgtagtacaaggagaaatgagggtccctgaagaagctcttaaggtaacagtttttacttaacttcttttgcaaatctactattcactatggttgattttacttcttgatgtttcacttccatttttaaatgttttatagcatgagaagtttaccattcagcttcagttgtcccaaaaatcttcagaatcagaattatccaaatctgcaagtgccaaaagcatagattcaaaggtagcagacgctgctactgaagtgcagcacaaaactactgaagcactgaaatccgaggaaaaagccatgggt

SEQ ID NO: 60991 - DNA, 646 bp, Homo sapiens
gtactttttctttgtagttatctcatattattgttagtgaaaattgaaaatgtccctgtgctctgataaattacccagttgtttgcttcttgagggccaccattacttaaaattagaaaacttgctggatcttaagatttttagtattttaaaatgaaaatgtttacattggtgaccatattttaatatttaactattcaggggaaatataataattctgctgtaattacctgttgaaatagaacaatttctaaattacatttgatgatgatttttagctcaattaccagaaatttgaggttatattcttccttagccctgtttacatacaaatcttttcactgtagtacaaggagaaatgagggtccctgaagaagctcttaaggtaacagtttttacttaacttcttttgcaaatctactmttcactatggttgattttacttcttgatgtttcacttccatttttaaatgttttatagcatgagaagtttaccattcagcttcagttgtcccaaaaatcttcagaatcagaattatccaaatctgcaagtgccaaaagcatagattcaaaggtagcagacgctgctactgaagtgcagcacaaaactactgaagcactgaaatccgaggaaaaagccatgggt

SEQ ID NO: 60992 - DNA, 919 bp, Homo sapiens
ctctcacattcaactggtcatgattctatgaattctacatgttaattatccctcaaatcctgctttcacagctgctgtagcctcagctgactatggagaaatacagacttctccctccccatccctcaccacagggttgaaaatgagactagaaaattgaaggcagctatagtgtctgatatgttagaagactcagtcatcatggaaattatgcttggcctgcattatggagtgcatccagttcttcctaatccattacatagaatgacattagctcttcaaatagamcctgccagatgctaaaagccattgtaggtttgtcacctatatttccccggagataattccttcttattcatagctttgtgtcctactactcaatctaatttacatagtccaactcccaggaaacagtagtaccttattcctggttctatacatagcccattgaattaaagtctgtaattaagaaccatagccgtatttatctcttacacggcatgttacagctcaacctgccctgaacaaaataaataacactttaaattacaaattgcagatctgtgctcaacaaagaggagctcttttccagtgtatattattgattatgttttccttgggtaatttttgtctatcaactaactcattttgtaactggtaattcagggttttttttttcccccttaagaagtaaactcacaaagtgagtctgactgaatgtaggccataggttctttaatatgtaattattacaataagtagtgcatcactgcagtactttgcatgcgccagtgaatatgcatcagcaattaaggactccaggtcctggagaatgaaataaacattagcaatttttgcaatctgttgaggccaagaagaattctccaatagagtagtaaattttaaatggaaatgtttg

SEQ ID NO: 60993 - DNA, 1153 bp, Homo sapiens
cttcccagaatggccaaattaggccaagtctgaaccataaaattgtggaaactggacttgctgacctcccgtctccccacctggatgttctcagcctcaatatgcagtttaattctagaacgcaggctatacaattaatcccatcctaatcagggtcgggcaatgaggagaaattctgtttactctggtcgcaaattcagttgatttgacatcaaatctgattgttggaccccttctgagtgtcccctgggaagaactcagatctattgtgagctacttgaggatggagatctttgcatcccttgggcctaacccagaggcctgcatatataaatgctcaattaataataataaattaccacttgttgagtgccaattatgtgccagacactgtgctatcccgtttagtcctctcaataacgctatgaaataggtgttattatgatccatstttatgaataagaaaactacatcttagattaagtaatttgtctaagttcatacagctcctatgtggcaagattaagttaaaactcaggcctgtctaattccagaactgatctataaccacttacacatattctgccatatgcatgtacacaataaatcattccttcacatttcactgtattctaaaaaaatgtttgtgattacttttcacaaatacagctagtagaactcaattgggagtattgagtttcaggaaaaataagagtggaaagtcaaattgttaagtgcatcgtcagtccaaatgaggtcagtggcagcacttggggaacaatctgaggtactccttgaggtttggtccttggactcttgaagcaggcaaggctgtggacaactggtttgaatgggacaactgccagagaaagtcccatcaagctatgatgaccacagaaaagttgaccaaagaccatggagggtgacctgcaagtggaccaagcctgtcaataggattttgggaacagatcccacagatctggtaccatgctgcctcattttctcccaagtgggtcagtgtttggagtctagaaacaacatgttttaacaactcaaaattcttcattgggttggggcgttatcaaagccagttacagcccatatcctttttatctgcccctcctgtaaaaggcaaccaagctcatggattcct

SEQ ID NO: 60994 - DNA, 1182 bp, Homo sapiens
tgttcaaaaattaagagtaaccactataagaactgatagatggtaggccttacaaatcaatagagggtagaaagagagggaataaataaaactcaatccaatggcaggcaggaaaaaagaaaacaaaaagaaaaactagagtaagtagaaggcataaaataagaaggtagaaacaaatacaaatatatcaataaatgaaataattacaaatgaaacaaactcaccacttaaaaaacagaagatcttggccgggcgyggtggctcatgcctgtaatcccagcactttgggaggccaaggcgggtggatcacctgatgtcaggagtttgagaacagcctggccaacatggtgaaaccctgtctctactcaaaatacaaaaattagccaggtgtggtggtgcacacctgtaatcccagctactcaggaggctgaggcagggagaattgcttgaacccacgaagcggaggttgcagtgggccgagactgcgccactgcactccagcctgggcgacagagtgagactttatctcaaaaacaaacaaacaaacaaaaaacccagaagctctcaaactggctacaaaacaaaatgctatttaggggagttatttcaaaaacataggaactgagaatgatgaaaataaagaaaataaaaaataaaaatggaaaattaaaaaaagaaaatatataaatgaaaataccgatcataagaaaactagtatagatatgttagtaagataatacaggttttatttttgttaagtaaaaagagggttattaaataatgataaaacaataaagcaggaagctaaaataattatgaatttttatgcagccttaaaatacacagagcaacactggtagaatcataagacagaattgacaagcctataatcataatgggaggctaacatttttctcagtattagtagaccaaataggcaaaatttaataaggatataggagatttgaagaacaaaattaatgagcttaattcaatggaaatatacagagctttaaacataatcatttaagaatgcaaattcttttcaagaatacctggaacagttctaaaatttgaccacacactaagccacaaagtgaagactcattatcaaacagctatattgtctgtctccaatttaataaagttaggcatcattaatgaaaaggtaaccagccaatc

SEQ ID NO: 60995 - DNA, 665 bp, Homo sapiens
ttccagcactaaatctatgactccaagaggccggaccagggatgaggcctattgtgaagcacacaatccatgctgcaggtaagggtcttcacccactgaccctaacaaacctgaggggccaccctakagaaattctagaatcagatccttacttccccagacccagataccattttaagaactgctgaaaggggaggaaacctcatctgaggagagcccaggctgctctgctaccaggacacaggcagctgggtagctctgaagggtcttgagtgaaaggcctctatcaatcagccaggtgccattagagcaaagccctctggagctccacgcagcatctcaacagaccagctaaaaccagtggctactaaagccagctcagatgacccaagcccagcctgaaccacactggcctgagcagagaccaccttgtacacacccttgcaaaagacatatgctgacttgctgcccagcctcctaaccctgccatccagctggtcattgccttaaaccacaagttggcaaaatttttctttaaagaccctgaaagtaagtattttggacttcgtgggccatatagtctctgctataactgcacaaaagcacagagacatcatgtaaatgaatgcacgtgactgtgttccaataaaactttaggtacaaaa

SEQ ID NO: 60996 - DNA, 705 bp, Homo sapiens
  misc_feature (1)...(705): n = A,T,C or G
ccaaagatcctgttttctccagcccctcctggctctcagctctcaagcaaaacagctacacagtcagctctggccagtccttgagatttccctgagcaggatgggaagaaggctgggagtctcagccccattagcaggtgggacccaagagaactcgggaccactgtgttctcacagactcgttggctcccctgagctctatcatgttaatctaggtcatatgactgggcttctgcctctgtttcctgcntagcatgtcaattatctgccggaactggctrtgccctgagcctcggtctccgaggctgcagcatggctcctggcctagctcttgccatcattttctctgggttccaggatatgcctcctgtgctctgctgttaccacccacttgacacagatgcaatgccaacacacaagaggggctcattaaagggccattctgatcctctccgggctccctgctttcctgagatgcctgctgcccctccccataggcccctgcaccagatgatgccagcctgcaccaggcttatttcattggggtacctggcagccaccacaggaactggtccagtaaccctgccaagctccagtctgatcagtcctggcacctctcctgcccacaggcctggtcctgctgtacctccacagtcctcctaccaagttatcactctagctgtgctagagaagaagaggcaggta

SEQ ID NO: 60997 - DNA, 1307 bp, Homo sapiens
ctgttaattagcttgattttgccatttcatggtttcyaagtatttcagaacatcatgttgtacaagataaacatacaatgtttatttgtaaatttaaaatagccaattaattttgaaaaatcaccccactcccatcctcaatgaaacctctgatctgaaaatatgagtgccaggtttgttgagtcagtgtgactcatcaaaacctagaagcaaacaagaggatcctttttgctcttttctttcttcaaatctagagtgattccaaaatagagaattcctggtttccccttttttgggttttactcaggggcatttccagaccaaagtgctccaggagaacaaatcttaccctcaaaagcaagtttgcaaggggagaagaatctatcttctggctttggcaaatctctctactcccccatcccctgggaaagtcagagagacaccacctgttttacagatgagactccaactgaggcccaggagcttaatgtggagctgcgctaatgtggatgatcacctgcagagctggggttcacttcagctcctcagtaccccccaccccttgctcaacgtgtgctgtggctgcagatggtcttgctggccatgctggatctgccactagtatccacgtgaccttgggcaaaattctcattttttctgtgattcagttcagaggtggactgaaatggggatgataatagttaactccctcacagggtaatacatgataatctctcaaaaatggtaactactactattgtcattataattttattgcacagagagagttccagccccaccccaggtttccaaaataaaattatttcaatttctgaaaagtattttatcccaaaagaaagcttagagaaacacaagtttactttcagatatcctccttacctggtaggagacagagaatgtcgggacacatcagctgttggaagcagaggctcagtgacatggaaagagcttgggcttctgtgcccaagccttgaatctgagctctgctgctcaccacctatttgagcttaggcaagttgttgaacctctccaagctccatttcttcctataggccaggaacgctatgtaaccccaagagcagttgtgaggattaaagatcacacatgcaaaaagccttgtatggtgcctgccttatggtaggctctcaataactgtagctagtaatttcattcttaatatttcatttaatcaatggctaattcctgtgacccatgacagaagtgcacatgcacacatccacacagacacttgcatattcccctttcaggcctggaacggccatgca

SEQ ID NO: 60998 - DNA, 721 bp, Homo sapiens
tcatggctccatccctgactatctgtctctgctacaggagtcagtgtgacatagtggaaagaaaacagatgtttaagtcagaagttcctggaggcaacttctgaccctacccagtgtgaggtgagtcayttaacctctttgaacctcaaactcaaataatctcatccgtaaaatgatcaggggctccaactgaaaaaaagatgtaacagtaactatttgaatttccaccttaaaatattttaccagagtttcaaacatttaaacaaaagcatccaataaaataacatcaaagacttttcaaatattccaacaaatggctattgctgatacattaaatgtgaataacttcacttcttttttatcatttaatttccaaatttaaaaaaataacaataagggtgacagtacttttagatcatgtcatatggagtcagaaaaaaagctgaaactgttctgtgattcataaaaggttcctaaaaccaccagacaaggcttcgaggaataggaaaagggagctggaagcccagggaggaggtgttcttatgtccctcagggtcccccaatcctcaagcctatggacacgaaactgtgggagagaggagagaaggaggcccaaggcctgtagagaatttgcactccttgactagggggaagccccagtacttcccttgcactggatttccccagccacctcactttcaagtcatagttgctgggatcc

SEQ ID NO: 60999 - DNA, 1221 bp, Homo sapiens
catagaactttagctgccagatctgttcttgagacaagataaatcagcaatttcagccacgatactgaaatatcaaagtcagaatgtatagtttcctttttttgaaaaataagcaaaaataaaattgctctttaataagcctaatcctccaagtaaaggtaaaactgtgccagaggccagattattctgcatgttccttcctatagttctgattcggaagtccttaccctagttctctaagctgtccgagacccccagaaaccctccctgaagtattctgctttgcttccctcttcatggtagaatccaatgctaagttgggaactaagccttgtgcataggacccaatgatggaaaggaaaagtccrcaaaggagctagagcagccacagctgaagagttaagagaagaacccaagccaaatggaatcaagaaagccaggggagaagacagatttaagaaggagatggtgagaaacgatgttgaatatagcatagacactacaaagcataagaactaaagggagatcaaaggattctgaggtcaccaatgaccttgaggagatctcttccttcggctctatagaggcaaagtacaggtattaaggaatgagtaggttaatggtgaacaaaagggaaaagactacggtagttcatccaagtgttcaaaactccacccccaggtagaacggggacccctttgtggtgtgattgcaggatgttggaaagctgagcaaatgcctgccccatggggcctcgcacaatccctaattcaggagcagcataagtctttacgttgatagatgggaaaccttccctaccccagaaattccttcttgggatagaatgttagagttgggtccacaacccaactctcatgtcagtttcctagtggggagaaaaaggcaggcaaggaaactccagagtaggcagcaaaataaaggatctatttgcatgattctctcaaatttaggcaaaggatagactcaattaaggcatgattgaatataggaggaggcttctcttcttgtgtggctacctgggggagacattttattggcaatggggtgacttggattctacacactagtggctcttattctctctggtctttgcagcacacatttggcttggtgagactaagggcaggcctcagagatctcagaggtctctagaaagtcttaggattttacatgagaatgccaggacaagtttgctcatgt

SEQ ID NO: 61000 - DNA, 511 bp, Homo sapiens
aaaaaaaaaaaaaaaaaaaaaaccacttttctttaggccagacgcagtgggctcacgcctgtaatcccagcactttgggaggccaaggtggtggatcaccgaggtcaggagttggagaccagcctggccaacatggtgaaaccccgtctctaccaaaaatacaaaaaaattagtcaggcatggtggcgggtgcctgtaatcccagctactcaggagactgaggcagcagaattgcttgaacccaggaggcggggattgcagtgagctgagatcaygccactgcactccaacctgggtgatagagtaagactccgtcgcaaaaaaaaaaaaaacggtgttcattaccccacattcacattccaggccaccgggatgagaaacaaggaagttaagagtttggtatggtagaggtcaggttcctggcccacacctgtaatctcagcactttgggaggctgaggcaggaggacacttgagcccaggaatttgagaccagcctgggcaacataaca

SEQ ID NO: 61001 - DNA, 1201 bp, Homo sapiens
ggccaggtgcagtggctcacgcctataatcccagcactttgggaggccgacacgggtggatcacctaaggtcaggagttcgagaccagcctgcccaacatggtgaaaccccaactctactaaaaatacaaacattaattgggcatggtggcgggcgcctgtaatcccagctcctcaggaggctgagatgggataattgctgcaacccgggaggcggaggttgcaatgagctgagatcgcaccactgcactccagtttgggcacaagactccatttaaaaaaaaaaaagcctgggcggaggccgaggcaagaggatcacaaggtcaagaggtcgaaaccatcctggtcaacatggtgaaactccgtctctactaaaaatacaaaaattagctaggaatggtggtgcatgcctgtagtaccagctacttgggaggctgaggcaggagaatcgcttgaacccaggaggcaaaggttgtagtgagccgagatcatgccactgcactccagcctggcgacagagtgagactccgtctcaagaaaaaaaaaaaaaaaaaaagagtacaggtcaaggataacgacctgaatttcccactccactttgtagttgaatacccagtttaatgaaataagagacttcaagaacattcatgttacattgggtgaatgtaagtggaaataatttttaaatctttcaagttactattttttctaaaattccaaatccattcatgtaagccttagaccagatcatttgaatcattgagaaactaaaacaactaatgtctggcataaatttgaaagcccttcagcaactgcaacaaagcaaacaaaatgatggagaatgcagcagggaacgagggaggggagagcaggctagagctaaatagttgtctctttctgggaaggtttcctgttggaggaacatttagagctatgagggagagagggaatgcccactcagctggtataatcaattcaaagggtcagtagtgtggcaaaggataccaacagatgaccctcagttccagttatttattgctgcataacaagcgatcrcaagactcagtggcttaaaacaatagctctttttcttacatctcacaattttgtgggtcaggattttgaccagggtatagctgttccatgtggtgtcaacagaggtcacttggaagtattcagctggtgggtgagcttatctgcag

SEQ ID NO: 61002 - DNA, 827 bp, Homo sapiens
acaaatattcttcaaaaaaatgcatctgtactgaaaatgcacagattgtttttagtatcacaaatgtttactatgtaagttattttttgaacatttactagaaaagaaaaaaacgttattattacaatgaaaatttaaaacactcaaagtattaatagctccatccaatagtcttgatctttgttattatgacaagtatttcagacatagaaaattttattttattttccattgaggttggttgaattggtaacagcatgtccaaacatcttcaagttgggtgcgagggtacatgtttcttcacrttactttctttttttttttttttttttttgaagacagggtctcactctgtcatcccggttggagtgcagtggtgtgatcactcactgcagcctccaaacccttgggttcaagtgatactcctgagtatttgggattacaggactgcaccaatatgctcagcctttttttttggtacagatagggtctcattatgttgcccaggcttaactttgtttttctatttttttttttttaatttctaatgtttactttaggttcatgggtacacgtgaaggtttgttatataggcaaactcgtgtcatgggggtttgttgtacagattattatatcacccagatattaagtgtagtacccaatagtatgttttctgcttctcttcctcccctgactcttcaccctcaagtaaactccagtgtctgttgtttccttctttgtattcatgagctcctacaggcacctgccaccacacccagctatttttttgtatttttagtagagacagggtttcaccatattagcca

SEQ ID NO: 61003 - DNA, 1557 bp, Homo sapiens
ctggagctcccaaatttatcaaacaattactaatagaccccagaaatgagacagacagcaacacaataatactgggggacttcaatactccactgacagcactagacaggtcatcaagacagaaagccaacaaagaaacaatggatttaaactatgccttggaacaaattgacctaacagatacatacagaatattccattcaacagctcatggaactttctccaagatataccatatgataggccataaaacaagcttcaataaatttaagaaaattgaaattatatcaagcactctctcagaccacagtggaataaaactggaaatcaactctataaggaggmtccagacccatgcaaatacataggcatcaagtaacctgctcctgaatgagcgttgggtcaaaaaagaaatcaagatagaaattagaaaattctttgaactgaatgacaataatgacacaacctgtcaaaacctctgggatccagcaaaagcagtgctaagagtaaagttcatagccctaaacacctacatcaaaaagactgaaagcacagacattctaaggttacacctcaaggaactagagaaacaagaacaaaccaaaccaaaatccagcagaagaaaggaaattactagaaagtttttattcatgaattaaacaaaaataattcatgaattctattaatcctcataaattttaaacattacatgactatacttctgtaagcctgagacactaatctacaaccttgcccaaatagtgaccacaagatttaaattaattgaaaattatctctactacaattatttttttgaaatggagttctgttcttgttgcccaggctggagtgcagtggtgcaatctcggctcactgcaacctccacctcctgagttcaagtgattctcctgcctcagcctcccgaatagctgggattacaggtgcgcaccaccatgcatggctaatttttgtatttttagtcaagacagggtttcactatgttggccaggctggtctcgaactcttgacctcaggtgaacctcctgccttggctccccaaagtgctggaattacaggcatgagcctccgcacccagcctctttactacaattctaaaaaatattacaaatttacagttatttttgagttttacaaataagatacattatatataaataaagagtatacctttcaacttctaatcccactcctgatctgaatttcatagtccaacaagtacagacagccataattacacattatttaagtgtattgtatacttattagtatatacttgtatattatatatatcattataattgcttcatatatttacataatgttctatacatcttttcaactttattttattcaactgtatacttctgtgttctatctgtgtagatcgagataagttcattgttttaatcattttacagtattttgatatgaatacactacatgttatttatccatcatattagtgaaactttaggttgcctaaaatattttctatatcaaaagatgccacagttaatggtttaaaatatcaaattg

SEQ ID NO: 61004 - DNA, 799 bp, Homo sapiens
agtattcaacttaattagtaaacaaataaataaaattaaaatatctatcgagttagcaataacctctccaaatatccagtgttggtgaaggctaaatgagacaggcactttcacactctgtcagaaacaagatggtattgcataccaggaatcttaaaaaggttcatgtaatttaactcagcagatctctttctaggaatgtatctcaaggacttcattttaaaaacagactacactgtattcacaatgatagttataaagtttataacagtgaaaagtttgaatcctaaatatttggagaaaattcccatataaaacagaccacaggtgtacacaasaaaccaaactcataatacaatatatgtatattgataaatatacccatgggctttagaaagcagttttaacctatttcagtgccctcatcagctgctgaatatgaaatgagcttatagttctttttatattccaactgtaactcaagtccccactggtgtgtttgtcaaaactttgctctgctccgagtttctagcagctgttctggaagtttccaggagcccatacatgctccaggagagcctttcagctgctttccatctcccctggctcccacggccactcgctcacttggctacagatggttgtccattagaacaactagtgaccatgactgaagtgcccctctggcctatggaggaggcactttctcctctgttgcctcagcacaaccgagaacaactatgacatttattatgtctctctgagaactcagggataagggaagggcagcccagaaagg

SEQ ID NO: 61005 - DNA, 598 bp, Homo sapiens
ggaktggctggaactcaagggatgacagatatgacaaatgagactagaaatggccacaagggctagttcatagtggccttctatgtatactgaggagctgactttattcggaggacagtgagaaaatagtaagcattctaaggccaggttcgtgcttttggaaagagctcactctagctgctatgataaacaagaagaccagtgaggaagttttgaaactctcctctgcaagagaatggtggccagccaggcgtggtggttgtcgaatctgtggcacctgtgggaagtgggctcagcccagggactgcctttggatcccccagcattggcaccatacctaccctgggccctaaggtggccatgcttctctggatttgcttccctagcaggggctctagtgcttgcccactccctgcccacagcatggcctgggagcagctgagactgggggccagctcatcccgcgtcgattcctggaagtgttatcagtgcctgttatggaggctggacccatgagtggcagccttccctggcagctgggctgacctgtctgcttttccattgctcgctggttttgttcactgtagggcgtgagggg

SEQ ID NO: 61006 - DNA, 597 bp, Homo sapiens
ctggagggcagtggcgcgatctcggctcactgcaagcaccacctcccaggttcaagccattctcctgcctcagcatcccacgtagctgggactacaggcgcctgccaccacccccagctaattttttttttttttttttttttgtatttttagtagagacggggtttcaccgggttagccacaatggtctcgatctctgaccttgtgatccgcctgcctccgtctcccaaagtgctgggattacacgcgtgagccactgcgcctggtgacttattttcttttggtagtcatcagtcttccacaaatccattgaaatgttcacactatgttatatcataagaaaatgtaatattaaaaatacaacaagtcaggcacagtggcttacacctgtaatcccagcactttgggaggccaaggtggaaggatggcttgaggatttggtgagctaggatggtgccactacactctatcctgggtgacagagcaaggtctcatctcaaaaataacatacatttaaaaatcaaaatataaagctttaaaatcagcttttctcartatgtacttgccagacatctttcattgaagttaactgggttc

SEQ ID NO: 61007 - DNA, 1251 bp, Homo sapiens
ggcctcatttcaatattgtgtctcagggaataggcaggcccgaggagagggaaaatgatgggggaatggtgggttggtggagcagtcagaagacacacaacatttattaagtttgccatcttctatgggtgggatttgtggrgccctaaagcaattataatagtaacagcaaagatcactgattgcagatcaccataacaggtataataaaaaagaaaaagcttgatatattgtgagagttgaccaaatgtgacacagagacatgaagtgggcacaagctgttcgaaaaatggtgctgacagacttgcctaacacagagttgccgtgaaccttcaatttataacaaatgcaatatcttggaagcagagtaaagctaggtaagcctatataagattaataagccttggatataagaaaagtcttcaaaatgggctgttttcagcaaaactactttgagatgaaagatatgatacgttgtactcccagaaatatttcttaccttgtacctaaaatttataaaataggatattccctaatgataggttatttctcatataggcttaaacagcctctgtctagctggctctttttgtccaaagtcatgctttttctcaccaaagattttcagcctgagggattcttcatctgatgagtggatgatctttataacaccttcagcttctgactctcatattgcattaaaccaatcttcttttgtgatttatgtttacgccagtgttcaattctagcaccttctccttcctgcattctcaatttcctctcagattctttttatctcgataataccatttttgtagctaagtcataggctgtcacttagcatttatgaactgagaggtaatgcatgtgataactttatttttgtgaatatccataatgactaatgcattgattgagtccttaggatggagtctcaacttctagcccacccatcccccagttgccagcatttttaacaatccgcatgtgctgaggaggtgatgaaaatctgtaatcctttttcagggttttcagatgttccgaagagagacacgaatatctccaaattgctcaaattttggagtaattttaagttgtggttcaagaaaagagggaaatacgaatttattttaataaaaattggaccagaacaaacgtagcctggttacataaatactcagccaacataataattagggcatctgaaataacgatgccccgcttttctttattttattttaccttaagttg

SEQ ID NO: 61008 - DNA, 1373 bp, Homo sapiens
tgcatattgaacacctattgtcaatttaatataaataattagctgctctgggctctcctacttctttgatctcaatcccctccacccaagagtatctgtgttctacttcttcccaggcacacggctagcctgggtttcccagcctcctttgcaggagcatcaaacactgtgtgtggttttccaccagagggcaatagaggagtcctagggggatggaggagccataagatggaaagagcttggatccctgagtcaccaggtggaggaagacaaaaaatactgatattggactgttatataagaggtaaatcaactccaattgtgttaggccacacacaaaattgggaggatttatttgttacagaagcaagcctstccctaacaaatacagggggaggaggagggatgggagaacattaactcagaataacagccaagaacttggagataaggtgagtctgggaggacttggctgagggtgtcagggatgtggtagtggaagagcaggggagaaccagaatgaaagtctgaaatattattacttaagagttacttaaaaactaccacagtttatcatcctgtatcacaattactaagccagtcatttaatgttttcaaattgtaatggacccagctgtgcaatgggaatgtgtcttctttgtactgctgcatagtcacagtcagcaggacatcctatttctcacctccttctaagaaatggtaagtcattctgtggcactggaacttcccttgttccttttcctgtggagtcatccttccaaataggacaaaacgaagcaatcacacatttccacaaagagatttacctgcacttactgctgacggaaacagtttctccactcttacgaagtcgtatagtaaagaagtattttctggccacttgtgtgtaaccctcactgtcaccctatcctgtattattacttactaatatgtttctttacaccaactacttttacaatttagtctggtctaaaagaagaatattcgtgaaatcatagttggatgtaccaaatatatgttgtcttaacatgacgcggtagactgacagcaacaatggctgcagttttaatctctctcccacaacccacccatcctctttgcaacagaactctgcagcttcttccaacaagagttgaagactgttttctatcccttgaacgtggacatggagacaaattttggccaacagacttgtgtcagccctgagacaaggccccacaagcctatggaagctgttctttctccaagactctgctgttgccttgttagcaggtcccagctggcctcctggagggtgcagctcagggggcccagtcacctctcgacacctagcctgccaaagccaccaacgt

SEQ ID NO: 61009 - DNA, 1373 bp, Homo sapiens
tgcatattgaacacctattgtcaatttaatataaataattagctgctctgggctctcctacttctttgatctcaatcccctccacccaagagtatctgtgttctacttcttcccaggcacacggctagcctgggtttcccagcctcctttgcaggagcatcaaacactgtgtgtggttttccaccagagggcaatagaggagtcctagggggatggaggagccataagatggaaagagcttggatccctgagtcaccaggtggaggaagacaaaaaatactgatattggactgttatataagaggtaaatcaactccaattgtgttaggccacacacaaaattgggaggatttatttgttacagaagcaagcctctccctaacaaatacagggggaggaggagggatgggagaacattaactcagaataacagccaagaacttggagataaggtgagtctgggaggacttggctgagggtgtcagggatgtggtagtggaagagcaggggagaaccagaatgaaagtctgaaatattattacttaagagttacttaaaaactaccacagtttatcatcctgtatcacaattactaagccagtcatttaatgttttcaaattgtaatggacccagctgtgcaatgggaatgtgtcttctttgtactgctgcatagtcacagtcagcaggacatcctatttctcacctccttctaagaaatggtaagtcattctgtggcactggaacttcccttgttccttttcctgtggagtcatccttccaaataggacaaaacgaagcaatcacacatttccacaaagagatttacctgcacttactgctgacggaaacagtttctccactcttacgaagtcgtatagtaaagaagtattttctggccacttgtgtgtaaccctcactgtcaccctatcctgtattattacttactaatatgtttctttacaccaactacttttacaatttagtctggtctaaaagaagaatattcgtgaaatcatagttggatgtaccaaatatatgttgtcttaacatgacgcggtagactgacagcaacaatggctgcagttttaatctctctcccacaacccacccatcctctttgcaacagaactctgcagcttcttccaacaagagttgaagactgttttctatcccttgaacgtggacatggagacaaattttggccaacagacttgtgtcagccctgagacaaggccccacaagcctatggaagctgttctttctccaagactctrctgttgccttgttagcaggtcccagctggcctcctggagggtgcagctcagggggcccagtcacctctcgacacctagcctgccaaagccaccaacgt

SEQ ID NO: 61010 - DNA, 870 bp, Homo sapiens
gagagrgagagagagagagagagagagagagaaagagagagatctcagcttttatgagcttaatcagaaatgaaagtgttgttaggtactaactgagctcccatgtaccttgagttgattaaggctgtagcagagagtgtaaggttcctggcatgcaccgttctgacttctgagtgcttgagtggctgagaccacccactttcctggaggacctacagtgccatttggttacaacagaattgatgctactcaccctttactggtcaacaaggtcaacaaaaaagtagggattgcaggataagagaggctattttacagggaaagggaggaatccagaaggggaagtgcgtctggccttcaggtccccatgagagaggaggaagtccctgagaggtgattttccatgaagccgttggagggaagccctaaagatttgctcatagcctttggaggtagctaaaccaccacccttcagcctcagggacaggggaccaattccagtctgaaagtttgggatcccaggccattatagtaccagatgctgcctggagataatggagagggcaaaatgacaggctgatgggaaagctctctttcaagtttccaatccctgggaagtaaggaagatggacctggctcaggcctcagaatcagggccaagagattagacaactttgtggggggtgaagactgcacatggtgaggaaagagggctaccctccggggtcactgccagtgtggctggctgtgagggctgctgtggcctggagagctgcccatagcccaccgtgcatctgacccagggtgcgtgaggtccatccggaggaaggctgggagtccccacgggaaatcacaggagaatgcacttca

SEQ ID NO: 61011 - DNA, 1064 bp, Homo sapiens
tgcacacacacacacttgcatatgcacgcacacacgcacacacacaacacacacacacatgcacacacatacacacatgtatggataaaaatatagataaagaggaaaaactggaaacctcaaaaaaatctctaaatggactgatgtttcttctgctaccaggtgttgaattttgtttctccttttgctaaaactttctctaagcctaatactccttggaaacaaaacccacaatccactctgctgaagatctttttcttttctttgggatcataaaatattctcgaccctgaaccagctgcaaaagtgaagatgaagttaatacatgcttcatatttggcccaaatgtccactttcctgtttacagcccttgaagcttttgcagaatccaggctatgctcttgggaagatagaggctgcattgcccagcacatttagggtaaccagaagcagagtgtggcagcacaggggaacaacaattattgaattttgttttgtagaaatgagrcacaggaggcatacatatcagcacatttacgaaagtaaacatcgtggaaggcagttattgtctctgagctccaaatccacccttccatgctctgttttgtgaccctacaaaatcagcatatgtttgatttaccagctgttttcttgtaggctcttccagtgagggaaattagaaggaggcctccaggctggaggaagaggagggatttgctccttcatctcttcttcctgggctccttgtcttcttgctgttcccatgagcattaggacagtaatgcttcaccccacagcatcagttccttcccacagcagcaactggatccagttcacagtgtctccagcacttgcagaaccaggctcatttcactccctcatggacaataccatcagccagcccatgcccccacctcggaggcctggcttccacgcccagatttggaggagccagcaacagctgagcagcaagctctccttggagggagccccatccagacacacagggcatccataagcttccaagttgggataattccaacctactctttgttccttcagca

SEQ ID NO: 61012 - DNA, 746 bp, Homo sapiens
ggtgacagggctgtcactctccttgcagctcagcccaggaagcaacagggccatctttgccactgcagtggctcaggaacttctgcagaggccaaaacaggtatggaggagggcttgagacacacttcagcagggtccctcaccaagtggatcacacaccaggcaggcaccacgccaggcgggtcgcacaatagagtgggatcatatatcgggcgtttgtttctccatctgcaaagggctcttctgaagcaggtgactcctctgcctcatgtttcccagctcccccatgcagagatgaaaaaaataaatacatatatacataaggattgcaacatgtgaaaaatgagaagccattaaggggcaggagccctggagaaaaggcccacccctcatccaccatagtgcaagtgcatgcaggtggtcacgtgtgctctccacacgcttcgtgtttccatgagggcatgagggcacgtgcaggctcagagcaggtgcacagcctgatgccaaggtcctgctggagcggagggtgacasacctgctgagtggggagcctgtggcgggagatcgcttccaccaccattcattgttcagctcaaggcagacacagagtattcatggagatgtcagtcacaattttcttttactttatttggaaccagtgtgagctaatagagtgtgttttgtgtgttgtgtgcatatgtatatgtgtgttgtgtgtatatgtgttgtgcacatatatgttgttt

SEQ ID NO: 61013 - DNA, 716 bp, Homo sapiens
gcctacatcatctcgttcttttattaccagatcttcgattttgtcctaaaagccttggctgcagttactgccatagttaatcaaactctacacaggactgcatatgatagatgccttgcaataatttcccagcaaggaaaatatcatgttagtgattcctgcctaaatagcattgactggacatttaaggactacctgacctgctgtgttttgggaatttctactgatatgtcaaggtcaggaacccctctgacatctcagcttatatacgagtgaatgtaccatggtgcaataattgtcataaaatgggagctctgtgaatggagctaggaggaaacccctatcacctttcatgtcagccctcagccaaatggaaaccccrcccaggaaaaacagcttgactttccaagtatctaagcactagctattgtatttcattttttagatgtgctcgctggagttacttgctaatgatatgcctcagtttctaaacagagatgatatattaaatcactttgtaggtgatttttaacacatgttcctgctacaatactgtggtagtttgaccatagaattctttcctaagctttacttaggaatctgtaataatgcaattttttagacattggaactttttaatgttttgtatctattaggatacagttagggaacatgtatcaccctcctcctctctgtttactctatacctttggaat

SEQ ID NO: 61014 - DNA, 716 bp, Homo sapiens
gcctacatcatctcgttcttttattaccagatcttcgattttgtcctaaaagccttggctgcagttactgccatagttaatcaaactctacacaggactgcatatgatagatgccttgcaataatttcccagcaaggaaaatatcatgttagtgattcctgcctaaatagcattgactggacatttaaggactacctgacctgctgtgttttgggaatttctactgatatgtcaaggtcaggaacccctctgacatctcagcttatatacgagtgaatgtaccatggtgcaataattgtcataaaatgggagctctgtgaatggagctaggaggaaacccctatcacctttcatgtcagccctcagccaaatggaaaccccacccaggaaaaacagcttgactttccaagtatctaagcactagctattgtatttcattttttagatgtgctcgctggagttacttgctaatgatatgcctcagtttctaaacagagatgatatattaaatcactttgtaggtgatttttaacacatgttcctgctacaatactgtggtagtttgaccatagaattctttcctaagctttacttaggaatctgtaataatrcaattttttagacattggaactttttaatgttttgtatctattaggatacagttagggaacatgtatcaccctcctcctctctgtttactctatacctttggaat

SEQ ID NO: 61015 - DNA, 691 bp, Homo sapiens
tattccagttttgcaaagaagaagctaatgctgaaaaaaaattaaaattttggtgaagtgaggatttgtcttcaggcctgaccccaaagacatgcacataccttaccattgttctcagtggcctctctcactgtcatcattcataatagactcattcttagtgagatggaaggtctcctgcacatttaccaaacagtgttaattaagaacatttgcaaatacatttcaatgattctttaaagttattccattgtatcacctgggatttagggcccagcatgtggtcccagggttgaaaacaaacaaacgaacaaacaaaaaacacttctttaaactgagttatgcattcaccagatgttctcggggatatgtaaaaccacaggataaacaagcaatatcttcctgaagccttaatttaagtcaaaaatttgagggaaaatgtcatttttatattaaacacaaccactgatatactacagagtacgacattttwaaagtcaaaacacaaaatttcaaagagtttttatcttgatataggcagttgtatcaatcagtaaaggctaggttatgctgtgataacaaagaattccaaaatctcagtggcttaaaatgacaggtgtttatttctttttgttacaacatttctattgcctgttgtccagggtctctgctccgcttcattttcactcca

SEQ ID NO: 61016 - DNA, 649 bp, Homo sapiens
tatgtgtatatattgtgtgtatatatggtgtcaaaagtgtgtgtgtatatatatagtgtgtatatagagtgggtatatatgtgtatatatatgatatatgatacatacatcacattttctttacccattcatctgtcaacaaacaaattgtttccatatcttggctattgtgagtagtgctgcactgaacatggcagtgctaacatctcttcaagacagcattctttttacattaggaaaatgccaacactgaattgaaaaaattctgcccacccttccaggtcttcccatgggaaccagctcttgtcgactccaagcccatgctgaccccagttgtgtctgagatctcacamgacttgtgttctccctgtattgctaaggactttggttggctaggaggttggagggtctgattatctctaggacatggtgagctcctcaagatggtccgtaccttatgctttgggggaaatgcaggtactcactttcaagtctttcttgcccacttcatcctttgctgagctctagatactgggctccagggtctttttctgacctcagaggccctcatgaagcctggtaactcagatggccaaacagatgtgcaagcccatggactcagagactcatcggggacctccagtatgca

SEQ ID NO: 61017 - DNA, 649 bp, Homo sapiens
tatgtgtatatattgtgtgtatatatggtgtcaaaagtgtgtgtgtatatatatagtgtgtatatagagtgggtatatatgtgtatatatatgatatatgatacatacatcacattttctttacccattcatctgtcaacaaacaaattgtttccatatcttggctattgtgagtagtgctgcactgaacatggcagtgctaacatctcttcaagacagcattctttttacattaggaaaatgccaacactgaattgaaaaaattctgcccacccttccaggtcttcccatgggaaccagctcttgtcgactccaagcccatgctgaccccagttgtgtctgagatctcacaagacttgtgttctccctgtattgctaaggactttggttggctaggaggttggagggtctgattatctctaggacatggtgagctcctcaagatggtccgtaccttatgctttgggggaaatgcaggtactcactttcaagtctttcttgcccacttcatcctttgctgagctctagatmctgggctccagggtctttttctgacctcagaggccctcatgaagcctggtaactcagatggccaaacagatgtgcaagcccatggactcagagactcatcggggacctccagtatgca

SEQ ID NO: 61018 - DNA, 903 bp, Homo sapiens
ccccagccccagtgaagccttcagaccataccctatgtacccgttcatttggttattcatttgtatttgttaaaatatcctttaacaaaaccagtaaacataagtaaagtgtttccctgagatctgtgagccattctaacaaatcttcaaacccaaggaggaggttgtgggaatttcaaactcaaggagggggttgtgggaacccctgawttttagtccaggacactggggactttcaactggtgcctgaagtggggggcagccctttaccggtatggtctaatgctaactccaggtagtcagtgacagaattgagttgatttgctggacactcagttcgtgtctgcagaatattatagaattgcttggtgtggaaaactcacatatttagttcagaagtgttgcgaatgtagagaaatgagttttccttttaaccagccagaggatggtggggaggaggaaggcatttggcagatgggacagcaggagcagaagtgagctggtgcagggagcttggtgtgcatggctgggccatgtgaaccgcttggctgagctggggtggagggagttgtgggtgtgggttggtcacgctccaaagggcctcgggggacctgcgagggctctcagctgcatcttgctgccagcagggtgctaggttgttgtggcctgactaggaacagcatgaggctttgcgctttgcttgaaactggagttctgaggagacagggacgagtgaatgagagagccggagtagggaaggcctgggatgagaatgaaatcaacaatatactgttacagtaggtagtcaggcagacataagcaggggaggagggggaccccatcaggaatgccaggccaccaggatggtcaggcagttgtcaaagtgtctctgaaatagtaatt

SEQ ID NO: 61019 - DNA, 638 bp, Homo sapiens
ctggctccacagagctcagagattcacagtgatagtagtaccatcaagctgtggctatgcccaggcccagtctacagggaggccttggaattggtctactatttacaactgcctggggaccactcaggagaaatgaggggaagagagactggctagaagcagatggtgggatagatcctgggctctcttggcagcttctccttgaccctcctgtcccagagcccccttaaacctgtcctcagatgctggttcagatgagagaacaccaacctctggggtgaacatgcccagggtgagggaggcccagggggccaggaacaatgtgcctgggcccatgtgctgatgtgcatgcacttacatgtgtggatatttgcatgtgtagtgacttgtacatatgagtgtgtgtgcatatgactgcttatgaatacatgctagggcttgcatgtatctgtgcttgcatgtgtgtacatctctaagggtaagaacacacagtcctgtggatctctgcatatgtgcactgtcacatgtgtgtgggggtgtgagcgcggggtgcatctgcgtgcatgagcaatgtggccagtgtgtgcctctgtgttctcaygtgggtacatgtgtctgaagcagtatacactgataca

SEQ ID NO: 61020 - DNA, 578 bp, Homo sapiens
ccctgggatatactaaaaccattgcakgtagccaaattttagtcacaccttcaaagaaacatgtatcactttaaaaaagacctaatatggccaaaatgttagtattattgatatggcatattcaaaataaactacaggaaaaaaacatggaaagtaaaaatattatacaacaatgcctctcaaattttaatttgcataagaaccacctgggggatcttgctaattctgactctgggagggcccaatattctgcatttctaacaagctcccagggaatgctgttgctgccagtctctggcaaaggctctgaaagcttgatttcttccgtattaattatgcccactctaaaggtaaagccttggttcttcgctaacattttcatcagctttgaacagtcctgacagttacaactttatattaccacccctcttttttttttttttaaactcctgcgggatctcttcttgaacaaattttcccttaccatcactgttttacttgataatatggcctataaggacaaaaactgcataaggtttatgaactctcattattaatgagcaaacagacttctcccc

SEQ ID NO: 61021 - DNA, 657 bp, Homo sapiens
ggatcccactttattgcccagactggtctgaaactcctgggctcaagcratcctcccacctcagcctcccaaagtgctgggattgctggtgtgagccatcgtgtccaccgtgggattactcagttctctaggagaaggtatctgtgtttgactgcttgactgttgcttagggaccacgctctgtgaaggtacttgtgaacttgcatatttttgctcaggagagatgcaaattatttctgttgtgtagagaaggtaacctcaaagattacagttgtgtgtgtgtgtgtgtgtgtgtgtgtgtgtgtgtgtgtgtgtttgagatggagtcttgctctgttgcccaggctggagtgcagtgccatgatcttgactcactgcaacctccacctcccaggctcacgcaattctcctgcctcagcctcccgagtagctgaggctaaaagtgtacaccaccacacatggctaatttttgtatttttagtagagaagaggtttaactatgttggccaggctggtcttgaactcctgacttcaagtgatctacctgcctcagccttccaaagtgctgggattacaggtgtgagtcactgtgcacaccttagtttcctaacccttcggaatatgataggttaggcaagattcctgtaagtgaaaaaa

SEQ ID NO: 61022 - DNA, 510 bp, Homo sapiens
caataggcaaacattgaaatggccatggaaaaaacctgagagttgtaaatatttatgccatatacacatacctgtctgtattcgtgttagactgagagtttagagagttatccaactcattctcattctcactttctcctgactggctattaacagttccttcttcttcaccatctacatcattaagagcctgtctcaacacaacaataaaaatagcacaagttgattatatatatactcagactttctttttttttttctgtcataacagaagagagttccctcctcctaagccctccacatgttgtagaacacaaatcttctcacatccttccactactatcaattatcctatctctctaccacattttcaacatctgtctctgtagtggcttcagttcaccaacatttaaatgtgagcaagcctctcccatcttaacctgaccctatacttaccttaagctatatatatcttctttcttctaccaccaaacttcttgaaakagttgt

SEQ ID NO: 61023 - DNA, 547 bp, Homo sapiens
acctattccaccctattacgtgatgagccccattcagaacaccatcttgcatgactagggccatatcactgtgtccatttctccagagtaatgttacattatttactatcccacctatactcacatcccattcttgtttcactgaagttttcttcttctttactttcggtgtctttcttacaccaactcggggaccacagcggttcactctgacaaatgacatctaggaataataatcacatcaaatttttaaaatacaagaaaaaacaataagcatcaccagagtgggggaagacacctgaaaaaaaaaacaaattttaaaatgccagaagaaaaatttaagcatgatgaaaggaacagcctatcaaaatacttagttcttttattttacaactaataaatgttggtactgataattataataaaagagstctcaagtcaataacttatatatttgattaaaaaagaactctaggaatgcagaaattatggcctaaagccgagaactaagacattcgtcataagctttgtcatcagttacacaaat

SEQ ID NO: 61024 - DNA, 547 bp, Homo sapiens
acctattccaccctattacgtgatgagccccattcagaacaccatcttgcatgactagggccatatcactgtgtccatttctccagagtaatgttacattatttactatcccacctatactcacatcccattcttgtttcactgaagttttcttcttctttactttcggtgtctttcttacaccaactcggggaccacagcggttcactctgacaaatgacatctaggaataataatcacatcaaatttttaaaatacaagaaaaaacaataagcatcaccagagtgggggaagacacctgaaaaaaaaaacaaattttaaaatgccagaagaaaaatttaagcatgatgaaaggaacagcctatcaaaatacttagttcttttattttacaactaataaatgttggtactgataattataataaaagaggtctcaagtcaataacttatatatttgattaaaaaagaactctaggaatgcagaaattatggcctaaagcmgagaactaagacattcgtcataagctttgtcatcagttacacaaat

SEQ ID NO: 61025 - DNA, 520 bp, Homo sapiens
taaaatatgcatgcacacctcccacataactgttatgcaaaagaaaaatggaacaaarcataaagaaaaaatagggatacctcaattggacgaaacctttaaaatttgtttccagaaaagggtcccgattcagactccaagaagaaggttcgaataaagaatggctgctcagcagtgtgggctgctggttgcccatttttatggttatttgattatatgctgattaatacaaggggtatattattcatgagttttctgggaaaggggtgggcaaatcctggaactgagggttcctcccctttatagaccttatagggtaacttctgatgttcccatggcatctgtaacctgtcatggctctggtgggagtgtcttttagcatgctaatgcattatagttagcatataatgagcagtgaggacaaccagagttcagatttgtcaccctcttggttttggccaggttctttaccaaagcctgttttatcagcaaggtcttcatgacctgtgtgttgtgccaa

SEQ ID NO: 61026 - DNA, 642 bp, Homo sapiens
tctcatgtaccctataaatattcttctactatatatccacaaatgttaaaaaattttaaaaaattatacaatcatatgctagcaattgatgaatgctattaaataataacacaaaaagtaaaccaaggaaaggagaaacatgaatgaaaaacaaaatttggacaaagatttaagtgaggtgagagtatttcaggaagagaatgctacaaatataaaaggttatgccggtgtgtgtgtgcgtggtgtggcaatgcaaggagcaaatgtgacttgagtagagtaagagggaggtatgtaggagaagaagaagtgatgatgttggataattaagggcaaatgacagccgttgtaaagactctagcttttactyggagtgcaatggagagcaaaagcagggttttgaagaaaaagtggcattatctgactcatgtttgaaaataattacttattactcctataataatagacagttgggcaacaaccatggaaaagaggtgggaggagggcattttaggggttattgcaataatttatatgacacgatgactcagaccaggctgataggagtgaaggaagtagaaattgattggattctgattataccttaaagttagaactgataagattttccaatgaattaga

SEQ ID NO: 61027 - DNA, 748 bp, Homo sapiens
ttcgtcacaaggagccaacttctccaaatctcctgagtgatgcttaagagatgtgacatgcttatgaggttttcatgacaccaaagaaaacctctcctggtgaatttggaggcatattgtcccaaatccgcagaaccgcaggcagtccagagggacccttgggtaacagtgcttggacaaggtgacttcaatccccgtagaaatgattatgaaacatcaaaatataattcttcttgagtaggttttgctttctgaatattgcctcaacgtcactttgaaatcaaaggcttctatctgacacccgtcaatcatctgacacacttgcggcttgtctgccagggcctcagtcctctcacctccgttgctgtttgtgtctggatgcggagcgtcttcctcagtcctctcacctccgttgctgtttgtgtctggatgcrgagcgtctttctccaacaaagaatggagttgctttcagagcagactccgaggctcgggtccagcactgcgtgctgtctcgcacctttccttaaatgccgctctggacgggtggcagagattcacctcctctgatgcaaaccaaactctgaatttgtttagagacacaatcaattctgtgctttctgtggtggcaggtgctatggaaatcaggcctagaaatgttttttggggtgaaggagtaccacaaaaatttataaccaaatttggaacgaagccaagaagagatcagcgagtgcacggagacagttggtgc

SEQ ID NO: 61028 - DNA, 479 bp, Homo sapiens
acttaccttgggcatcttctggggctggacaggggaggcgggcaagtcttgtccaggctggcagaggtttcagaacagcacaggcctgcactgcaggctggttgcagctcacaggcacctggaggatggcaagagccaccatcctactaaatgcagtggcatattgcttgctttcaaatttgtgggtttttgttgttgytgttgttgttgttttgagacagagtttagctttgtcgcccaggctggaatgcagtggcacgatcctggcactgcaatctctgcctcttaggttcaagccattctcctgcctcagtctcccaagtagctgggactaccggcacgtgccaccaggcccagctaatttttgtatttttagtagagacagggttttgccatgttggccaggctggtctcggaactcttgacctcaggtgatctgtctgcccaggcagacagatcctctcccaaagtgctgggat

SEQ ID NO: 61029 - DNA, 861 bp, Homo sapiens
ctcaggaggctgaggcaggaaaactgcttaaacccgggaggcgaaggttgcagtgagccgagattgcgccactgcactccagcctgcatgacagagagagactccatgtcaaaaaaaaaaaaaaccccaaaaaacagcaatttaacttttaggactttgtcctaagtaaacagtaaacagctggtcacgtggataaagaggtttttgtgaaaagcttcacggtagagttgtgcataacagtcaaaagggaaatcaacctaaatgcccaacaaggttgggccagttccttactcactccacaaacaccgagcactgtgctaggtgctgcggatacaccagcaaataaaaagcctctgttctcacggaacttacagccttagatggacaatccgtgcataaacacatgactatgtaacttccataggatactgagaagagggaggggaactccacagtgagcacaaaggcctgaagagggagcaaatttgggtttaaggtcagaaagaaagcacatggctgtagaaggagaggaaagatgagaggtgaagggagaggtggcactggggctgragcaggaaaagagcaagttcagtaaggcaaaggatgcaggacagtttggggtcctagagttcaggaggggcaatacggatggactgaaaagacgtactgaatgccagctgcaaacagctggatgagagcatttacagcctgcccctgcctgcctccacttcctgagcccactatcccacacctccacctccaccaacggcctccgcccttccccggctgccctgattcctctgtcatcttctcacagtccccagtgctttcctttccttgtgctcagccgagttttaaatt

SEQ ID NO: 61030 - DNA, 861 bp, Homo sapiens
ctcaggaggctgaggcaggaaaactgcttaaacccgggaggcgaaggttgcagtgagccgagattgcgccactgcactccagcctgcatgacagagagagactccatgtcaaaaaaaaaaaaaaccccaaaaaacagcaatttaacttttaggactttgtcctaagtaaacagtaaacagctggtcacgtggataaagaggtttttgtgaaaagcttcacggtagagttgtgcataacagtcaaaagggaaatcaacctaaatgcccaacaaggttgggccagttccttactcactccacaaacaccgagcactgtgctaggtgctgcggatacaccagcaaataaaaagcctctgttctcacggaacttacagccttagatggacaatccgtgcataaacacatgactatgtaacttccataggatactgagaagagggaggggaactccacagtgagcacaaaggcctgaagagggagcaaatttgggtttaaggtcagaaagaaagcacatggctgtagaaggagaggaaagatgagaggtgaagggagaggtggcactggggctggagcaggaaaagagcaagttcagtaaggcaaaggatgcaggacagtttggggtcctagagttcaggaggggcaatacggatggactgaaaagacgtactgaatgccagctgcaaacagctggatgagagcatttacagcctgcccctgcctgcctccacttcctgagcccactatcccacacctccacctccaccaacggcctcygcccttccccggctgccctgattcctctgtcatcttctcacagtccccagtgctttcctttccttgtgctcagccgagttttaaatt

SEQ ID NO: 61031 - DNA, 588 bp, Homo sapiens
ttgcccaggtgggccctgcctggtgtgcgtgctacagccccacctggcctgttctcattgcctgtgcatcagacatgtctgccctcatcacctgtctgcctccctgccccgttatgcccacacctgcctgaagcctgcccctgggtttgctgtgggactcgggggccgctgcagggagaaaggaagtaggcagagcagcactgcccactcaggcccctccccaccaggtaagatgttcaagtcgctggacctgagcctgattgtagagttcattctcatgttctaccgggacaagcccatcgactggctcctggaccatattctgtgggtgaaagtctgcaacccygagaaggatgcggtgagcaagagctggcgggactggcaggggcagggccaaggggcaggcagcctccaccccaaactgtgtccctgtccttgcatctgctcacatagagcactgtcagctgtgggagggccctggtagtccccaggagaggccgtgttgaggaaggagggctaagccgagccctggggtgttgcccaccctccacagaagcactgtgaccggcagaaagccaacctgcggat

SEQ ID NO: 61032 - DNA, 685 bp, Homo sapiens
ttttaaaaataaaaactgtgtttgagattatgccacttaccttgccgtattcttcaaatagctctcttcaaagctagaatagaatccagttttgcatttgagtcaccttaccatcctcatatcttccattctcttgaattgtttctatgcttctgggcatactcaccttctttctgttttcatgctaagctaattccttactcagaacgtactattctattttcttaaaaaactctttcctcatattcacttcacttgctgcctctctttagtcaggtctctctttcaatatccccctgctacagataacttctctgatcataactaaaatagtacctccattgacagcccatctcttactttgcttttctgtatagcatgtataacaatgtgacagtatatataaatacatattctatcctctataggaagatagatttcatgagggttagaacttgcttcacattgtttcttcagcatttggaacaatttctgrcacatggtagacattcaatgggcatatttgttaaagcatgggatgaaaacagatttatgtaaatagactaaatttcaaatattgcttctccccataaagagtaaaaacaatctaaatgaatggaaaggtataaaacacattaaagattaataagaatataagcactaaatataaatagtttaaactaca

SEQ ID NO: 61033 - DNA, 655 bp, Homo sapiens
atccttgctagtttgtatatattattctgccaggtgaccttttcaaggtgactctcaatattttagtgaattctgattaaataataatcacttctacataatctgtttttcttcttgctatcacaccagtgtagaaatatctctctctctgtgtgtatatatatatatgtgtgtatatatatgtatgtgtatatatgtacacatatatacatatgtatgtgtatatgtgtgtgtatgtatatatacacacctatctatatatatcttgctatcacacaatatagaaatttctctatgtatatatatgtgtagatacatatacctatctatatctctatccatagatatccatatatagatatagatgtagatatgtatatgtatctacacacacatatatacatgtgtatctacacacacacatatatatacacacacatayatatatagagagagagatatagggattatccatatataaatatatagataggtatatagatatccatatatatatatatatacacacacacacacagagagatatctaggtatatggatatgaacatctaggtacatatagagatagatatctagttatacagagttatatatagatatctaggtatatctaggtatataggtatatagatat

SEQ ID NO: 61034 - DNA, 655 bp, Homo sapiens
atccttgctagtttgtatatattattctgccaggtgaccttttcaaggtgactctcaatattttagtgaattctgattaaataataatcacttctacataatctgtttttcttcttgctatcacaccagtgtagaaatatctctctctctgtgtgtatatatatatatgtgtgtatatatatgtatgtgtatatatgtacacatatatacatatgtatgtgtatatgtgtgtgtatgtatatatacacacctatctatatatatcttgctatcacacaatatagaaatttctctatgtatatatatgtgtagatacatatacctatctatatctctatccatagatatccatatatagatatagatgtagatatgtatatgtatctacacacacatatatacatgtgtatctacacacacacatatatatacacacacatatmtatatagagagagagatatagggattatccatatataaatatatagataggtatatagatatccatatatatatatatatacacacacacacacagagagatatctaggtatatggatatgaacatctaggtacatatagagatagatatctagttatacagagttatatatagatatctaggtatatctaggtatataggtatatagatat

SEQ ID NO: 61035 - DNA, 655 bp, Homo sapiens
atccttgctagtttgtatatattattctgccaggtgaccttttcaaggtgactctcaatattttagtgaattctgattaaataataatcacttctacataatctgtttttcttcttgctatcacaccagtgtagaaatatctctctctctgtgtgtatatatatatatgtgtgtatatatatgtatgtgtatatatgtacacatatatacatatgtatgtgtatatgtgtgtgtatgtatatatacacacctatctatatatatcttgctatcacacaatatagaaatttctctatgtatatatatgtgtagatacatatacctatctatatctctatccatagatatccatatatagatatagatgtagatatgtatatgtatctacacacacatatatacatgtgtatctacacacacacatatatatacacacacatatatatatagagagagagatatagggattatccatatataaatatatagataggtatatagatatccatatatatatatatatacacacacacacacagagagatatctaggtatatggatatgaayatctaggtacatatagagatagatatctagttatacagagttatatatagatatctaggtatatctaggtatataggtatatagatat

SEQ ID NO: 61036 - DNA, 710 bp, Homo sapiens
ggagtaattccaagttgttaagggtgttgtmtgaaatattttgagagatctttctctcaaagtaaaaacatactgaattaactattttataattagagttcagttattttaacaaacatttactaaacaccctaaccgattgtagtgaagaagagaaaaatcaacatttatagacattactctcaatgaacttacaatttaattataatatagtggttatagaggaagacaaacaaacccattagtgacttcatagcaaaaagaagattaaatatttactttatgtcctttaaatttctctagtctttccttttcctctttaggaggcatttattaatattatcctcgcttctgttaaaaataaaatttcacttttgaccactgctatgtaaaattaacaccataggatcacagaattgacagtgatattagatcttgcaggcccaacctcctcaatttataaggcataactgaacacttttcctgcttgtaagctcattaaagaacatgtgcttaagaacaaaagatttgcccaacccagtcagattcaagagctatgtaacacagtattagatctccgaacaggtgggtttaaaagaacatggttgctcttcacaatttctatttcaaaatacgagtcatgcctatgttctatgttcccttacctattcgttaaatttcaaaatttcaaaacttttaaagaaattggg

SEQ ID NO: 61037 - DNA, 1108 bp, Homo sapiens
ttcattaaggaagaagaaaggaaagagcaaaagagaggtaagtatcattaaaacatgaataaaagtgtctgagtgtagtcaaaaaataaaataaaacaaaacattttggaaagaaatacttccaatagtcagacaagaaattattatgcttaatcatattttagaaaacttattttctactagagagacaaacatgaagtggtctctagttaatatatattttttatttattttttatttcattatccggttttgttaatattttagtctttaaaatttaatgcttttggttttgtgtcatgtattacatactgtttttcctattacactttcctttaaaaagatccttatttcattttacttaagacaatcttttcctaatggaaataaaatgaatgttacttttataattatgccccttggtctttaggtaracaagtaaaatgatttctagattactttaataagcaaaattagatgtaattgaaaaaattagatttttgtaaaaatctgagctacttgtgtatgcttcatgagttttagctgtctaaatggacaaatggatttttaaattatttatatttttcagtttgggaattttataggtttcttaactttttttaagtgctaaaagcctgtgcttataagcattttgaataaatttaattttcaatctaatagtttcaggtatttcaagctgaatatttaaaatataattcagtatgctagatagattaactaatggcaaataattggtagaattatttgaagcatttacttggaaagttttgaatgtatattaattacagcatagctaaacttagaacatgtattggttatgatgactggatacattttatctagccaagaaaaagccagatttgtcacctattgcttctcctacacatttctccattgcaccatgtatgaacaaaatccataaagtagaaaatagtcattgaaagcagaaataacttagtgtatattaaaatacaaatagttcagaatagtcaaaacaattttgaaaaaggcaaataaaagtgtagtatttatactgatcaattttaagaaaaaaacagtaataaggaaagtgtgatatttgtgtagg

SEQ ID NO: 61038 - DNA, 1108 bp, Homo sapiens
ttcattaaggaagaagaaaggaaagagcaaaagagaggtaagtatcattaaaacatgaataaaagtgtctgagtgtagtcaaaaaataaaataaaacaaaacattttggaaagaaatacttccaatagtcagacaagaaattattatgcttaatcatattttagaaaacttattttctactagagagacaaacatgaagtggtctctagttaatatatattttttatttattttttatttcattatccggttttgttaatattttagtctttaaaatttaatgcttttggttttgtgtcatgtattacatactgtttttcctattacactttcctttaaaaagatccttatttcattttacttaagacaatcttttcctaatggaaataaaatgaatgttacttttataattatgccccttggtctttaggtaaacaagtaaaatgatttctagattactttaataagcaaaattagatgtaattgaaaaaattagatttttgtaaaaatctgagctacttgtgtatgcttcatgagttttagctgtctaaatggacaaatggatttttaaattatttatatttttcagtttgggaattttataggtttcttaactttttttaagtgctaaaagcctgtgcttataagcattttgaataaatttaattttcaatctaatagtttcaggtatttcaagctgaatatttaaaatataattcagtatgctagatagattaactaatggcaaataattggtagaattatttgaagcatttacttggaaagttttgaatgtatattaattacagcatagctaaacttagaacatgtattggttatgatgactggatacattttatctagccaagaaaaagccagatttgtcacctattgcttctcctacacatttctccattgcacyatgtatgaacaaaatccataaagtagaaaatagtcattgaaagcagaaataacttagtgtatattaaaatacaaatagttcagaatagtcaaaacaattttgaaaaaggcaaataaaagtgtagtatttatactgatcaattttaagaaaaaaacagtaataaggaaagtgtgatatttgtgtagg

SEQ ID NO: 61039 - DNA, 559 bp, Homo sapiens
cagtgagccaagatagtgccattgcactccagcttgggtgacagagcaagacgccatctcaagtgggaaaaaaaaaaaaaaaaccataatgttgcagtatctgtaactattttattaaaataaaattacagaagttttatatctagataaaaataagaataaagttttatactatataatataaaaaattctaggtatagtttttatacaaggatattgttttccacaaatacctctctgattgttataaaacattcatttttctaacttgagttcctgtatttcatttaaaatatgttagtaggcttttatgatttcctgaatatttcctgaagtgtttgttttatgttccccattccttaattgtaaaattattttcagtttaatgcaaacaattaggaaggccaaaatttcaytgaaacataagaaaaaatgtgatattagaggtgagagggtgggatgaggtatagaaaaatacagggagaatctctatgaaaaaagctgaggaaatagtgagaggctatagagacagaaaaggaagtaaagcaacttatctaat

SEQ ID NO: 61040 - DNA, 1998 bp, Homo sapiens
tatgagtgagaacatggggtgtttggttttctgtccttgtggtattttgctgagaatgatggtttcagtttcatccatgtccctacaaaggatatgacctcatcctgttttatgtctgcatagtatttcatggtgtatatgtgccacattttctttatccagtctatttttgatggatatttgggttggttccaagtctttgctattgtgaatagtaccacgataaatgttaaattgaatataattgtgaaaattggggaaaaaattgtacagattttaacacaataacatccttgaaaactaaatccacaaaagaatctgttagaaccagagaaaccttcatcattgtcacttgaaatgacattcctgcctaccttttaaaagggaattattagcctgatcattatggtaaaacaagcaaacataaacgtgtttgttttcctttagagttttacacacagtttatcttcgctgaatttttgaaacacgcaaacttgaaattaaacagtgtgcattatttttgtttctggtttcttttgctcagaattatgtttgtgaggttcaktcatgttttttaggcctagtttgttaatttttcagtattgataagttatgtttttctagcatattgctattccatttacattttcaattttattggcacaagtattttcataatatgcatttttagttctttagtatctgctacaactaggtggatattctaattcctttcttgaattatttgtttactttcttttttgtgatcattcttattatttattttattaatttttggatctcttggaactgactctagttttcttaatcctctgtgttgtgcctttgtttttgttttgttttttttttcccaagcttttggaggatttccttagctattcttttttatgtcaggaagatatggaatacatacactgaaatttctttaattttgtttccaatttaattttaaatcatgaagaatgcttatagtttaaacttttgagaatccttaatcatcaaacaaacatcagtgacagaattttgcttttcctaggatgacactgatgctttactagccaagtgctaggcaagggcagtagtgctggtctttttggcttgcttctcctggtgcggagcaacatccctatgggggagttggggtgagggagacgaatgccccgctattcttaggtagagggagggagctcacaatctccagactacactcatttggaacgtggagcttgaggggataagaaatgccagtgtcttgccctttcctgggagattccacagcctttgcctgggaactggggggtgaagggagcgtaatattcttagccatacccattcagagtggggctttgatcacactgacctgagagtaggaggcaaaaatgggtatggctcaagtgccacagactctcactcctctttctaagatttagtagatttccttgaacaaatgtttcttcatttgatatatgcccttagtgttgcaggactttctccttagttcagctaaaactgggttcttgtcacatgactgggaaagactagactcacggacacatagaaggttgaggagcataatttttggacgaaaagggaaaaaaaaaaaaacgcagcaaagtgagatggagtcctcctagtaggccctccacctcacagattgaatcccaggtcaccacacaggaattgaagaggccaggtctctcaaactctatcattagatcgcctgtctttacaattagaaattgaagaggccaggtctcctgtctctatctcctatctcctgtctaaattaggacaaaatttccaaagacttttatatgtgtatattgtatatagatataaacctataacaaaatttatatatgtatactaatttttccagttatgattgcttcactagggagcatatccacagagagcctcatgctgtcattctgcaagttgtctttcatattttttctttctgttcatttatgcatt

SEQ ID NO: 61041 - DNA, 540 bp, Homo sapiens
acatctccaagtgaaggaaaaaggcatagttcattttctgtgtatattaatattttcatatatcaataaccttgaaattccttatataattatttccttaaattccaaagaatagtgttaatgtattgtttctacaaacaattttactctaattgtgtataagttgcctggtgaaaatagaacagtaataacccttctattgccatcaataaaattaactctatctggtcttgttttcaactttttatctataagaacaaaactcattgttgatttgagatgggactcataggcccatttgtcaaagagacttattttctcaccagtctcttacttaaataagacaaatcttttttccaacacttcacagcaaaatctagcccytccaaaacagaacacccgtctctacaccattacacacattttacgctaaaaatatctcaaaggactatgattcattttaaaaattaggttgattcactttagaaaaatgaaatatattatttttctaccacatgaataagatgaagcctctacttc

SEQ ID NO: 61042 - DNA, 612 bp, Homo sapiens
ctacattgaaatcagtaaagaacaaaatcaaatacagactttgaatcatcaacataaagaaaaaatgttaaaagctctcccaggccaaggcaagatgggtcaaagtcagagtggtggtcatggtcctggaggtggcaagaaggatgacaagytctaacaactcaaggacaagaaaaagaaatatgaacctcctgtaccaactacagtggggaaaaagaagaagaaaacaaagggaccagatgctgccagcaaactgccactggtgacacctcacactcagtgccagttaaaattactgaagttagagagaattaaagactatcttctcatggaggaagaattcattagaaatcaggaacaaatgaaaccattagaagaaaagcaagaagggaaaagatcaaaagtggatgatctgagggggaccccaatgtcagtaggaatcttggaagagatcattgatgacaatcatgccatcgtgtctacatctgtgggctcagaacactacatcagcattctttcatttgcagacaaggatcttctggaacctggctgctcggtcaggctcaaccacaaggtgcataccatgataggggtgctgatggatgacatgga

SEQ ID NO: 61043 - DNA, 612 bp, Homo sapiens
ctacattgaaatcagtaaagaacaaaatcaaatacagactttgaatcatcaacataaagaaaaaatgttaaaagctctcccaggccaaggcaagatgggtcaaagtcagagtggtggtcatggtcctggaggtggcaagaaggatgacaagctctaacaactcaaggacaagaaaaagaaatatgaacctcctgtaccaactacagtggggaaaaagaagaagaaaacaaagggaccagatgctgccagcaaactgccactggtgacacctcacactcagtgccagttaaaattactgaagttagagagaattaaagactatcttctcatggaggaagaattcattagaaatcaggaacaaatgaaaccattagaagaaaagcaagaagggaaaagatcaaaagtggatgatctgagggggaccccaatgtcagtaggaatcttggaagagatcattgatgacaatcatgccatcgtgtctacatctgtgggctcagaacactacrtcagcattctttcatttgcagacaaggatcttctggaacctggctgctcggtcaggctcaaccacaaggtgcataccatgataggggtgctgatggatgacatgga

SEQ ID NO: 61044 - DNA, 612 bp, Homo sapiens
ctacattgaaatcagtaaagaacaaaatcaaatacagactttgaatcatcaacataaagaaaaaatgttaaaagctctcccaggccaaggcaagatgggtcaaagtcagagtggtggtcatggtcctggaggtggcaagaaggatgacaagctctaacaactcaaggacaagaaaaagaaatatgaacctcctgtaccaactacagtggggaaaaagaagaagaaaacaaagggaccagatgctgccagcaaactgccactggtgacacctcacactcagtgccagttaaaattactgaagttagagagaattaaagactatcttctcatggaggaagaattcattagaaatcaggaacaaatgaaaccattagaagaaaagcaagaagggaaaagatcaaaagtggatgatctgagggggaccccaatgtcagtaggaatcttggaagagatcattgatgacaatcatgccatcgtgtctacatctgtgggctcagaacactacatcagcattctttcatttgyagacaaggatcttctggaacctggctgctcggtcaggctcaaccacaaggtgcataccatgataggggtgctgatggatgacatgga

SEQ ID NO: 61045 - DNA, 2105 bp, Homo sapiens
ttaattatgagtagtttaaaaaacataataagaaatgttcagcttcactaataaactcaaatgaaaatagtattatggtattaatttttacccttcagatgggtcaaaggtttaaaagtgtgccaaagccaaaaattgacaaaagtgtataagtttgtgcaaatcttctagagaaccatctagcaaaagctataatagaaaaagctataatagaactttaaatgttaacatgtattgaggtcttgctgtgattatatgctttgctcaatgtattacgtatgcttatttttccttaaggtctcatacaacattatgtgaacaatgttattatctctattttaccaaagaagaaattgtgactctagcttgctaaataacttgctcactttgcaaacaacagaggcagattttgaaactaggcaatctgcatctagtcttagccttcaaaacattggaatgtactagtttcatattaggaaaacttaatatgtgcattttttaaaaatcagagcaattctacagccaggaaattatccagagaaaataagacaagtgcatataatttaagtgcaaagaattagaaattctttaagtgggcagcaatgggtaattgagtaactaaataatgatccttccatacaattaaatgtaatatagctttgaaagagttgaagtggcattacgggaataaatatgaaaagatggccatgtacaggttgaatgaaagagtatgcattaatatgtatcataaaaccccatatgtatacaatgagcatgcattaaagcatctgaatgcatatatatatatgtgtgttgaaaagccttgagagataagcaacaaactcataatattggctatccatgggatgtagggatagatatttggctgtgtacatgtttgtatgtttttaagcaaacaaactggaatattttttcttacagcttcaagctggttctattcaggaaaaaaatattaggaatcaactttattttccatcgtgctttatttccttgtattctaaactgaagtctggagtgttctttcctctgttgaatcacatttcaatggtcactcactgctttggggctaccttggaagcaatcactctatacccttgcctgcagacattttattcccagctgaaagctgtaccagagcagtttgaccattatactccatcttgagctgccctggtttatggtttcattcacttttgttcaacatcacttccaccttcccttgtgcttcaataagataatgggtgaggtgatagagcaaaaatgtccctggccatcctttggtttagaaatagtgattattgcaagtgaaattgagcacgtggcatcttcttagttttctaattctcaaagacttcagaaagtacactctttgaactcaaaacaggtttcaaacaatttactaattcttttgacaatgtttaaaactrtatgtggaagctgactttgaccaggaatatgccagaataaacagaggatacgcttgcaagtcaagtacaaaaagcagtcttgcctctcaattagtgttttccttttcaattttagctgctcatttgaaacacttggaaagtttttaaggaattatgatggccccatgcccccaaaatatgattttcttaatctgggatgggattcagactaaggatgaaatgaattgtctgaatgttttccgggttattgtagctaggatcgagaaccattgttcaaatgtctttatttttggagtttccttttggatgagatattttatatgacaaatgtcctagctttttggtggacctgtccctcatcttcaggaccaagaacgtcactgcaggcacagctgttagtgttctcaacctacgttaattttggttggattcattcaaacactgaaaaacctttgcatttgaaagtaggagcccttcttttgtttttctttgtttatttacttatcagactatgccttagtcccaaaatgatttaaagtcacactaacactattagtacaaagtaggtacctttcctgatcctttaattgaaattctttcttagttctggaaaatttattttttaaaaagaatgtattcatgttgtccaaagatgac

SEQ ID NO: 61046 - DNA, 2218 bp, Homo sapiens
ggttttcagaatatctatttagggaggaaaattgaaaccatcataaaagctgacatctggtacaattggatattcacaatttagattttatagaggtctctttaaatgacttctagagatcggcctataaatattttgtttaccaggacattatgaaacttagatatcattttcatgtcctttttaactaacttctctttcaatatttataccaaatgatgtagtttcccattcttttatgatatgagttcaccctcctatcaaaatgtccttctccagggagtgtcaatggtgtcattgaatcagtcctcttcatgtgttaccttctgtcccctgtctagtgtactagagaccacactgattataacctgcagtgactctcctgaccattcaccaatcttgttttttccagtggtgtcccacaaccataggtgctggaagcaattgcgttacctgtatccaaatgtcctatgacactgaaacttgactggtcatctgaaagtatacctttattcacagcaattgttataaggctcaagagatgtcagcataggctagtgtctagcatatggatctgattgctccaaatgcaaactagtagtagttctttcaactcacaaaatatgcaacagtgaggtaagtgaatgaatacatgaataagtgaatgagtgaaaatgatgcaagaccttcctagagcaccagtgatatacctttatttgattagctacttaattttttacaaccatctcccagttggcatgcccatggtaactgaaggaaaggagaacaactagtatatcatctagcccttctttcttacctcccacctgggtccaaaagccagatctttccacttctactaaaatttttgccataatttctgcttcagatcaatgggcagatatttttagagtaaagctcctccttgaaacataaaatatttcctcaaaatatattcacacttttggagaaatgtttgaaagctaacaaaaatgacaaaatagctgaaggataccttgtttgttttatttatatttttttctccacatgttttataaatcactttttatctaaagagatctgattatatattttggttgtggttaatttaaatctcaaagtgtctacccactaacatgttaccacttatgtcactgatgatggaaagatcactcttttcagctactccatggcccaagagaatattctaagataatgaaaatactttataagcatatgcattatcatagagaaaacagttttcataccatgctattcatagaaatgatgatcatatgatataaaatattaccatttccccaaaatacataataatagtgtcatattaatctcacataaagacactgtcattcctccttatccatcctgggtatagaatcttttaagggagggatttgatctgtgatggtctatgaatgtgtttgtgcctgattcctctaaagggcacttttttttctttttttcttttttggagactgagtcttgcactgtcacccaggctggagtgcagtggcatgatctcagctcactgcgacctcctgggttcaagcaattcttgtgcctcagtgtcccaagtagctgggactacagggacacgccaccatacctggctaatttttgtatttttactagggtcagggtttcgccatgttggccaggctggtctgtaactcctggcttcaagcaattcacctgcctcggcctcctaaagtgctgggattagaagggtgagttgccgcacccagcctaaagggcacttttaagccagttgaaaccaaacacttttaccaaaatggtgacacaaaatttatgtaggcaatatcacacttaaagttaaggcttttccttgtggcagagggagttggtattgaagcagcaacaattccttataggcagtggctaagtgcaaattcttgggctcgataactgagctgagttgacagtttggtagtgggaaggagaggaaaaatggaagtattcaaaatcagaaatcagaaaggcaactcgagtctaacgagatgtgcatagacgtggaaagaggtgcacctgaagccagaagccagggtgggaaaggactctaggccaagatcctcaaattagttatcttttcatttagtctctaaatttgaataactgctgtcggaaaratatcaatgaaacacagtgcttaaatgcccaacttaacatctttcaattg

SEQ ID NO: 61047 - DNA, 2364 bp, Homo sapiens
gcatatggcaaattaacttataatgagctcaaaagaggttgcaaaaataatttcacattatgatgatatgataacagttcaggatcatttaagaatgacatgttcttaaagcaaaaaacgacatgccagtccattattttgtatggaaagtaaaatgttttcagaaaagcatttttcattatttgagtaaagaactatatctcgttattaatttgccttttttctcactctctgaaaacacctaggatatattttaatttgttttggtggtctcatagtcagtctgaaatacattttctttttttctttatattttgctatttcagcgtttagcaaataatttctgagtaaattgtataggttcagtcctgaatgaagaactcttatttttatttgttagagaaatgttatatataatatcctattcatatctagaaaaattgatttgagttttaaaattttattatttataactctaatcattagtgacaatgaacatatactggacagcattttataattaagaatgtgacaatatattttagctacattcacttattaataatgaaattaggtaataataagatatgattaatcttaactggattttattcaagaaaaatcattctatttgggtcaaatatgaaatgaaaataagtgtccctgtgtcttagatgtattccttaaatattcaagccgcctagattctctcaattgggaattgacaagtgttattataacgtcgtgttcattgggtgataacagctctgtgttgtcatgtggtttttgctttaagaacatatcattcttaaaatatatgaatacagtgtcatatatatatgtgtacacaaaatttatatatatacttcatatatggattagttgctagaaactgaattcccttccaacaacagaaaaaggtgacaagatggatgatgggttatgatttattttatctccagtggggaaaaaaacctcttcaaaactatagtattgttgatttcaagtttaactcagaaaaaaaaaagttgcatcaggtagaacattttttcactctttctttttctatattattattaaaacaaatatatccaaatgttgatgccctctttattttattcatagcttttgaggcatgtttcatagctgtaatacagctgtgtatattcccaaactcctcactgctaagtgaaaaatcagttttcctttcttgccttttttaacttatttaaataggacacactcatgcatgccttccttcttgaaattctttcctgccctggcttccttgacaaccttttacgcggttttcctcctacctacgtgatattgccttctcagtgtccattatgggctcttactctaaaatgaagccttctccaagtttccatttttggccctaacctcttgccttgccgtcattctgaaaaggcaaatcttatttcttccttatgtcagctaccaactctaccgaactactttcaaaacagcatctctgacctttaattacaggtactcagtattatatagtacagcttcctaagtattgcacaattgaatctatgtcactatctcccaaacgggactcattttctatcctttaaatatgtgtctccgtctcagctaaacccactatgttcgagaaagtggaattacctttttgttccactcagcacaatggactgtgttggacatcttatttactggtctacatacaccaatgaaagctcagctctgtgaggttacagtctatttcttatctattttgttcaccatgttcmtgtagttctactttctcagaagatgcagagtgacccttctttgtcaccctttcccacaatcaattagtccccgactccttcttattccttatcctaaaagccatcccttgcccagccacattttttagttcattctttttatcatccatgacttcaaatagtataatagctcccaatcgctttttctgcttcagtcctatttatatatttacctcctcttgattaaactttgcaatgattccaattatttaagatgccgtaaaagtcccttttttatgcagctgctacttattccaatgtcatcttccactctgcactttccaggagctacagcatctacccacactgactaattttaaatttactaaacacatgaacctgaggcaacacactatgctcctatgatatgggatgtatatagatattgacataaatagagttatagacatcaatataggtatagatactggcaaaatcaaaaagatgtagatgtacagatatagatagatgcagatacaggtatttttaatcacctccagccaattcttcttcaattgcatgatctccatgaagcgctcctccc

SEQ ID NO: 61048 - DNA, 687 bp, Homo sapiens
tttatttctataaggtactggaaaatgcagactaatttatggtttacaggaagcaaatcagtggtaacccagggtacagtgaacaggcacatcaatggaaagactatggaagagaacaaggaaaacactgttgtcatccatattcactactatggctgtagtgatggtttcacaggtatatacatatatggaaatttatcagattgtacaccttaagtatgtacagtttgttatatatcaaatatacctcaataaaagctgttaaaaattttgtctcatttcaatctcaatatcattttgtgaaatagtattttctaattttacagttattaaaactgtggtttagagaggttatattaaattgcaccttaaaaatctgttatacagaattttaaatataggtttatctcagttgtatactctttcactctcaatattttccctttagaagactatgattgatttagtacaactattatcatatacaaaactatggactacaaaatctgaacaagtgttatataacatctattcactgtttaaatataatcttcaatctttctgataaaaaaagaaaaccccattcttacatttgcatgctaaaactttatggtttaatattatatctaataataaacttaataaacttaccagtttaatatcacawacagtaccacaaagatgaaa

SEQ ID NO: 61049 - DNA, 888 bp, Homo sapiens
caggacagtatgattagctcagcaagaccctaaccagttccccatcaaattttagagagtgttaataaagaaggatatgaaaatgttaagatattaagattcattaatccagccaaaaatatttattgagggctaagtatgtacaaggcattgaataaattctgtggtatattcaaagaggtggtgcccagatataatgaaaagaataccaaattgacagtgtgcttaggtgcttaacctttctttccttcatcttttaataccagtagcagcccccacagtgggatatgtccatgtagaaggttttgcccaacatctggcacacagttaaatgctcagtaaatcttagttccaaaacatattaaaaattaaaagacttgattcaagctttgaccttgatggttacttactggacgaccctgggcaagtattttctcatgtgcaaattttttaaaaaaaagtaggaagaatcaatatcgtgaaaatggccatactgcccaaggtaatttatagattcaatgccatccccatcaagctaccaatgactttcttcacagaattggaaaaaactactttaaacttcatatggaaccaaaacagagcccgcatcatcaagtcaatcctaagctaaaagaacaaagctggaggcatcacgctacctgacttcaaactatactacaaggctacagtaaccaaaacagcatggtactggtaccaacacagagatatagatcaatggaacagaacagagccctcagaaataatgccgcatatctacaactatctgatctttgacaaacctgacaaaaacaagaaatgragaaaggattccctatttaataaatggtgctgggaaaactggctagccatatgtagaaagctgaaact

SEQ ID NO: 61050 - DNA, 734 bp, Homo sapiens
agatttcaagtaaaaaactttttggcaattaaaacaaatttaatgttataatagtatagctattataggaaaatgaaaagaggaaaacttccaatggtttcctgtttcctgcagaataaatgttataaccttcaggtgttgttctgccaagccatattggagcctgaggcaaaggaaaaattagtactactgatctagtctttatttaagatcttgttcatcgttgagtgtttttgcattgactttggttttttaaaatattgcattaaaatgttagttatctttatgactgaatttttttggagttccccttaaattttgtgcctgaggaaaatacctcacttccctcaccttaatcatacataaccctgcccccagactccttaacatctgaagttatcctaattatccaatggagtgagcactgtagtacaccacctgactaccaccaaccctttaaggggtttattctcatactgttgagactaytgaaggctgacacctggcatctgagtacgcactccaggcacttgcctttacctgaagagagacaccttgttaatagccatggcaagccacacaatgaaaaactgatgtgcagcaattctgcagggccatcctaaattcagagcttcctgaggtgattggttgcagctacgctacagcccagcttctctctctgtccagtcctcctgccttcacttccctacagatgttgattccaagagcactca

SEQ ID NO: 61051 - DNA, 1381 bp, Homo sapiens
tgggcaacagaaaaagactccatcaaaagaaaagaaaaagaaaaagaaaaagaaaggaaaagagagaaaagagaaaagcaaaagcaaagaaaagcaagcaatttgaccactgtctcttcctctcctatctttccttggtcaatgtctactccatgatgcattaagttcactacactgtgaattattttccctggaccctctgggaagcactgggagaggcagagcttctgcagcagagataggagcaggtgcagaagtcaccttatcagtgagtgctatgtgtgaggactctgaaatgtatgccccagaacatgagagcagcctgagctttttacccatggaaacagtataaactgtcacttgggcagctgtggctgtgaatgtgaggccaaggtgtagacagggctaagctgatctgaaatagtgaataaacaggggctggtacaactacagaccatgtgtggccataaaatttgtatgtggccatacattttcaattaactccaaatttcttccataccttagaagctcaaagttgaatttctgcccaagtctgttttctaaacagggcaaatgagtttatgaaatattcagaaatttatttaataattatgttccaaggactattgacctctaaccttgaggctaagaatatctgttatagaaaagtatttgttagaatatttggtgtagaaattaattttttcacttaaacttgtaaactactctagttataggaggttaaatgcacttaccagtcttgtggtaattaatcatcaaccatgacttctgcgactttgttataatattcccttattgggaacatatctaaaagcctccctcctggaaaaattagttgttagtaaaataaacaggtgattccttccattttattttaaagtaaacatctcattcttccaaactgctaaaaaaacttcatataatatgtctgattaatgatctgagggggtaaaactctatatatgtatgaatgggaaattttagaatagtcattaatattatgcaagtgaaggctaacaatatagagagttgttctcaaattaaattggagcaaatgaaacagaaatcaaattctatygacagtatacacagacccctgtgggaggagtggggtatgaatacacacacaccaaagataaaacaactcatcacaaatttatggatgcttttgcctaatccctcacatatttccattccttccaaattttctatatttatattaatttctaatcacaaagttataattttataattctgactagaatcttaaaaggaataaaaataccaaatttagctatgataggtatttaaaaacaaaatatttaataatttaaacagaaattgaatcacttatatccca

SEQ ID NO: 61052 - DNA, 1381 bp, Homo sapiens
tgggcaacagaaaaagactccatcaaaagaaaagaaaaagaaaaagaaaaagaaaggaaaagagagaaaagagaaaagcaaaagcaaagaaaagcaagcaatttgaccactgtctcttcctctcctatctttccttggtcaatgtctactccatgatgcattaagttcactacactgtgaattattttccctggaccctctgggaagcactgggagaggcagagcttctgcagcagagataggagcaggtgcagaagtcaccttatcagtgagtgctatgtgtgaggactctgaaatgtatgccccagaacatgagagcagcctgagctttttacccatggaaacagtataaactgtcacttgggcagctgtggctgtgaatgtgaggccaaggtgtagacagggctaagctgatctgaaatagtgaataaacaggggctggtacaactacagaccatgtgtggccataaaatttgtatgtggccatacattttcaattaactccaaatttcttccataccttagaagctcaaagttgaatttctgcccaagtctgttttctaaacagggcaaatgagtttatgaaatattcagaaatttatttaataattatgttccaaggactattgacctctaaccttgaggctaagaatatctgttatagaaaagtatttgttagaatatttggtgtagaaattaattttttcacttaaacttgtaaactactctagttataggaggttaaatgcacttaccagtcttgtggtaattaatcatcaaccatgacttctgcgactttgttataatattcccttattgggaacatatctaaaagcctccctcctggaaaaattagttgttagtaaaataaacaggtgattccttccattttattttaaagtaaacatctcattcttccaaactgctaaaaaaacttcatataatatgtctgattaatgatctgagggggtaaaactctatatatgtatgaatgggaaattttagaatagtcattaatattatgcaagtgaaggctaacaatatagagagttgttctcaaattaaattggagcaaatgaaacagaaatcaaattctattgacagtatacacagacccctgtgggaggagtggggtatgaatacacacacaccaaagataaaacaamtcatcacaaatttatggatgcttttgcctaatccctcacatatttccattccttccaaattttctatatttatattaatttctaatcacaaagttataattttataattctgactagaatcttaaaaggaataaaaataccaaatttagctatgataggtatttaaaaacaaaatatttaataatttaaacagaaattgaatcacttatatccca

SEQ ID NO: 61053 - DNA, 640 bp, Homo sapiens
gggcagaatgctgaatgtgacaaaagaacataactttattacaaatgtatgaaactaccagagtaaggaaggtagtggggaaaagtgctgaccgaagtaattggaaatgagtggagactgtaagactaaaagcaaaatagattgtatgtaagagctgtattctacttgataaagttttaatccatggtagtacaggttaacaattctgaaactcttataatgtatattggaattgaacaaataagtaaacagatggcaaagagagagagagagagagagagagagagagagccagataaacaaagaatwagctacaatgattcatgtagaaatggattccaaatataaatatatatggatacgtaaagaaattcctatagatgtatgtacatatacaagttaatgtgcacaaatatattttctttcgctaccagctgatagggtctcatggcaagagcaaatccagcacccatttttagtttttaataccatcttcctatgaatagaaacagagctccatggagaaatggctaattctaggtctgaagcagccaatatgtgtgatgggcctggaacgtattgtggtggcaagtcctcaaaaaataaaataaattgatggggacatatcaaagggacctca

SEQ ID NO: 61054 - DNA, 640 bp, Homo sapiens
gggcagaatgctgaatgtgacaaaagaacataactttattacaaatgtatgaaactaccagagtaaggaaggtagtggggaaaagtgctgaccgaagtaattggaaatgagtggagactgtaagactaaaagcaaaatagattgtatgtaagagctgtattctacttgataaagttttaatccatggtagtacaggttaacaattctgaaactcttataatgtatattggaattgaacaaataagtaaacagatggcaaagagagagagagagagagagagagagagagagccagataaacaaagaataagctacaatgattcatgtagaaatggattccaaatataaatatatatggatacgtaaagaaattcctatagatgtatgtayatatacaagttaatgtgcacaaatatattttctttcgctaccagctgatagggtctcatggcaagagcaaatccagcacccatttttagtttttaataccatcttcctatgaatagaaacagagctccatggagaaatggctaattctaggtctgaagcagccaatatgtgtgatgggcctggaacgtattgtggtggcaagtcctcaaaaaataaaataaattgatggggacatatcaaagggacctca

SEQ ID NO: 61055 - DNA, 640 bp, Homo sapiens
gggcagaatgctgaatgtgacaaaagaacataactttattacaaatgtatgaaactaccagagtaaggaaggtagtggggaaaagtgctgaccgaagtaattggaaatgagtggagactgtaagactaaaagcaaaatagattgtatgtaagagctgtattctacttgataaagttttaatccatggtagtacaggttaacaattctgaaactcttataatgtatattggaattgaacaaataagtaaacagatggcaaagagagagagagagagagagagagagagagagccagataaacaaagaataagctacaatgattcatgtagaaatggattccaaatataaatatatatggatacgtaaagaaattcctatagatgtatgtacatatacaagttaatgtgcacaaatatattttctttckctaccagctgatagggtctcatggcaagagcaaatccagcacccatttttagtttttaataccatcttcctatgaatagaaacagagctccatggagaaatggctaattctaggtctgaagcagccaatatgtgtgatgggcctggaacgtattgtggtggcaagtcctcaaaaaataaaataaattgatggggacatatcaaagggacctca

SEQ ID NO: 61056 - DNA, 673 bp, Homo sapiens
tatctgcctttccatggaacaagagagtctagtaaaaagaacgagtactataagcaagaagccaagacatttactagttgtagaactcaggtaaatcatatactctctcttctaatagatttttctwcctgtgttgcagaaatttttttgtgtgtgtaacaaattttacacaaaagtaaggtaggtattattaaggaatgccttttaaatattaaatccatttttaaatattataaaagcaggcaaataattaaattttccttattcatttctttctttctttcttttctttttttttttttgaaatggagtctctctctgttgcccaggttggagtacagtggcatgatcttggctcacgccaacctctgccacccaggttcaagcaattctcctgcctcagcctcccgaatagctgggattacaggcatgcgctaccacactgggctaatttgtatttttagtagaggttttgccatgttggccaggctggtctaaaactcctgacctcaggtgatccacctgcctcagcctcccaaagtgctaggattacaggcatgagccaccatgcctggcccatttcctcttttttgaaatgatctcacattttattgaattaaaaacttatgaacgttaagagttcgaggatgtgctagaggtcaggttaacattt

SEQ ID NO: 61057 - DNA, 673 bp, Homo sapiens
tatctgcctttccatggaacaagagagtctagtaaaaagaacgagtactataagcaagaagccaagacatttactagttgtagaactcaggtaaatcatatactctctcttctaatagatttttcttcctgtgttgcagaaatttttttgtgtgtgtracaaattttacacaaaagtaaggtaggtattattaaggaatgccttttaaatattaaatccatttttaaatattataaaagcaggcaaataattaaattttccttattcatttctttctttctttcttttctttttttttttttgaaatggagtctctctctgttgcccaggttggagtacagtggcatgatcttggctcacgccaacctctgccacccaggttcaagcaattctcctgcctcagcctcccgaatagctgggattacaggcatgcgctaccacactgggctaatttgtatttttagtagaggttttgccatgttggccaggctggtctaaaactcctgacctcaggtgatccacctgcctcagcctcccaaagtgctaggattacaggcatgagccaccatgcctggcccatttcctcttttttgaaatgatctcacattttattgaattaaaaacttatgaacgttaagagttcgaggatgtgctagaggtcaggttaacattt

SEQ ID NO: 61058 - DNA, 484 bp, Homo sapiens
tgactgaactggagcctaattcaggcaactgcctgccataccatcttcctggcaagatttccccagcactgtggggaagggagtgagccaacttagagaacgcagccagcttagagactgatcccgtaagggttcaagaacagccagttgatcactactgacctactggttcatcctagttcagtggcttttggtctcttataattatttcattctactctgaagaaggttctttggaacaattttatagygcctttatagaggcactatatgttaatcagtaagatctggtcaacaaaacaaaccttgttaagtcattccaagaagtcatgaagatactgaaaagtgctattatctccaaaatagggtagaaaaacagaataagggagaatttccatacctcatccagagtctcacagtgtacagatctttcaagcgcctctccaatccagtctctacccttcttcacctgctctgtgccctg

SEQ ID NO: 61059 - DNA, 484 bp, Homo sapiens
tgactgaactggagcctaattcaggcaactgcctgccataccatcttcctggcaagatttccccagcactgtggggaagggagtgagccaacttagagaacgcagccagcttagagactgatcccgtaagggttcaagaacagccagttgatcactactgacctactggttcatcctagttcagtggcttttggtctcttataattatttcattctactctgaagaaggttctttggaacaattttatagtgcctttatagaggcactatatgttaatcagtaagatctggtcaacaaaacaaaccttgttaagtcattccaagaagtcatgaagatactgaaaagtgctattatctccaaaatagggtagaaaaacagaataagggagaatttccataccycatccagagtctcacagtgtacagatctttcaagcgcctctccaatccagtctctacccttcttcacctgctctgtgccctg

SEQ ID NO: 61060 - DNA, 3362 bp, Homo sapiens
acagtaaatttttaaaacaaagaacagtaaagagtatcctataaagggacccagctctgtgctagataacatagagcagtgggtcatggagcctggttgtgccctaccccacctctgttcccactccatcaagcaggaggagaagagcatgatacaaaactggccttctttacctgtgatccacctggactgagtgagcacatttatttacaaaaatgtgtgcaggccaggtgcggtggctcacacatgtaatcccagcactttgggaggccgaggcaggcagatcatgaggtcaagagatgaagaccatcctggccaacatggtgaaaccccgtctccactaaaaatacaaaaaaattggctgggcatagtggcaygcgcctgtagtctcagctacttgggaggccgaagcaggagaattgctcaaacctgggaggtgaaggttgcagtgaaccaagatcacgccactacactccagcctggcgacagagtgagactccatcaaaaaagaaagaaagaaggaaagaaagaaatgaaaggaaggaaggaagaaaagaaggaaggaaggaaggaaggaaggaaggaaggaaggaaggaaggaaggagggaaggaaatgtgtgcaaactgaacagtccataggtcctggacaaaggagaaaaatagaagagcccaaccactgctttaaggaaacatttttcaaagtgtcatgtgagatttattctgcaaccaaatcatcttgaaattgtattttgtaaaaaagtgtatatgtgggattcacctcaattgaacgaatcagaatccctgctactaagatcttaagagactcttctgctgaactcaagtttaagaaacactgacctggggacctcagaaatctaattccttgccttctccaatctaccttctagtcaagagaaaactagaagaaacaatgcatttagtaaataattatagattcagtgttatgagacctaaaatgcgagagagaattctggatggaaagggatgaacaagagactcttattaattgcaaaaatatgttttcccccaataatacatgtctcacttagtggtcatcatctggccactggaagccagcacagaacatttcctccccataaacagcattgatcagcacagtgatttttgaaatttgaattatctatgagcattttagacataaaaagatatggagtccttcctgaaaagtcagatcggcaataattggttatcactgagtagtagacaccccctttagatgggtatttgcagttgattttacaatatccccaacattctctcttctccccatgagagtgccacttgacatttatcaataagcttatgctggttttgttgctgttcaattaagaagaaagtaaaagagcaacacgagaaagatggtggagcaagagcaaagaaaaactcctttggttctagaaaatctcctgaaaaagaggaaggcttatcaagcccgcaaagccacccaggcaaagcaggcagtttggcaaagaaggagcagaggaaaggaaaagggctccgatttaaacgactggaatcattcctacatgattcctggtggcagaaacgtgacgaggtgtgtctcaggtgactagtagtaaaaccccacatcttggaattgccaaataaacattccttggcctttgctgtacacatagaaaggactgatagcgtgagtttactgctgcagagaaccattgcaagacttcgcctgaagaaaattttagtgtgtctttgtaaaagtcaccccctagaacctaaaaatgctgtgtatagtggaaccttatgtgacctggggatttccaaatctgaagtgtgtccgggaactcactttgaaacatggacaagccaaggtcaagaataagaccatccctctgacacacaacacagtgattgaggagcacctggggaagtttggctcatttgtttggaagacctcattcatgaaactgccctcccagggaagcatttccaggagatctcatggttcttgcgccctatccacctctcagtggcccatcatgctacccaaaatagagtgggcttcctcaaggagatgggcacacctggctatcagggtgaatgcatcaatcagctcatccaccagctgaactagacccaggtgccaaactgcagtaaatttttatcaatgaagtagaagcatgtgtttttgtgttttgggaggaaatttttatcaagtatcttcagagattatttcctgctttatcttcaaaaactggaaaggaagggtcaaagaaaagacaatagatggccagctgtggtggctcacatctgtaatcccagcactttgggaggctgaggcgggcggatcacctgaggttgggagttcgagactagcctgaccgacatggagaaaccctgtctctactaaaaatacaaaaattagccgggcgtggtggagcatgcctgtaatcctagctactcgggagactgaggcaggagaatcgcttgaacccgggaggtggaggttgtggtgagccgagatcgcaccactgcattccagccctggcaacaagagtgaaactcagtcttgaaaaaaaaaaaaaaaagaagacagtagcttatgttcatggcaagcacctctcttcacagtccagttccaaggaaaaatgccagcgttttctacattggctgccgcctcgtctgaaatcagcacattccatggaggaaggcgatctgctttgttgcatcttctatcccagggtttaatgttggtaactgagtaactctagcttttgtacaagagtccctaagactcctgcagtagtcgaccaagcccagggacataattgaatctggagattcctggggccttgttttgaaaaagacttgaaatacacgtagggagaaaggcacaaaaataaatgttcacttgtctctgcaaaagaagaaaaagaagaagaagaagaagaaagtaaaagattatcatttaggggttgccattcattacccgcatggccctggcccctggaagcatttgagtttgaaaactcaagcaatgtttaaggaacccctaatcccagccatcctgaccccactgtttgcaaaatctagacagatgagattactttgtcagaaacgaaggctttccattttgtataattttgcccataagcagcattctttatcaaaactcttggagtgcaattcagaggaggcatttgaatacatgaaatcatctattcgacagagggggaaaacactacctctaaaaatgtcttccagcatgttgaaaaagcactcaatttggaggcaacaaagccaagccaatattgactgcacaaacaatagggtacttcttttcagatcaagcaagaca

SEQ ID NO: 61061 - DNA, 807 bp, Homo sapiens
ggcgatatttagataagccttttaaaaccagtcatcttatctaaacttttaagctctgtgctacctaaatatatgtccagcccatcccttgtgttagtttactactgggcaaatattcataaaacaatgaaaaagagttctatattgtactattgaaaaccatacttgaagctaaccccatatccttgattacccattccgctgtcctgatggatctcttccctatcttccctttagttaccagaaaagtcccctagagtaatggttttcaactggagggaattttgccatcaggggacatttggcaatgtctggagacatttttggttgccacaacttggaggatgctatgggaatcagagaccagagatgctgctaaacatccttcaatacacagggcagccccacaacaaaaatgatccttctcaaaatgtcgacagtgctgctgttgagaaacttcactctagattatgggggatgttaatatcatgggggatcacaataaggacatctcttgtttacacttatcaaatttaattttattgacattaaaataataaacctggtatttataaataggtagaggaaaacacactgtcttaacagaaatgataaagataaattataaagcacaacttcgtgctagccactctattcggtcctttatgtgtatcttcatctcatccttacaattctatgaaagaagtattgctsttttccccgttttacaggaaggtaactgcagttcataggtgaataaatgtgcttaagtccacatggatacaaaggagtagagccaggatttgg

SEQ ID NO: 61062 - DNA, 732 bp, Homo sapiens
tcctgtctcagagtttaagaagcatgactctagacagaattatcattacatgtagacagatcccttgtctaattagagggtctctacatgctcaagattgtattatatttattccaaaattatccctatatctatccatagttcccacttatgccctttttaaaagtgagccttagaaaattcaataaggtacccttagaaaaagatagctagaattttggctttaagcaataaatatctgaccaattatcaatctttattaacagaaatttagatcattgtttcattctcactgctatatatactcagttgtatagatatctcgccaacaaccctcccataccataagtaaaacctgttgatttaaagctgttttcctaagtaatttgtctaaagatattatgttaatatttttccaggaacaggactgcattttaaatcattgtaatatatacatattcatacatgctactttatatatgttaggrataattaatttccttttttattttttccttgcatcttaaatttgttaaaagagctctcatgatagttatgtattaattaaaatttcaagactgccaaacaaatacatttatttctttgtatacattgttgctttatcatctgcatttgataattctagtttttcaagtctctttggttcgaattctttcatttttgttctcgtttgaacttacagaatccagtttcttgtgttccctattatcg

SEQ ID NO: 61063 - DNA, 732 bp, Homo sapiens
tcctgtctcagagtttaagaagcatgactctagacagaattatcattacatgtagacagatcccttgtctaattagagggtctctacatgctcaagattgtattatatttattccaaaattatccctatatctatccatagttcccacttatgccctttttaaaagtgagccttagaaaattcaataaggtacccttagaaaaagatagctagaattttggctttaagcaataaatatctgaccaattatcaatctttattaacagaaatttagatcattgtttcattctcactgctatatatactcagttgtatagatatctcgccaacaaccctcccataccataagtaaaacctgttgatttaaagctgttttcctaagtaatttgtctaaagatattatgttaatatttttccaggaacaggactgcattttaaatcattgtaatatatacatattcatacatgctactttatatatgttaggaataattaatttccttttttattttttccttgcatcttaaatttgttaaaaragctctcatgatagttatgtattaattaaaatttcaagactgccaaacaaatacatttatttctttgtatacattgttgctttatcatctgcatttgataattctagtttttcaagtctctttggttcgaattctttcatttttgttctcgtttgaacttacagaatccagtttcttgtgttccctattatcg

SEQ ID NO: 61064 - DNA, 1262 bp, Homo sapiens
caatatacatgttgttatcggtactaattaatgtctttacatatctactaacttcactgtagagaataaatatgtttctgcaaatttatacacaaattctaattttaacaatcgaatctttcttttactaaactagggcatttgctgtggaaaggaacccttattctttttggtgttgtagttcttgttttgctttcaaacaatgaaaacattatgtaatttgaaaaattatccccatgctgtttgtgttgtaaatccatgtttgtttattaaagcttttactcttgagactatattgataacaatctaaatattttaccttcatcttatataagcttcacatgttggtattaaaaaatcctcttgtaataaacacaactctaagagtttaatgtttacatgctagagaaatgaaataagcttatcaatgatgaaatagatatatgtatcctactttctggaaaataacatgtttcattacttggctgtttgatttacaaaaattatagattgtattggatgtcccatgaatgtgcctggtaaaatataatggaatacttatatttctcttaagaatactctaatataatatatttgtatttctctgaatttgaagggaacagcctaaaactatcaaaatgcaaatgtaacataattttgccaggaacctactccttcatcaggaaatatagaccacaataatttaattcatgctggaaaacaatgctttccattagcacagttttattttcaaaaccagaataaattgttgatttagaagtagtctcagtcctcatctttggaaagattccgtttttcttattcaggctacaagtacttgtaaaagagtgtataaaaatatttcacctgtggggggaagggggagggatagcatttggagatatacctaatgttaaatgacgagttactgggtgcagcacaccaacatggcacatgtatacatatgtaacaaacctgcaygttgtgcacatgtaccctaaaacttaaagtataataaacaaaaatttcacctaaccacattcattttggctacctagtttaatgtgaattaccttgaaagaggggattaacgggcatgactgtggaccataaaatatgtaatagataaatattcttgaaaaacagtgactcttaaagagttagtatatttttcactcatcttggaacctgcagtaatattgatgtccttgaataaagtgatatatttagaacagatgactggctgctatggggatttaaat

SEQ ID NO: 61065 - DNA, 503 bp, Homo sapiens
atttcttttaaaaattacagtaaaatattctttataaagtagataactaatgcccacataaagaacaagaaataatgcaaacctcaaacctggctaatcataacaaaaatggaatgaatccaatataaaattttttggacaggtctttggtttacatgatcatttactctccagccaaaattacgtttagtcctttagtttttccagctatccaaataaacctgaggttgttttccaactctgagtcctgaattgcacactgtcaaaaatgtacctacaaatgtatttcaaatttactatcttttcaaagaggattaggttttagtttttaaaaactgttttagaacatgaattgccatttcctgggaggggcctatgtagaaacttaggaaacctccaaaccatggcaggttcacaaatgctctgtccctggcatagatttccttayactgaatcctggctctgccatttactagctgtgtgactggaaaagttatttcatt

SEQ ID NO: 61066 - DNA, 1912 bp, Homo sapiens
aggttgtatacctgcatctccagccacctattggatgtatttcttggagactggagtaatccaagttcttatcctagataaatattggaataatctagatcattattttttgggtttcatccagagggggaaaacaaaataaggatccatgtggagatgaaaatgaaatattagttttagattagagctatttggtaatttctgagttggagaacgtgacaaaactccctttcctttttcactttcctgccaaccatcctcagtacatacacatatactctctctccctcacccccctctctcccttttcttgccttcaggctagaagagaaaactatgacctttcttatattccatgcagcagaggaacaacagagagagaaaagagataaatcttcactaaattcttttttttttttttttgccccactctgtcaatttcactcaatggatgccaaagtctctctaacttggcaaatagattggttgctttttcacacacatggagagatgtttgagaaagaagtaatgagggggacagaatagtattattctgatacttacctctctttaaggaaaacatgaaggagaattaagtttctaccagtgctctccagttggatatcctaaagggacttgggttttgatagacaaaactgcagcctttcattttactgttaagtctcaggctgcttttcctcctagtctcactgactcagtgaacataatcatcctccagttattaaactgagaatgaggataagacagaaatatgcatttcctattatttcttgatcttctaggaagtgttaaaatactaaaaatagagaaagatgtacattcctcttcacaacaatatcactttttagcaagtggtattttacaatttcatgatgctatttaactctgtggctgtcatcaattattcgacgatgtggtattcatgaatttaccgttgtaatatccaaccctctgctctacagtctcattctgagctggctatttttttgagaattcaattttttctacctgactgataatctctttgtctctgatagtatacaatattcaggtgttatgattggatatggtttgtttggccccacagaagctcatgttgaaatttgacccccagtgtggtggtgttgggaagtggggcccaatggaaagtgtttgcgttattggggtaaatacttcataaatgacttggttccattctctcagtaataagttcttgctcttggacattggactagttctttcaggaatgaattagttcccacaagagcaggttgttataaagcaaagttcctctactgtttccccctcctccctctttgtaggtatccacttcccctttgacttatctgccatactgtgacaaaacccaaccctcgcctgaagccaaggctatgccatcaaacttctcagcctgtagaactaaataaacctctttttctttgataaattacacagtcccagatattattttataccaacagaaaatggactactagaacaggattgttcaaaagtatgtgtagagtgtacatacatctttgaaacttgtgaaataaatggatgctatctaggtctataaagaaagaagatttgtaaggatttaaagtcatactttaaatataaggttcttagtttataagttacaagttcttagactgtggctactcgggaggctgaggcaggagaatggcgtgaacctgggaggccgagcttgcagtgagctgagattgcactactgcactccagcctgggcgacagagcaagactccatctcaaaaaacaamaaaaaaaaaactttactctaaagttagttagtatgaactcttcacacatacaaaaatcatgttctctaagaagtaaaattcttagaattgcaaagaacacaggaata

SEQ ID NO: 61067 - DNA, 1749 bp, Homo sapiens
cactgaagggagtaagatgagggagggtggggtcaggacgggtgggtcgcccaggctaggggtggagcaaaatctggaaccacccccctctgtgcctacctggggaattggagcggggtcgctggggaataggtctctgggagggaaccagcagctcaggccgagcctggaaacagtcaacatgttcagtggggtgggggctccagagcagactcaggggtctccaagaccctgcataaggcagaagtagggagaggaagagctgctcactctcactctccccacccccgacgccctggccctggctccctcctctaactaattgcctggtggcctgcctgctgtcagccttcccttgctggacgctgggtgacaggcaaaatgaggctgtgccttctcccagatgcatttcccagtccctgcaggtctgagggtgggggctcaacggagacacaggccgcagagggtkctggctcagttggtggccctccatctccttgacatcatttcccctcgcctggctggtcattaggccatacgtgctagatcctcagcatggctccagagggtcacctcctaacagttcctgaaaatgttggcttctgtcctctcccaagagaaggctggggggagtttggaggagctatggggtggcgagggatccatccttgtgaagacaccttgcttgattagaggagggcagggacactgagggacgcctcacaccaggctggcccctgacttctccatctctccacctgccctgctccccgctccccaagcataggacttcacaaagctgagctgagctgagcagatgggggaggggggagaatgaggagacacagtctctgggggccatctggagagcctgcattggtggtgggtccttggacccctgccaacctggttggagggacatgggtctgtctttccgccaagtgtgtgtctatggtcgcgggtgtgggctcttggggtgaggtcctgaccccaatcttctgtttagcacgctgatggggaggagccctgtgaataattcagaccaggggaaaatccacaagtcaaatggtgaggttctgatgtgtgtgtaggacttgtttgccctgcttggatttgtggctgtgattggctgagtctgacactaaatgccactgggagtccctgagtaccaggatgtggaggggggacacccacaggtgggtcagagagggtgtgctggtggagaaagtggaggtgcctagcagaaatttagggtagcagcacccaccagggcttaccccctaccaggtgcccaggaaccccagtgtgtttataccttcttcccggggtggctcagcctgtcttatatcctgttgtgggcaggttaaacccaatctaaggacacttggctaagaccctggttcctctcattccccaccagcaggggcatgaggcttgccccagggtgacaaccttgacctctgcctgaggctgcccagggctaaagagttggttcaaccctcaggtctggcagtgtgtatcgcagagttggtcgctatgtgaacccccacccgaaccaccatggccagagctgagtcctgtcctcggtcagtgtctaagaggagaagaaccttagattgctgaggggaggggcccaccgccatcagtggtccccagtctcaatgggagaagcacagtcctgccctcagggatgtagtccagcggccccagggaacctcttccttccccttttgtccctggtggggcata

SEQ ID NO: 61068 - DNA, 670 bp, Homo sapiens
ccacaaattaaatggggaatgagaggagcaactgaaagtctcaaattcaggctatagatggaccccagccccccatactctcccgtcctacatgagatgggcagtggagggccaggacagcaactccaagccagtgtaggttttggaggtagacagtgaggaggcttgcttctgtcctttgttagctgagtgcccttggacagcttacttacctactctcagcctcagtttccccatctctaaaataaggctaccaatacctaccttctctggccattgtcaggatgaatgaaagagctctgaaagtatttctgtaattagcagacatcagagattgttattctccaaggtaagaggcccccctagatccctggcggtgacagtgtcaagattctttttccctcctctgcggtgcccrctccttttccagccttgtggctggctctcatcctcctttccgcaaccccccactcctccttgggaccaccttggcgggcccagcttctcgcagcctgccatattccataggtgcccccattctaaaacctgtaggggtgccctgcacaggcgcacggttggtcgaggtgggacaggtggcgggggtctccactggcctgcgtccgcgccccccaccctgtttaggagttcctgtttggagatggctccccct

SEQ ID NO: 61069 - DNA, 543 bp, Homo sapiens
atcctgagaggtcacgttgtactaagctgatgagttcagaggtcacatggggttcttaagtttatgatgaccctacatcctaattttccctggacaatcctaggttaagtatcttatccccatgtaattattaatataaccccttttctctcctaaaagtgtcctagctttggacagtaaattatatgatcacacaaattacctttttttttttttctgtgccaacatcccttcaaaatcctagtgacttaatacactaaatatttagkttttgctaatggatctgtggatcagctgtagctttgccccaggttgtcagtcaagtttaagtttactccttattttggactttgggctaatgccacaagtcttctcattatggcagtcaggctggaagatcagctcttatctgagagctcttttctcatgcagaatgtgggagcacaagggacctttgcttcaaggtggcatgggccatattcactcgtatttcattggccagagcaagtcatatgcccaagaccaacactggggattgggatt

SEQ ID NO: 61070 - DNA, 569 bp, Homo sapiens
aggagaactgtgcccatggcgtccgcgtgcagcgccaagtcacagagccaacctcgtcggcccggtcagtaatgccttctcctttctgaatgcaaggaaggaccaccccattcccctctctggcaacaatagcactgataggtcaaggagcctgtaaccttttagatttctgttctgtatcagagacatgaatatgggaaaactccatgcttcctacgccctccttggtctctacttagttcataaaaataatagttaacatcattaagacagcatgtgtgaagtactctataagaactttatattcatattttattatagctcacaacttagcatgaaatgtatactattatcattcttattttacagcagaagaaacttaagtcaaggcgattaaattttttaaaaagctgtatatgtaaatacccaggtcaggatttgaaccctggytcaaccaacacaagaatctgagctcttaaccacccttccctgctgccctcctactgctttagaatttattccctgtgcatctgacctatcctaacagtcacacacaggctctcttcaga

SEQ ID NO: 61071 - DNA, 1047 bp, Homo sapiens
cacatgtagacacaccttcaagatacacatttacattaatgttcacaggtcwaaggtgttaagactcagggaggatcatggaggggtgaggggcttagatcagttcagaagaggaaacttttcagatagatttctgtcaaagtaaaattgaggtgcagagccctcttcgagcccttcatcaagattcacaaaaataaggcattaggctagaaatagctctctgcaggcatttatatatacctttaaactccattgtttgaagcctatcaatttggagtgctgaattctactagattctaagatattagagtaagatagaaagatgaattttagtcaaccaatcaatgtgcactcaatggatgcctactacagtcacaggcagtgccctctgggccctgggatagagagatgattgagatattatccctacccgatgatagtctagtagggaagatgagactaatacatatgaaaccagctaatctaacttcaacgttagactattagagcccaaaaagtgtcctgccttgtcaaacatgctattttgccattgaaatactgctatccagacatagtaagtaaatttcttatggccacatgatcaaataatagaccagttcttctagagagaattactctctccatccctttgcattgttttataattttataaaaaacttttacatggctctgtgctttaactaggcatctgcctgtctgtccttccttcagggatgtgatgccccacaggtaagaacctgaccttatacatttaaggagcgcacagtgactgataaggccatatttagccaggaggtgctcaactcatcagccttaagtgatcggaaaggatcaaagacaacagtccagggaattcctcttggccaaggtcgccattcattacaccagatagcacaggtagtaaagacctaaatcttggatacaaattcgaggtaagatattttaaacttggcgtaaaattatagacctgtttctaagcccttctgtcttcttctccattttaaactcagttgctttataatttta

SEQ ID NO: 61072 - DNA, 1047 bp, Homo sapiens
cacatgtagacacaccttcaagatacacatttacattaatgttcacaggtctaaggtgttaagactcagggaggatcatggaggggtgaggggcttagatcagttcagaagaggaaacttttcagatagatttctgtcaaagtaaaattgaggtgcagagccctcttygagcccttcatcaagattcacaaaaataaggcattaggctagaaatagctctctgcaggcatttatatatacctttaaactccattgtttgaagcctatcaatttggagtgctgaattctactagattctaagatattagagtaagatagaaagatgaattttagtcaaccaatcaatgtgcactcaatggatgcctactacagtcacaggcagtgccctctgggccctgggatagagagatgattgagatattatccctacccgatgatagtctagtagggaagatgagactaatacatatgaaaccagctaatctaacttcaacgttagactattagagcccaaaaagtgtcctgccttgtcaaacatgctattttgccattgaaatactgctatccagacatagtaagtaaatttcttatggccacatgatcaaataatagaccagttcttctagagagaattactctctccatccctttgcattgttttataattttataaaaaacttttacatggctctgtgctttaactaggcatctgcctgtctgtccttccttcagggatgtgatgccccacaggtaagaacctgaccttatacatttaaggagcgcacagtgactgataaggccatatttagccaggaggtgctcaactcatcagccttaagtgatcggaaaggatcaaagacaacagtccagggaattcctcttggccaaggtcgccattcattacaccagatagcacaggtagtaaagacctaaatcttggatacaaattcgaggtaagatattttaaacttggcgtaaaattatagacctgtttctaagcccttctgtcttcttctccattttaaactcagttgctttataatttta

SEQ ID NO: 61073 - DNA, 1047 bp, Homo sapiens
cacatgtagacacaccttcaagatacacatttacattaatgttcacaggtctaaggtgttaagactcagggaggatcatggaggggtgaggggcttagatcagttcagaagaggaaacttttcagatagatttctgtcaaagtaaaattgaggtgcagagccctcttcgagcccttcatcaagattcacaaaaataaggcattaggctagaaatagctctctgcaggcatttatatatacctttaaactccattgtttgaagcctatcaatttggagtgctgaattctactagattctaagatattagagtaagatagaaagatgaattttagtcaaccaatcaatgtgcactcaatggatgcctactacagtcacaggcagtgccctctgggccctgggatagagagatgattgagatattatccctacccgatgatagtctagtagggaagatgagactaatacatatgaaaccagctaatctaacttcaacgttagaytattagagcccaaaaagtgtcctgccttgtcaaacatgctattttgccattgaaatactgctatccagacatagtaagtaaatttcttatggccacatgatcaaataatagaccagttcttctagagagaattactctctccatccctttgcattgttttataattttataaaaaacttttacatggctctgtgctttaactaggcatctgcctgtctgtccttccttcagggatgtgatgccccacaggtaagaacctgaccttatacatttaaggagcgcacagtgactgataaggccatatttagccaggaggtgctcaactcatcagccttaagtgatcggaaaggatcaaagacaacagtccagggaattcctcttggccaaggtcgccattcattacaccagatagcacaggtagtaaagacctaaatcttggatacaaattcgaggtaagatattttaaacttggcgtaaaattatagacctgtttctaagcccttctgtcttcttctccattttaaactcagttgctttataatttta

SEQ ID NO: 61074 - DNA, 1047 bp, Homo sapiens
cacatgtagacacaccttcaagatacacatttacattaatgttcacaggtctaaggtgttaagactcagggaggatcatggaggggtgaggggcttagatcagttcagaagaggaaacttttcagatagatttctgtcaaagtaaaattgaggtgcagagccctcttcgagcccttcatcaagattcacaaaaataaggcattaggctagaaatagctctctgcaggcatttatatatacctttaaactccattgtttgaagcctatcaatttggagtgctgaattctactagattctaagatattagagtaagatagaaagatgaattttagtcaaccaatcaatgtgcactcaatggatgcctactacagtcacaggcagtgccctctgggccctgggatagagagatgattgagatattatccctacccgatgatagtctagtagggaagatgagactaatacatatgaaaccagctaatctaacttcaacgttagactattagagcccaaaaagtgtcctgccttgtcaaacatgctattttgccattgaaatactgctatccagacatagtaagtaaatttcttatggccacrtgatcaaataatagaccagttcttctagagagaattactctctccatccctttgcattgttttataattttataaaaaacttttacatggctctgtgctttaactaggcatctgcctgtctgtccttccttcagggatgtgatgccccacaggtaagaacctgaccttatacatttaaggagcgcacagtgactgataaggccatatttagccaggaggtgctcaactcatcagccttaagtgatcggaaaggatcaaagacaacagtccagggaattcctcttggccaaggtcgccattcattacaccagatagcacaggtagtaaagacctaaatcttggatacaaattcgaggtaagatattttaaacttggcgtaaaattatagacctgtttctaagcccttctgtcttcttctccattttaaactcagttgctttataatttta

SEQ ID NO: 61075 - DNA, 1047 bp, Homo sapiens
cacatgtagacacaccttcaagatacacatttacattaatgttcacaggtctaaggtgttaagactcagggaggatcatggaggggtgaggggcttagatcagttcagaagaggaaacttttcagatagatttctgtcaaagtaaaattgaggtgcagagccctcttcgagcccttcatcaagattcacaaaaataaggcattaggctagaaatagctctctgcaggcatttatatatacctttaaactccattgtttgaagcctatcaatttggagtgctgaattctactagattctaagatattagagtaagatagaaagatgaattttagtcaaccaatcaatgtgcactcaatggatgcctactacagtcacaggcagtgccctctgggccctgggatagagagatgattgagatattatccctacccgatgatagtctagtagggaagatgagactaatacatatgaaaccagctaatctaacttcaacgttagactattagagcccaaaaagtgtcctgccttgtcaaacatgctattttgccattgaaatactgctatccagacatagtaagtaaatttcttatggccacatgatcaaataatagaccagttcttctagagagaattactctctccatccctttgcattgttttataattttataaaaaacttttacatggctctgtgctttaactaggcatctgcctgtctgtccttccttcagggatgtgatgccccacaggtaagaacctgaccttatacatttaaggagcgcacagtgactgataaggccatatttagccaggaggtgctcaactcatcagccttaagtgatcggaaaggakcaaagacaacagtccagggaattcctcttggccaaggtcgccattcattacaccagatagcacaggtagtaaagacctaaatcttggatacaaattcgaggtaagatattttaaacttggcgtaaaattatagacctgtttctaagcccttctgtcttcttctccattttaaactcagttgctttataatttta

SEQ ID NO: 61076 - DNA, 688 bp, Homo sapiens
tattagaaaatttccatgcaaaatatgaactttggtgagttgcagatagagaaattgaagtctctgtgttgaaggaaggtaactctaatgcacatggatatgagaagctgaagtgcagaagagaagtagctaaggaccaggaaaaagccagttggaaggattcagaccacagtggaattgccgattgattaattaggatcatggattgattgattagtcaagtgggactggattagaagaataacaacagcacagagtgttttgcttatagtctgtagtaaatcacctgggytttaatcaattctttagtaagctgtgtataattcatttcgatgtgtggatttggttttcctgcatttgtccagggggatcgtaagagtctgaaagactgtatatcaaatttgaaaaatcctgccagataattctaataggagactgatgaggagacatattgtatggtggttacatttcagtctctggagtctcccaaacatgggttcccatttctattccattggctactagctatgtgactttgggcaggtgaattagacttcagagtttcaatgtttccttctataaagtccagatgctaattacaataactatttcaaatgcttatggaaatgattaaattaaaaacacataaagcacagcacacagtatgtgatgcagagcaactgcttaa

SEQ ID NO: 61077 - DNA, 1297 bp, Homo sapiens
ataaaaatccatttatccaaaagataaattaaagaattatttgatttataaagagtgtcacactgagccagacttaaatagcatatccttgatatattcaagatggtcgtgtggggtgaagtcatctgctaaaattttaaagtttatatcagattttccctaccagaggcttttttttcctattgaaaaagaaaaaaatattgttttccattgccggtggttatattaactaagtttattgaatgatcattgatatattacttcaaagtggataattgggtagagaaatactgatcccagtggtttccagggaggtttaatgtccagcctatgtgcayctcattgctggatgtgatgtgctgaataaaccacagtcccttatctcacaagctggagtcccaggaagatgtcttaagtcggggaagttcgtccttaagcagcagaagcaagacaattattttgcatgctttgcccaaagcaagtattagtattgaaacatctcacttccttgcctgtgaccagaccacgagttctccttgttatcccacataagcagttgtctttggctttacaagagaagatggatgaggcctatctctgaatcacatctttttggccagttttctgcttctactccttttaatccgggagctggatcctgtgttctcagattctcttcagcccctacaccaggcaacccctgagaaagagtcactaagtaggcttcttacaagaggaaatctgattccttggcggaggaatagctagagataggagtcgaccttgctgctctgagttcctgatagcagtgctctgctttcttaaactaggacacaagggttttgaagtagccccatgcccctgtggctctttggtttttgttggaaagtagccagctcatgaggacaggggtgggggttttcgagtgcaaggtgagaggaaatgaggccaaagattacatccaaagtgcaccctctccttcaggacacttctcccttcatttccaaatctcccttcatttccctccttccttgccttgccgacattaattcttacatcagatgcatttgtcttcatccctctgaagcaagagtgtctttaatctcggaaccctaaaagctgagtagtagaaaagctgcaccacacaacgccgtgtgaataatgtccctgctgttgatagtgtgaaccagaacaaccatgcacagcagccctgagacatgggttcctagagagagtcatctcggtaaatggatgacttctttttctggaaaggaatccacctgaatgccatgtccca

SEQ ID NO: 61078 - DNA, 1469 bp, Homo sapiens
ttaggagacttaacagcaccaaggtgaagggaatgactagtacagaacaaaaaatcatgatataggataaagaggggaggattgctagaatgatatccttggttgagaagttgggtacatttcccgaaagttcagtgtaggcatttaggcaccaaaggcacatagatgatatttaaaaccaaaaaatctagatgagcttactgtcttagtccatttgcactgccctagcaaaactaccataagctgggtagcttatgaacaacagacatttatttctcacagttctggaggctagaaagtccaagagcaaggagctggcagatgctgtgtcaggtgagggcgtgttcctcatagacagcaccttctctctgtgtcctcacatggtggaaggggtttctttcataagggcattaatcccattcatgggggctctgctctcatagtctagtcacttccccaaaggccccaactcttagcattatcatactagggattaggtttcaacatacaaatttggggaggacacaaacattcagatcttcacacttaccaaggggtgaataaaaatagaaaagaagtcaaacaactggttagaagtcagagaaatgtgcaggaaccaataaggagactgagagggaccagaaagtaacgtggagaaaaatcaagaacatgatggcttggaaattaagaaagtattcctaggtggaaggaaggatcccctgagttaaatgcccctgataggtcaagtaagatgacaaccaagaactgaccattgcatttaataacatgraggctaattggtgaccttgaactgaatgattttgggagtggtgcctcagtggaactggtgaaagtctaactagagtctttctaaaagagaatgagaggagagaaattgagagaaaagagtataagccattttttggaattattttgtgaagggagaggagaggagaaactgattcaaaggatggcttttaaaggaaagacaaaataactgtatgtttgtatgctggagagagggaaaaatgatgtagaggattaaactgctggagtgatgtgctgagtaggttgagtaggtgggtttttcaacaacagtttgtttattgtcatgaagtcagggcagaatatatgggcacaggtgggcagatgtggtttgggaatcttgcagaagtttgccttctgattgctcttgtattcttggtgaaataggaagcagcaaggttataagctgagagtgaggatggttaggaagtaatggcaatttgaaaataagagagttataaatgtttaggagagtggaagagcaaatggattagggaaggaagtgtaattgccaggcaatactaagcacctgcttgaagttggcgatcatgaatttaaagtaatttccatcagcataggtgtgtgtgtttcttccatgttcagctcttttttttgcaggcatggaagagagggaagtttgtgtt

SEQ ID NO: 61079 - DNA, 1019 bp, Homo sapiens
agtacctcacattgctataatatcaggatcagcaatgaactctttataaccagttgttttcaaatataagttaaatatttggcactcaaagatagtccacaagcaagaatatcagcaacagttgaaaacttatcaaaaatgtaaaatcctttattaaacttcttaaaaatgcctctcctgcaaactactaaattggaatctgcattttaacaggcctttgtatacatatgaaatttgagaaacaccaggttatgtgctttaacagcacagagggatgctttaaaagggaccttcttgtgtatggaattgaactagacgttcaattggttcttctaatcctgagattatatgggatctctgacgggataaaagaaatgaatcttaaatttttacgtaatctgccactttcttgtcccataacttctctaatttgaaggaaaatattatttcattcatttgctcttctttattagtattttctctcaggaaaccaaataaaaaaagtacaaaaggaatttctcattttctgtcattttcaaagtataagtcaaaccttgatccaggcagcaaaagacaatttaataattgacagccagtttaaccagagagattttgcctttaatatcaaaaatacaaagccaccaatttcttcaattgtcaagaaatttttattaacattggcccacagtgaattctttcatacttcttcctgttttccattcccaatactattccgctggggtacacgataatgattatcatctcaattcccacaatactacctaactagtttctgaattttcacactattctctctgatccattttgtataatgtagccatagtaaaatttctgaaataggaaactgatcatgttatcccctgcttgaaactctgcaaaygttttcatttttaggaaagagctcaaactctgcaatagccttcagtaaatatccctggtgatcataacttcgctctcctttggcctagtctctttgcttccctctcttgtactctgca

SEQ ID NO: 61080 - DNA, 2280 bp, Homo sapiens
tttatttttaacagatattttgccaaattaaactatttgaataatatggcttctttcatattttacatgtgttaatcacagacactgacttgcccaccctttggtttgatgggaaatgcctcagcaaggccattaatgcttctctgagtgtgataccatgtgaccctctctcacccatagacacagctggctggaacaatattgggcagctgagtcacatgaagtcaatatactgaggccaatgattgctgtcctgctctaaaaacatgagatgaaaaaaaaatcaaatttctttttttgggcgtacttgcatttcacatgatgaaaagacagctgttgacagtgggtatggatcataaccaaatttcccttgagaaatattcaggtcaagatactttaaaattttgcgtataccaaagttttgagggtagaggaaccatgaatcggtattcaagtgagagaaatttgtgttatttagtgcaaagtaaaaatggcgtgaaacagaaatgatgtattttagtgcctctggcagcacctctcccctgtcttttaaataaggggctctctgtattttcattttgataaagagtgtcatgagtctaatcacagagatttttatgagaccttaatgattacagtaattttttaaaaaacaataatgtgttaattattacaatagaaacttcctttaaatagatctaactgtggaatataaaactttccaaaggtggaaaaataaaacagcctttaattgacaacttattattcaagttttacaaaatgtgattttcttaaattaactatggcttctacaaactagttcccatccaaatttcccttttatatccattaacacttatactgcttgaggtgaaaaagcatttattagaataataatagaaaattgttcaatatagtctggtttagaaatatttcaaatattacagtaagcaatttctaatacaaatattgacagcaaaatggaagacataaccaaaccctgcacaagaatgagttctacctcaatgctaaaagcagatgtaattgttttcaggaggcattttcatatgttgatattcaaccagttgtcttcctgaacattgcatttaaccagttacttgttatttgtgttgctgctgttagagacataatgctatgcctaaatgttgaatacgattttatgtgtgtatgtgtgtgtatgcatgtgtgtgtgtgtgttttaggaaaataaatgcgaaattcaatttcaaaggaaaaatttcctgtaagactttgccagctgaaaattttgcttcatacaagagtaattctagtagcagcagtagagaagatcgagcctgatgaaatgttttctttttgaaaaatatagtgaggtagaattattttaatagagaaaaatccaaaatgtatattccaagaaataaaattatattaactaaaaatatgcaaacatgttttcactattctgaacactggtatttaaataattattgagttgatcactatggtgtcataatctgggcaaaactttgataaatgaaaatgtcataatacataaaaatatttaaatacaatagtttcctatatttaattgtttgcttgttttccattatataaaaataataccaattcacttgaaaaattgattacaatgattatttatcctcctggagatgaaccaattggatattttttcattgctccctaattctactttctttttttaaactagttttatttttcattattactaatagcaaataaaatgtattttttaaatgggctggtatgctgtacatctagatgtcttttgcagagaatagtattggagtttagccttctctgcttcagtttcctcttatgtaaaataataaggatgaaaaaatgtagactatttcttttttagaatcattgtaagcattaatagcaatgatacaaataaataagtgagcatatcacagttaataagcatttgatagtggcttatatgagtatacagcaatatatgcttaatcacatcagaaaatacagtaagggatatgtattgtagtaccatatcactggaagaggttatagaagaaggtgaatgggttcwtgattctagaacttaactagccatgtgatcttgaaaagaacttttaaattgcactgactatttgagaagctgatgataaaacgtacccaacaatacgtatagagttataaaaagtcaaataacttatggatgtgtacatgtgaaagcactttattgtgaagtgctatatgattccaactttccta

SEQ ID NO: 61081 - DNA, 2280 bp, Homo sapiens
tttatttttaacagatattttgccaaattaaactatttgaataatatggcttctttcatattttacatgtgttaatcacagacactgacttgcccaccctttggtttgatgggaaatgcctcagcaaggccattaatgcttctctgagtgtgataccatgtgaccctctctcacccatagacacagctggctggaacaatattgggcagctgagtcacatgaagtcaatatactgaggccaatgattgctgtcctgctctaaaaacatgagatgaaaaaaaaatcaaatttctttttttgggcgtacttgcatttcacatgatgaaaagacagctgttgacagtgggtatggatcataaccaaatttcccttgagaaatattcaggtcaagatactttaaaattttgcgtataccaaagttttgagggtagaggaaccatgaatcggtattcaagtgagagaaatttgtgttatttagtgcaaagtaaaaatggcgtgaaacagaaatgatgtattttagtgcctctggcagcacctctcccctgtcttttaaataaggggctctctgtattttcattttgataaagagtgtcatgagtctaatcacagagatttttatgagaccttaatgattacagtaattttttaaaaaacaataatgtgttaattattacaatagaaacttcctttaaatagatctaactgtggaatataaaactttccaaaggtggaaaaataaaacagcctttaattgacaacttattattcaagttttacaaaatgtgattttcttaaattaactatggcttctacaaactagttcccatccaaatttcccttttatatccattaacacttatactgcttgaggtgaaaaagcatttattagaataataatagaaaattgttcaatatagtctggtttagaaatatttcaaatattacagtaagcaatttctaatacaaatattgacagcaaaatggaagacataaccaaaccctgcacaagaatgagttctacctcaatgctaaaagcagatgtaattgttttcaggaggcattttcatatgttgatattcaaccagttgtcttcctgaacattgcatttaaccagttacttgttatttgtgttgctgctgttagagacataatgctatgcctaaatgttgaatacgattttatgtgtgtatgtgtgtgtatgcatgtgtgtgtgtgtgttttaggaaaataaatgcgaaattcaatttcaaaggaaaaatttcctgtaagactttgccagctgaaaattttgcttcatacaagagtaattctagtagcagcagtagagaagatcgagcctgatgaaatgttttctttttgaaaaatatagtgaggtagaattattttaatagagaaaaatccaaaatgtatattccaagaaataaaattatattaactaaaaatatgcaaacatgttttcactattctgaacactggtatttaaataattattgagttgatcactatggtgtcataatctgggcaaaactttgataaatgaaaatgtcataatacataaaaatatttaaatacaatagtttcctatatttaattgtttgcttgttttccattatataaaaataataccaattcacttgaaaaattgattacaatgattatttatcctcctggagatgaaccaattggatattttttcattgctccctaattctactttctttttttaaactagttttatttttcattattactaatagcaaataaaatgtattttttaaatgggctggtatgctgtacatctagatgtcttttgcagagaatagtattggagtttagccttctctgcttcagtttcctcttatgtaaaataataaggatgaaaaaatgtagactatttcttttttagaatcattgtaagcattaatagcaatgatacaaataaataagtgagcatatcacagttaataagcatttgatagtggcttatatgagtatacagcaatatatgcttaatcacatcagaaaatacagtaagggatatgtattgtagtaccatatcactggaagaggttatagaagaaggtgaatgggttcttgattctagaacttaactagccatgtgatcttgaaaagaacttttaaattgcactgactatttgagaagctgatgataaaacgtacccaacaatacktatagagttataaaaagtcaaataacttatggatgtgtacatgtgaaagcactttattgtgaagtgctatatgattccaactttccta

SEQ ID NO: 61082 - DNA, 637 bp, Homo sapiens
tggtgagctgttcctagaagatttgctgacacccagggcttatctgtgctttctttctctggccgtactgtatacgttgcctcaacaatgtccttcataagcatgctctgtgaagtctaatgagccatttcattayccacctatccaatgctgctaccagatatatgcacattgtacagcttcttcttaattctgttggtagtcacctgtgcaatcttgacaatatgctcatacctcagtttctcaaacaaacaatagccagtaaaattgctttattgaacttgccttacttaatatacctcccctttaccaaatattttatatatttttgttagtttcatgtttctcaatccattaattttagataatatctcattaccactatgtaggaaaagaaaatatattcttcaaccctctctcatctctttctaaatagtttcatcttccaacttccaggaactataatttgattttccaattctataacatgtttagaaactatacgtttctataagtttctgtcagtttcaaaacttgtgttaggttttcaaagtctacaacatatttagaaaatataagttttgatgagttgtgtgaggataatttttttatttttcattttttgtctactaacagg

SEQ ID NO: 61083 - DNA, 943 bp, Homo sapiens
  misc_feature (1)...(943): n = A,T,C or G
gnnnnnnnnnnnnnnnnnnnnnnnnnnnnnnnnnnnnnnnnnnnnnnnnnnnnnnnnnnnnnnnnnnnnnnnnnnnnnnnnnnnnnnnnnnnnnnnnnnnnaccaaagcactcagactttaaatagaatttatcaaatgtgtctatatttctatgcatataattcatataaagaacatgtagtttaaatcattgcacattttatgcttttaatcagttgtgatggtcattagtatttttatcacatttctccaaaggtaggctaatcactgttaytattttcagctagaaatataaaaggtattttctatttttgatgactttgaaacataacccttggaatataatatctgtgtataatatctgtggaaagcatgaaagtaatattcaaacagtatgcattttttccagaatgaaaatttcctctacaataacattcatccttttttcctgatggacacataaaagtcaacatttctaacattgctggacgttatttacattaaacttgcctcagcttcaggtgttgcagaaactgggcaagaggccacaaggtacacaatacacacacacacacacaaacttgtattattatacttacctaagtgtctaaagaggtggataaatatattagattgctccagaacaaggatttttatggggcctattggaaagtatgactgcagtttgagtgagatgcctgtaagagattcaatttggccactatttattgagtatccaattttaaaagtactgacagaaggctcatgagttagaaatttacacctaagtctattggaaatgtgctactggatgctgtagtaaagagtggtgtggtaattgtaaaacacatctgatatctaaacctttgttttttacctgaaatctttatggaggtgattgtgtatgtcaatttgaatcttcccatcaacaagataaataaa

SEQ ID NO: 61084 - DNA, 801 bp, Homo sapiens
atattcatatttatattcataattcaaaatgcacatattcaatcaaaataacaggactaaaaaggaaattttctaaaatttatacactaagtacattatatttttctaatgatcactttgatagagcaaacttagaaactatggtttcaacaaatgaagaggcttatgcaagagaaaaccaccacctaacacaagattttcaatgtgatcatcattgctacttttcactagcaattatccagtcaatatattgtgaactgctttgttactatggtgatttatttaaacttagtgatcctttgattatctcaaaaatatgaataataccaattttataaacttgttctaaaaattaaatgagagaaaaataatcctccttctctatatattgaaaacctacaaaattagtaacattgtgtccagatattacacacttaccttattgaagcctcatcacaaccccgtcttttaaattacagggattattcccagatttttaaacacttaccttatgcaagtctcataacaatcccatcttttatagatgagcaaactgaggctcagatgagttaaaaacacattcaccatcaaatcataatgagtgatggaaytgagattcaaatccagttctctctgacaccaaagatggtgcaatataatgaagaccaagttatatccagcacatggagggatcaaaacatgttgattccctttctctaccctcttacatgtgaatctcaatgactttcactgcctcagaacaatcctaaactccctcccaggttgccttgcagaggatcc

SEQ ID NO: 61085 - DNA, 801 bp, Homo sapiens
atattcatatttatattcataattcaaaatgcacatattcaatcaaaataacaggactaaaaaggaaattttctaaaatttatacactaagtacattatatttttctaatgatcactttgatagagcaaacttagaaactatggtttcaacaaatgaagaggcttatgcaagagaaaaccaccacctaacacaagattttcaatgtgatcatcattgctacttttcactagcaattatccagtcaatatattgtgaactgctttgttactatggtgatttatttaaacttagtgatcctttgattatctcaaaaatatgaataataccaattttataaacttgttctaaaaattaaatgagagaaaaataatcctccttctctatatattgaaaacctacaaaattagtaacattgtgtccagatattacacacttaccttattgaagcctcatcacaaccccgtcttttaaattacagggattattcccagatttttaaacacttaccttatgcaagtctcataacaatcccatcttttatagatgagcaaactgaggctcagatgagttaaaaacacattcaccatcaaatcataatgagtgatggaattgrgattcaaatccagttctctctgacaccaaagatggtgcaatataatgaagaccaagttatatccagcacatggagggatcaaaacatgttgattccctttctctaccctcttacatgtgaatctcaatgactttcactgcctcagaacaatcctaaactccctcccaggttgccttgcagaggatcc

SEQ ID NO: 61086 - DNA, 801 bp, Homo sapiens
atattcatatttatattcataattcaaaatgcacatattcaatcaaaataacaggactaaaaaggaaattttctaaaatttatacactaagtacattatatttttctaatgatcactttgatagagcaaacttagaaactatggtttcaacaaatgaagaggcttatgcaagagaaaaccaccacctaacacaagattttcaatgtgatcatcattgctacttttcactagcaattatccagtcaatatattgtgaactgctttgttactatggtgatttatttaaacttagtgatcctttgattatctcaaaaatatgaataataccaattttataaacttgttctaaaaattaaatgagagaaaaataatcctccttctctatatattgaaaacctacaaaattagtaacattgtgtccagatattacacacttaccttattgaagcctcatcacaaccccgtcttttaaattacagggattattcccagatttttaaacacttaccttatgcaagtctcataacaatcccatcttttatagatgagcaaactgaggctcagatgagttaaaaacacattcaccatcaaatcataatgagtgatggaattgagattcaaatccagttctctctgacaccaaagrtggtgcaatataatgaagaccaagttatatccagcacatggagggatcaaaacatgttgattccctttctctaccctcttacatgtgaatctcaatgactttcactgcctcagaacaatcctaaactccctcccaggttgccttgcagaggatcc

SEQ ID NO: 61087 - DNA, 801 bp, Homo sapiens
atattcatatttatattcataattcaaaatgcacatattcaatcaaaataacaggactaaaaaggaaattttctaaaatttatacactaagtacattatatttttctaatgatcactttgatagagcaaacttagaaactatggtttcaacaaatgaagaggcttatgcaagagaaaaccaccacctaacacaagattttcaatgtgatcatcattgctacttttcactagcaattatccagtcaatatattgtgaactgctttgttactatggtgatttatttaaacttagtgatcctttgattatctcaaaaatatgaataataccaattttataaacttgttctaaaaattaaatgagagaaaaataatcctccttctctatatattgaaaacctacaaaattagtaacattgtgtccagatattacacacttaccttattgaagcctcatcacaaccccgtcttttaaattacagggattattcccagatttttaaacacttaccttatgcaagtctcataacaatcccatcttttatagatgagcaaactgaggctcagatgagttaaaaacacattcaccatcaaatcataatgagtgatggaattgagattcaaatccagttctctctgacaccaaagatggtgcaatataatgaagaccaagttatatccagcacatggagggatcaaaacatgtkgattccctttctctaccctcttacatgtgaatctcaatgactttcactgcctcagaacaatcctaaactccctcccaggttgccttgcagaggatcc

SEQ ID NO: 61088 - DNA, 1105 bp, Homo sapiens
ggcctggcccttgctcctgaggtttcagtgtctgtggcactcaaggcacctgaagaagcaattaggacagtgttgtaaatgcagcagaagagcagggaggatggagtaagtggctgactgtgtaggatggccccaaatcctctttgaaagaacaggggaggtgtgtaaaacacagcacacactctgcctgggggattttggataaaccttttagcagtggcaatgagctgaatctgaaaggatgtacaagagtttgccagatgtaaaatgtccagaaaggtgttccagaaagagggaccagcacaagcaagagctggagcagcacacagacaggtgaagggggtgcagtgggaaggcccatgtgactggtgttgccagtgccccgggagagggccagggcacaaagctgaaggggatgcttgagcctggtgacagtgcaccttggataccgtgggctggccagtgagctgactttcactgagcatcttcagtattgttctaccaataagaagaccaagactcaaaattttactaacttgcccaaattgtacaagaagcggtgggcccaggattagcccccaagtctctcaggtggcaaagcctttgctgtctttcctgcaccatgctgctgctgagtctgcacttcactcactgtaaaaaggtctttagaccttgttgtatttttttaagtggtgaggccctttttgcaaataatatctgaaccccaaattccaacatatagaaacagatcaggttttcactaaataattagcattcatttatttcatatttaaatgtgtaacacacaccaattaatgaaaacagtgactttgtttttaataagctcatttattttggaatgcttgcagttgacagagaagttgcaagggtagtaaagagtggtcccatacccggttcctccaygttaacatcttacgtgactacgcttcatgtgtcctaactcagaaactgacattggaatattactattagctaaactccttactttatttggatttcactagtttttccatcaatgttttctttctgttccagggtctagttctggcccaagttataatgactttcttttgacaaacactaa

SEQ ID NO: 61089 - DNA, 1105 bp, Homo sapiens
ggcctggcccttgctcctgaggtttcagtgtctgtggcactcaaggcacctgaagaagcaattaggacagtgttgtaaatgcagcagaagagcagggaggatggagtaagtggctgactgtgtaggatggccccaaatcctctttgaaagaacaggggaggtgtgtaaaacacagcacacactctgcctgggggattttggataaaccttttagcagtggcaatgagctgaatctgaaaggatgtacaagagtttgccagatgtaaaatgtccagaaaggtgttccagaaagagggaccagcacaagcaagagctggagcagcacacagacaggtgaagggggtgcagtgggaaggcccatgtgactggtgttgccagtgccccgggagagggccagggcacaaagctgaaggggatgcttgagcctggtgacagtgcaccttggataccgtgggctggccagtgagctgactttcactgagcatcttcagtattgttctaccaataagaagaccaagactcaaaattttactaacttgcccaaattgtacaagaagcggtgggcccaggattagcccccaagtctctcaggtggcaaagcctttgctgtctttcctgcaccatgctgctgctgagtctgcacttcactcactgtaaaaaggtctttagaccttgttgtatttttttaagtggtgaggccctttttgcaaataatatctgaaccccaaattccaacatatagaaacagatcaggttttcactaaataattagcattcatttatttcatatttaaatgtgtaacacacaccaattaatgaaaacagtgactttgtttttaataagctcatttattttggaatgcttgcagttgacagagaagttgcaagggtagtaaagagtggtcccatacccggttcctccacgttaacatcttacgtgactacgcttcatgtgtcctaactcagaaactgacattggaatattactattagctaaactccttactttatttggatttcactagtttttccatcartgttttctttctgttccagggtctagttctggcccaagttataatgactttcttttgacaaacactaa

SEQ ID NO: 61090 - DNA, 1105 bp, Homo sapiens
ggcctggcccttgctcctgaggtttcagtgtctgtggcactcaaggcacctgaagaagcaattaggacagtgttgtaaatgcagcagaagagcagggaggatggagtaagtggctgactgtgtaggatggccccaaatcctctttgaaagaacaggggaggtgtgtaaaacacagcacacactctgcctgggggattttggataaaccttttagcagtggcaatgagctgaatctgaaaggatgtacaagagtttgccagatgtaaaatgtccagaaaggtgttccagaaagagggaccagcacaagcaagagctggagcagcacacagacaggtgaagggggtgcagtgggaaggcccatgtgactggtgttgccagtgccccgggagagggccagggcacaaagctgaaggggatgcttgagcctggtgacagtgcaccttggataccgtgggctggccagtgagctgactttcactgagcatcttcagtattgttctaccaataagaagaccaagactcaaaattttactaacttgcccaaattgtacaagaagcggtgggcccaggattagcccccaagtctctcaggtggcaaagcctttgctgtctttcctgcaccatgctgctgctgagtctgcacttcactcactgtaaaaaggtctttagaccttgttgtatttttttaagtggtgaggccctttttgcaaataatatctgaaccccaaattccaacatatagaaacagatcaggttttcactaaataattagcattcatttatttcatatttaaatgtgtaacacacaccaattaatgaaaacagtgactttgtttttaataagctcatttattttggaatgcttgcagttgacagagaagttgcaagggtagtaaagagtggtcccatacccggttcctccacgttaacatcttacgtgactacgcttcatgtgtcctaactcagaaactgacattggaatattactattagctaaactccttactttatttggatttcactagtttttccatcaatgttttctttctgttccaggktctagttctggcccaagttataatgactttcttttgacaaacactaa

SEQ ID NO: 61091 - DNA, 515 bp, Homo sapiens
  misc_feature (1)...(515): n = A,T,C or G
tacagatcattctgaattactctgtttggaggtcattttcattgttaattcttatgtgtgtaggaccctaagctgcctgtaatgaaatagaaatgtatgatyttccaagaacttcgcttatttcctagatggagtgaagtgaccaggaaattggaattctgggttcaaatcttggaacagaatgagaatggtgaatactgccctgtagaagtgatttctgcaaaggatgtcccaacaggaggaatcttccagctccggcaggtaacaagattgtgaatgtttacattagattctttggtgccagaaagcttaatattggcttctttttagtggaaatgttggcaataatgaaatctagactggccaagtccatttcttacattaaaattctcctatctcatgtcacaagtattgnnnnnnnnnnnnnnnnnnnnnnnnnnnnnnnnnnnnnnnnnnnnnnnnnnnnnnnnnnnnnnnnnnnnnnnnnnnnnnnnnnnnnnnnnnnnnnnnnnnnt

SEQ ID NO: 61092 - DNA, 931 bp, Homo sapiens
actctggaagaaccactcctttgggcaggagggttccactgcagtggggccagagtgagtggggccttccatcgtgccctgcgtcggtacgtgtttaggcatggggtccagctgcccctagtatttctcaaacactgagtgtgtgtcgtgaatggtgtaacttgcttgtttggatcagatcctcctctcttcttctaccttctctgcttctctgcctccctctgaacttcttccctcctcctcctccccattgcgtacttgccaagtatcctgttgtatgacaataaatccatgtgggtgaataacgatctctcacaaattcaacaggacaactgaatcttaccacattcctttcaaattacatgaaatctaactagacacaggagcagagtggagggacagtgactgtttcccctcccccaccccatcagccacacccaaggaactaagctgtcccactataccccctgctcaggcaccaagaacctcscccagctgcgcaggggctcacctgctcagagtagtcattcccgtcgacatcatcactgtttgagtggcctcctggactctgcacatctatcccatgactctccaggattgctgcttcttcgaaaaaagcaaatagatccctaaattatctgttaccttatcacaatggctgaaacactgaatgaatttttgtgctaaggaaattaattagaatgtaattaaacaagaacctgtatttctctacatttgtttcttttagactgtaagatggatgaaattcaactgcatgtaggtcaggggaggcacacatttgccattctggggtctctgctgctgtgcatgttaggtgcttcataaatacttgctaactaactaaacagtcttcctatcttggggttctatagagcatatgagaactgtactgatgaataaaaagtgtatt

SEQ ID NO: 61093 - DNA, 1524 bp, Homo sapiens
agttatagctgccaggtgaaagattggcagtgactgaatgaggccttggtagtccagcttcttagttccatgctgccagacagaccgtcagagcagaacagataccttcattttgtcataacttttttaaaaatggcaaaaaataatagccacatacagtttgttagtgaggtgaaattcctcatagaacaaagacaacaaagaatataaaatgtttctaatatgttaaaatatattttatattctttgtattctttagtctgaaaggcttaaatcttacatttctggtgggatttcagaaaaaaaagttttcttaggtaaagcgtcttttttcccttaaactagcccatttgaaactcttstgtttctgaatgaatttcacctaacctgtctacagctatattcacagacactgtttttccctttacagactgaccctaccctttctgttacaaaatacagaaacgttgccagtgttttttggttggttggttggtttgaggtgttttgttttgaggactgttcacttttctttctttctcatcgcatgtaaacaagacattaaagtttaaacaaaatttaatttcaccttagttcctaaagctgactttatctatttgtctgtgtttcactcagtgtaaccttgggatccctggagcaggtttttattttgttttcttttcttttttccttggaatgcttgtgtctcacggccagtgtgtctaagggttaggagctgcaccttcccgcaagtcaaaagggccagccgaatcctgcctgagccggtgctttgctgcttcctacacaggtttcagacacactgatcctaatcttctcagtcaaactccaagacacacagtgtcaacagttacggcagccacaagttcattatctacatagggcgcaattacttggcagctacctagactgtgaggtttttgtgggtccccaaagaactcatatcctgaagagagagactaatcaaggcgggtcctcttggcagggacattgaaagggtgggttacaattgataggaattttaatttgtgaggacttaatctgatatgcttttggaacaagatagtgtagatgtacttattgtccatcttctgggagcattctttgaagattcatttgattgtatggtgatagtattgttgaaaggacacagaattttattacatgaatctgcttctatccttcacctgcctaactgcccagggccactgcagtgatttattcagcctgcattgtggtgagggaagggacgactaatgtctcaaacagtgtggtgttccctagtctgctctcctgcttgctgaaagctcctttttgggaaggcagatgcttagtttttcaggaagcactcacttaggatgcagtattttagttttaaataatacgcactggttgacctttgagcggacagaacttttgttgctagaacctggtggcactggtgtgggtgatgttaattaagggccaggtcctgacaccaacaaagccaggaagtttggaatatat

SEQ ID NO: 61094 - DNA, 1524 bp, Homo sapiens
agttatagctgccaggtgaaagattggcagtgactgaatgaggccttggtagtccagcttcttagttccatgctgccagacagaccgtcagagcagaacagataccttcattttgtcataacttttttaaaaatggcaaaaaataatagccacatacagtttgttagtgaggtgaaattcctcatagaacaaagacaacaaagaatataaaatgtttctaatatgttaaaatatattttatattctttgtattctttagtctgaaaggcttaaatcttacatttctggtgggatttcagaaaaaaaagttttcttaggtaaagcgtcttttttcccttaaactagcccatttgaaactcttctgtttctgaatgaatttcacctaacctgtctacagctatattcacagacactgtttttcyctttacagactgaccctaccctttctgttacaaaatacagaaacgttgccagtgttttttggttggttggttggtttgaggtgttttgttttgaggactgttcacttttctttctttctcatcgcatgtaaacaagacattaaagtttaaacaaaatttaatttcaccttagttcctaaagctgactttatctatttgtctgtgtttcactcagtgtaaccttgggatccctggagcaggtttttattttgttttcttttcttttttccttggaatgcttgtgtctcacggccagtgtgtctaagggttaggagctgcaccttcccgcaagtcaaaagggccagccgaatcctgcctgagccggtgctttgctgcttcctacacaggtttcagacacactgatcctaatcttctcagtcaaactccaagacacacagtgtcaacagttacggcagccacaagttcattatctacatagggcgcaattacttggcagctacctagactgtgaggtttttgtgggtccccaaagaactcatatcctgaagagagagactaatcaaggcgggtcctcttggcagggacattgaaagggtgggttacaattgataggaattttaatttgtgaggacttaatctgatatgcttttggaacaagatagtgtagatgtacttattgtccatcttctgggagcattctttgaagattcatttgattgtatggtgatagtattgttgaaaggacacagaattttattacatgaatctgcttctatccttcacctgcctaactgcccagggccactgcagtgatttattcagcctgcattgtggtgagggaagggacgactaatgtctcaaacagtgtggtgttccctagtctgctctcctgcttgctgaaagctcctttttgggaaggcagatgcttagtttttcaggaagcactcacttaggatgcagtattttagttttaaataatacgcactggttgacctttgagcggacagaacttttgttgctagaacctggtggcactggtgtgggtgatgttaattaagggccaggtcctgacaccaacaaagccaggaagtttggaatatat

SEQ ID NO: 61095 - DNA, 911 bp, Homo sapiens
ttatccaaaatatggtgtagacattagaaaggatgaatggaatctatctctaaaaggcaacatagaaaaaataaacatagtgattttaaaaatagtgatctcagataagcacttaaaggtcattgagaaccctattattgttgtctttaatttttaaataatgaaaccgttccctgaaataggtatttaaaattaatcaattgatatgctctcttggacttggctaacctcttggcaattctaattgtcctattagattttatacatttttaccaattttaaatgacatcctgtgggtccttaggatgctaagatgcagacagcataatttaatatggcttgtttaagcaaaatagaacatgagtgagctcacgtaatcactgggaagggtgggcttttcaaataatgccagagacaaatcgctgatcaaaactgaggaggaagtgctcttgccatttcctgccycagaagtctgttgtagaactggcatcatgataaaaccttccctgtctcctggaccatcatctgtccaattgatgcctactgtagggtctcttttgttgttctctcctaaatcaaactttagtgcaagaatgtgtaattggcagaacctagatcaaatgcctgcactttgatttcaagggaggcaagggaatataattttttggattccattttgggaaaggtagcttttacaacttagtgaccaataaaaaagtagggaagatgtttaacacatggcagccatgaatgtttaaaagatggcagccacaaattatctctatgacttcgctattgtggacaccattttgggtatgtggcccactcacctctgtttcatgcttgtcatctgtaggaattattcccttattgtactaactggaagagaggtggggaatctgtctcatgtt

SEQ ID NO: 61096 - DNA, 701 bp, Homo sapiens
acacagctgccccaagtcttgacccgtcatgaggattcactggtttgaccagtgttttcaaataaaaacaccactagaaggtgcttcatgaggaaaatctttgagatgacacatcccgacctgacctcacatttcttactgtcaacgtctctaacactcagtttccagcatcctacctggggaccagcccttgcacggaaacagctggccctgcgttcctggtctgctctcaacgccactatggaagccctgaaggggattaaggtagacggggccggctgtccttccaggcaggagggggcagcctcagcagcacygtgggcagtggagggctggaaagggctctctggagaaccaacagccggcagaggcttggcatctgggctctagatctttggtttttacctaaactggcagggggcaaacaccactgggtcctctgcttttacaaattagaaagcagcttttatttccattggccccaaacattccgcaatggtgaataacgtcatagccagactgtgctcttcactgggatgcaccctccacgctagatacacaggaaaagcagggggcttccagatcaagcagagggtgtttaattgttgttagaatagtatgtacttttgggagcagagaggctgaatgcttatttttggcatatcctcggtcagagtttgttccttcaaaaaatatttaat

SEQ ID NO: 61097 - DNA, 681 bp, Homo sapiens
  misc_feature (1)...(681): n = A,T,C or G
ggaagagagagttcttgctccaggagagtggtagtggccttcatggttgagggacctgctagggcctctgacctcatcgcctctctgccttgtcagctagagcgtccccatgggccaatccaacagaaagccaaaggngcaaggaaangccattgatatagccactcaagcctgcctcttggacagaaagaagtgtgaagaagtgtattgggggattgggtctggagggacaaatggcagctgtgtgactaatgggctatgaggaaaaagggtgctagttaataaaacaatcaaataartataaacatagagggagggcaaataaagacaattttctacctaagaggaatccaggatcagtggtaaaaaaaaaaaaatgaattttttagaccacatattgatatcctacactgtgtgtttgacacaagtaaatttgttttctatgttcatatttatcatatttaccataaagtttgtcagttaacatgtaaatgaaaacaccagtgatctcaaataatagtaaacttttggaaatgtaaccttcgagtatgcacgtttttattagacttttcagaaatagttacataaatggaatttctgagccaagcttttatataatccttgcagacctgcagcatcccctgggaccctagaggtttagggccacagtttaaaaattac

SEQ ID NO: 61098 - DNA, 712 bp, Homo sapiens
agagttatgaagacttgagccatgcaggcacctcccggtaatgacagctgctccctccagccccaccaaggccagcctgtatggagccatcctcttcaccctccagcagacccgctggctcccagtgtccaaagccagcctcatcttcatcttcaccttgttcatggtgtcctgtaaggtaagcctttctcttcttgcagcgttcttgccttgaccaatgccaccctgccacctccaggttgggagtggggaaattggacactcccagccttatgtggctgggacaggcagcccagagaggggagatgcttgccagtaggtcactgggaagagagtttaaaaggcagtgtccagcagccaggacacagatgagaggracaggccttctgtgtaaaggacccagcctgagccagggtcaaggtgggcccactctcttgggtacagagaccagagggacaagaagctgaaatggcagcatcaggtagccaggaactcagttggaccaggaatacttctagtctgacagtcatgccttgagttgacatcaccccacccaggaggggtcttcaggggctgggctctctccctctgcatgaagatcttagctcagggctgtgtcttccctgggcgaggactccagggctgtcaaaagggagtgagcatgtcttcctgcattaggtgagaagggagaggcaagcagatggctgggatc

SEQ ID NO: 61099 - DNA, 729 bp, Homo sapiens
ctgaaacattggcaatatgttttccagtgaagtctatctagctatcagggaagagccacctgccctctgcaaagggagagggaaaatcaaaaccccaggacagggaatatgtttctgctccaaaaccaccagcttttgcctgtcccctcactctttctagatcattctttagactatacwctaacaatgaacaatctgaaaggaaattaaggaaagaaattcaattcacattaacatcaaaaggaataaaatattttggaataagtttaaccaaaaaggtcaaatgattataccttgaaaactacaaaacattgctgaaagaaattaaagacgatatcaatatatggaaagacatttcattttcatggattggaagactcaatattgttagaaagacaatactacccaaagtgagttgcagattcaatgcaacccctcccagaatcacagtaacatttttggcagaattagaaaactccgtcctaaatctgacctgacaggctcttattaatgactgccacaacagaaacactgtgaaaaagatgcaaccatgaaaaggtggaaagttctgatgacacagaaaatagcaatcagcctttctcacatcccaaagccttaaaaaataaacgagtgcagcatggccagtatggaattgaccgaaaactaatcaccaagccagaaacgtggtgagagaaaaaaaagggcaagaatatctttggcttatcacct

SEQ ID NO: 61100 - DNA, 729 bp, Homo sapiens
ctgaaacattggcaatatgttttccagtgaagtctatctagctatcagggaagagccacctgccctctgcaaagggagagggaaaatcaaaaccccaggacagggaatatgtttctgctccaaaaccaccagcttttgcctgtcccctcactctttctagatcattctttagactatacactaacaatgaacaatctgaaaggaaattaaggaaagaaattcaattcacattaacatcaaaaggaataaaatattttggaataagtttaaccaaaaaggtcaaatgattataccttgaaaactacaaaacattgctgaaagaaattaaagaygatatcaatatatggaaagacatttcattttcatggattggaagactcaatattgttagaaagacaatactacccaaagtgagttgcagattcaatgcaacccctcccagaatcacagtaacatttttggcagaattagaaaactccgtcctaaatctgacctgacaggctcttattaatgactgccacaacagaaacactgtgaaaaagatgcaaccatgaaaaggtggaaagttctgatgacacagaaaatagcaatcagcctttctcacatcccaaagccttaaaaaataaacgagtgcagcatggccagtatggaattgaccgaaaactaatcaccaagccagaaacgtggtgagagaaaaaaaagggcaagaatatctttggcttatcacct

SEQ ID NO: 61101 - DNA, 729 bp, Homo sapiens
ctgaaacattggcaatatgttttccagtgaagtctatctagctatcagggaagagccacctgccctctgcaaagggagagggaaaatcaaaaccccaggacagggaatatgtttctgctccaaaaccaccagcttttgcctgtcccctcactctttctagatcattctttagactatacactaacaatgaacaatctgaaaggaaattaaggaaagaaattcaattcacattaacatcaaaaggaataaaatattttggaataagtttaaccaaaaaggtcaaatgattataccttgaaaactacaaaacattgctgaaagaaattaaagacgatatcaatatatggaaagacatttcattttcatggattggaagastcaatattgttagaaagacaatactacccaaagtgagttgcagattcaatgcaacccctcccagaatcacagtaacatttttggcagaattagaaaactccgtcctaaatctgacctgacaggctcttattaatgactgccacaacagaaacactgtgaaaaagatgcaaccatgaaaaggtggaaagttctgatgacacagaaaatagcaatcagcctttctcacatcccaaagccttaaaaaataaacgagtgcagcatggccagtatggaattgaccgaaaactaatcaccaagccagaaacgtggtgagagaaaaaaaagggcaagaatatctttggcttatcacct

SEQ ID NO: 61102 - DNA, 966 bp, Homo sapiens
ctggaaagatccacatggtcctcacctgccctctgcagaaggagaggaaacttaaagaacccaagacagggaacatgcttctgctccaaagccaccagctcttgcctatccccttcactctttctagatcattccttgcactctgttctatctttagaggtcactggttcaagtaagtcatcatgaaacacctgcaaaaagctgccccaccttgtgcctccactgcctgatgactgaactgacctccaggcttgactctggtctcccctgtgttatttctgctgaaacatccagtcccaggccaggctgctcagtatcttcagggtttcaggacmatgggaagtcccattattactgatctctagaatgtccttggaaatggaagctgcagagaaatcacatctaggggggcaaagtaggatggaatttggaaggggcccagcagttgcacattccaggtaaggaacccaaggtgagccagccagtcaactgattagggagagactgggaggggtactggggctgtgactcccactgacatgtctgtccatgacccaacactgctgctcaattgacacttcagaaagtctgtgctttcctaagacagagcaggcggcctcacagtctttgagcccttagatcatcatgcatctgtcttgtgacacacacaccagttattggctttcaaggactcaggtgggctgagaggtgggagatggtaactctgattgaaggatgcctgtggaggaatcaaaagtgccacacaggacaatcttctctctgttatccacacagcgaagctgcccaagccctaaatcaccatcaacaacttaaaccccagggagaataaggatgtattagccttcacctgtgaacctaagagtgagagctacacctacatttggtggctaaatggtcagagcctcccggtcagtcccagggtaaagcgacccattgaaaacagga

SEQ ID NO: 61103 - DNA, 966 bp, Homo sapiens
ctggaaagatccacatggtcctcacctgccctctgcagaaggagaggaaacttaaagaacccaagacagggaacatgcttctgctccaaagccaccagctcttgcctatccccttcactctttctagatcattccttgcactctgttctatctttagaggtcactggttcaagtaagtcatcatgaaacacctgcaaaaagctgccccaccttgtgcctccactgcctgatgactgaactgacctccaggcttgactctggtctcccctgtgttatttctgctgaaacatccagtcccaggccaggctgctcagtatcttcagggtttcaggacaatgggaagtcccattattactgatctctagaatgtccttggaaatggaagctgcagagaaatcacatctaggggggcaaagtaggatggaatttggaaggggcccagcagttgcacattccaggtaaggaacccaaggtgagccagccagtcaactgattagggagagactgggaggggtactggggctgtgactcccactgacatgtctgtccatgacccaacactgctgctcaattgacacttcagaaagtctgtgctttcctaagacagagcaggcggcctcacagtctttgagcccttagatcatcatgcatctgtcttgtgacacacacaccagttattggctttcaaggactcaggtgggctgagaggtgggagatggtaactctgattgaaggatgcctgtggaggaatcaaaagtgccacacaggacaatcttctctctgttatccacacagcgaagctgcccaagccctaaatcaccatcaacaacttaaaccccagggagaataaggatgtattagccttcacctgtgaacctaagagtgagarctacacctacatttggtggctaaatggtcagagcctcccggtcagtcccagggtaaagcgacccattgaaaacagga

SEQ ID NO: 61104 - DNA, 1662 bp, Homo sapiens
tgtggtcctgagcacttggacatctactattctgcagggaacagttgagtctaaatttcgaaaagcaatacgtcaattaatttaccttttcgaggggccatttagtcttatattttcttaagcatgggtaggccagaggactttgtaaaagtaatagagtacaattataaccatatacatcaattcttcatgtctacattgtatttatttactgatgaagccttttccccctactgtcagcatcgtatctttagtataggtttagaagagaattgtagtctcctctgactcatacatcactaataaaactgctagcaaagatctaattctcaattacaagcacaaaatagtgctacattttagcatacagcaagcccatctatcttaacaactattctccagcactgatgtatttcatccggacaactcaagttattggagaccttgcaagttcccctaacatattattaactggtattgatctcttcgatcttcaatttgtgcctcatgtcataaaatcagtagtgaccagttttaaagcagatttttttaaaggatatgtaactttgacattgacacctcactacaaagatgagaagaccttagcaaacttggaaagaaaattaccaaaaatttcatcagtcaggtttcctgtggcaataacctactattttattctctcccaccctagtaaacatccaacaatgtagcatatctaaaacatcacaatataaatgcctgtcttagtcttctcagggctctataacagaatactacagactgggtggcttaaacaacagacatttatgtcttacagttctggaggctagaagtctgagatcagggtgccagcatggtcaagttctggtgagggctctcttcctgccctacagatggctgccttcttgctgtgttttcacatggaagagaaagacagcgagtgagcatgagtgagaaagagagagagagagtgagagagagagagagcaagcatgcaagctctctggtctcctcttataaaggcactaatcccatcatgaggatcctaccctcacaacttcatctaaacccaattatctcccaaagatcccatctccaataccattacttccaagttaggtcttcaacatatgaatttggaggggacacaagcatttagtctgtaataatgcccttataaactatgctataatctgtctgaaaggctttaaattactggcaatattactggcttgtgcacaaccttaaacatacgctgagtatcactttgctaatcacagtgtcaacaaaaagccacrgtaagattggagaggaagggtagaagaagaaaatgcattaggatcatttaaaaaatagacaaagtctaagtccagggacctggaatcttagaaaagctgtgccacaaattccgtactcttaaactacatcttttacttgggctgcatcttgcctaccagaaaaatgagtggaccaggatgtcctccaaagtatcactaattttaataaataaagattctatgattgtctgaataatgtatatcctgaaattattaagaaaacataccacgaacatgattgaaaaaaactttacaaagaatttactgcggccaggcaccagtggctcatgcctgtaatcccaacactttgggaagctgaggcggg

SEQ ID NO: 61105 - DNA, 827 bp, Homo sapiens
tttctcaagtatattcaagtgggaatctgaataactttagttcttatgtcatgatgttaatactgagtaacgcaggataagaatgtcacagggttttagtttccatatcttttaaagaagactagtagtgtctgtacttacgatttagaacacaggtgccagcagttgtgcctaggtagataagcccgaatcacatgcaccaataatcgaaagggtcagagatgaagcactcaatgaagctgcggaaaattaattcatccttcaaatatttctgaaacagcagttaggaaccaagtgatctctatgaaatgaaggaggggaatagacagacggcagctctgtgctcctggaccagggctcttatgtaatacccaatgaaatgggattcggtccygggatggccagaccgtgctctgaggaagcaggaaattggaagcatctggttgaggtgatgaatatgtggggaggagaaaatagaagcttctcgatggcagattttgaagcacaggtgctaccaaatacattatcacccaaacctgaaaattcaaagctaagtatgtatagagctttggtacttgacatatggtgtttcaaatataaaaattatagaccatctgtcaagtctagtggagcttatctttgaaaggatcactgaagactggagagcctgctacattttcacacctagaagtgactagacaatcaatacatattaattgagttgtcattatggatgcaggtctagttgctgtagagagttatagaaaatgtagaaaatatggtcttgtccttcaaaacctaaggtaagacaaaaacagaggggcaga

SEQ ID NO: 61106 - DNA, 783 bp, Homo sapiens
tacattctagtgtagggtgaaagactctaaagaagsaagcaaataggccaggcattgtggctcacatgtataatcccagcactttgggaggccaaggcaggtggatcatgagatcaagagatcgagaccatcctggccaacatggtgaaaccccgattctactaaaaaaaaaatacaaaaattagctggacttggtggcgtgtgcctgtagtcccagctactgaggaggctgaggcaggagaatcacttgaacccgggaggtggaggttgcagtgagccaagattgcaccactgcacttcagcctggtgacagggtgagactccatctcaaaaaaagaaagtaaacaaataaatacacaatattatcttggatcaataccataaaggaaataacaataggatagacagtgactatcatcacaatgaccaattcagattgggtggtctgggaattaaaaaaatagtgtaagatatattttgaataagcatcattcatgaagtaattaaaatttgtttttgtcagctgctatttttaaaaaattgtattttgtgattgtaatccttccttgattctggatagaatcttgggcagattgaattacttttctgctctctattaggtagtatcacaaacgtagtctcaattctgtaactagaatatttactcctagctattaaactggccttaagtagtcattcaaactcatcctcaaatatttatttttctctttctgcatgccaggcctttggagaagtgacatagtggtggtggtgtttagtttt

SEQ ID NO: 61107 - DNA, 783 bp, Homo sapiens
tacattctagtgtagggtgaaagactctaaagaaggaagcaaataggccaggcattgtggctcacatgtataatcccagcactttgggaggccaaggcaggtggatcatgagrtcaagagatcgagaccatcctggccaacatggtgaaaccccgattctactaaaaaaaaaatacaaaaattagctggacttggtggcgtgtgcctgtagtcccagctactgaggaggctgaggcaggagaatcacttgaacccgggaggtggaggttgcagtgagccaagattgcaccactgcacttcagcctggtgacagggtgagactccatctcaaaaaaagaaagtaaacaaataaatacacaatattatcttggatcaataccataaaggaaataacaataggatagacagtgactatcatcacaatgaccaattcagattgggtggtctgggaattaaaaaaatagtgtaagatatattttgaataagcatcattcatgaagtaattaaaatttgtttttgtcagctgctatttttaaaaaattgtattttgtgattgtaatccttccttgattctggatagaatcttgggcagattgaattacttttctgctctctattaggtagtatcacaaacgtagtctcaattctgtaactagaatatttactcctagctattaaactggccttaagtagtcattcaaactcatcctcaaatatttatttttctctttctgcatgccaggcctttggagaagtgacatagtggtggtggtgtttagtttt

SEQ ID NO: 61108 - DNA, 783 bp, Homo sapiens
tacattctagtgtagggtgaaagactctaaagaaggaagcaaataggccaggcattgtggctcacatgtataatcccagcactttgggaggccaaggcaggtggatcatgagatcaagagatcgagaccatcctggccaacatggtgaaaccccgattctactaaaaaaaaaawacaaaaattagctggacttggtggcgtgtgcctgtagtcccagctactgaggaggctgaggcaggagaatcacttgaacccgggaggtggaggttgcagtgagccaagattgcaccactgcacttcagcctggtgacagggtgagactccatctcaaaaaaagaaagtaaacaaataaatacacaatattatcttggatcaataccataaaggaaataacaataggatagacagtgactatcatcacaatgaccaattcagattgggtggtctgggaattaaaaaaatagtgtaagatatattttgaataagcatcattcatgaagtaattaaaatttgtttttgtcagctgctatttttaaaaaattgtattttgtgattgtaatccttccttgattctggatagaatcttgggcagattgaattacttttctgctctctattaggtagtatcacaaacgtagtctcaattctgtaactagaatatttactcctagctattaaactggccttaagtagtcattcaaactcatcctcaaatatttatttttctctttctgcatgccaggcctttggagaagtgacatagtggtggtggtgtttagtttt

SEQ ID NO: 61109 - DNA, 783 bp, Homo sapiens
tacattctagtgtagggtgaaagactctaaagaaggaagcaaataggccaggcattgtggctcacatgtataatcccagcactttgggaggccaaggcaggtggatcatgagatcaagagatcgagaccatcctggccaacatggtgaaaccccgattctactaaaaaaaaaatacaaaaattagctggacttggtggcgtgtgcctgtagtcccagctactgaggaggctgaggcaggagaatcacttgaacccgggaggtggaggttgcagtgagccaagattgcaccactgcacttcagcctggtgacagggtgagactccatctcaaaaaaaraaagtaaacaaataaatacacaatattatcttggatcaataccataaaggaaataacaataggatagacagtgactatcatcacaatgaccaattcagattgggtggtctgggaattaaaaaaatagtgtaagatatattttgaataagcatcattcatgaagtaattaaaatttgtttttgtcagctgctatttttaaaaaattgtattttgtgattgtaatccttccttgattctggatagaatcttgggcagattgaattacttttctgctctctattaggtagtatcacaaacgtagtctcaattctgtaactagaatatttactcctagctattaaactggccttaagtagtcattcaaactcatcctcaaatatttatttttctctttctgcatgccaggcctttggagaagtgacatagtggtggtggtgtttagtttt

SEQ ID NO: 61110 - DNA, 783 bp, Homo sapiens
tacattctagtgtagggtgaaagactctaaagaaggaagcaaataggccaggcattgtggctcacatgtataatcccagcactttgggaggccaaggcaggtggatcatgagatcaagagatcgagaccatcctggccaacatggtgaaaccccgattctactaaaaaaaaaatacaaaaattagctggacttggtggcgtgtgcctgtagtcccagctactgaggaggctgaggcaggagaatcacttgaacccgggaggtggaggttgcagtgagccaagattgcaccactgcacttcagcctggtgacagggtgagactccatctcaaaaaaagaaagtaaacaaataaatacacaatattatcttggatcaataccataaaggaaataacaataggmtagacagtgactatcatcacaatgaccaattcagattgggtggtctgggaattaaaaaaatagtgtaagatatattttgaataagcatcattcatgaagtaattaaaatttgtttttgtcagctgctatttttaaaaaattgtattttgtgattgtaatccttccttgattctggatagaatcttgggcagattgaattacttttctgctctctattaggtagtatcacaaacgtagtctcaattctgtaactagaatatttactcctagctattaaactggccttaagtagtcattcaaactcatcctcaaatatttatttttctctttctgcatgccaggcctttggagaagtgacatagtggtggtggtgtttagtttt

SEQ ID NO: 61111 - DNA, 1751 bp, Homo sapiens
tctctgccccatatgctgactctgtctgctgcatggcccgttttagtacatgggtatcttttacccagtaaactctgagaaagtgaggtcaagctaactcaatagctcagttctggctttgctatcaaaggacttagtatagttttagatttcccaaataggaatcagcccctgtccactatgcatctacctaagggttgtgtgtgaaaatctcccagtagacctgagactgatggtaaaggggtacttctccatttcccagtagggatgaatggggttcacagcacgactttctccaaagagaatctcctcacaaacttttttttttttcaaaatcttcttttgattattttatatttttaaagtgggtagaatgttcaagagttgtgcaactttttctcaaggcttcttaaaatattggcattttcatctgacatcttacttggaatttcatattttcatcctgttgtctcattcaaaaccctaatcatcatcttattataatagttaatggttgtygagtgttcacaatcactcagtgttctatgtgctttacatacatgaactcatataattcgaagaatttttaataccattaattactgttagtactctgatttcatagatgagggaagtgaggctcaaggttaaatgacttgtccaagagtgctcagctgggaaatggcaaggctggcattcaaacccagggagactatctgcacagtccatggtacacaggatccctcaagctgggaattcctactcacctcactcccattgagctgagaccagaatggccagcaaaatgccagcagtgcaatcatcaggggacagaatgttctaggtagcaagctagtattgcttttcctcctgcagttctgtagcctattccctttttgtttctactgttattggtgcttgatcctctcagctgatattcctggtcttcctggagtagccattcaactactgtcatctgtcacttagaacaagagtctgtataaaaagcccgagacaacttttgggtgataaaattgggtgataaaatcaatctgccgataactgattacagctttctcctaaaggaaggaaaggaggtcaacacatttagatttgttgaactttggcaattcattatagagaaagtatgcatgtatatttcaaattggttttgcttttcatacttgatctagcttctaattgtattttgaaataaataaatttatttttctttaaaaaggaagcaaggaccccgatatctgggtctatgatacctaaataagccaaattattcaccagtggttctcaactggggttcataggggacattcagaaatgtccaagggcttttagatgtcactatatctgaaagaaatgctagcatttagttggtggggccagggctgcttaatgtcctgacatgtacagtctcacacaagaaattattctacctcattggtctcttggagaatatcaccatagaggcagctgaggacaaaggccaaggtgggctgtctcacctgtgcagaactaatcctttatttccttgccttatcagtaataaaacaccaatcatccatctatttggaaacaattgatatcttggcagctggaataaataaatgacttgctttaaaaaaatagccaattcttcctttccacgtcaattggaagtgaattgtgcacattcacatacagtcatggttttgtgaaaggagatctcaggagtggaggtgaactgtgcacttcct

SEQ ID NO: 61112 - DNA, 1751 bp, Homo sapiens
tctctgccccatatgctgactctgtctgctgcatggcccgttttagtacatgggtatcttttacccagtaaactctgagaaagtgaggtcaagctaactcaatagctcagttctggctttgctatcaaaggacttagtatagttttagatttcccaaataggaatcagcccctgtccactatgcatctacctaagggttgtgtgtgaaaatctcccagtagacctgagactgatggtaaaggggtacttctccatttcccagtagggatgaatggggttcacagcacgactttctccaaagagaatctcctcacaaacttttttttttttcaaaatcttcttttgattattttatatttttaaagtgggtagaatgttcaagagttgtgcaactttttctcaaggcttcttaaaatattggcattttcatctgacatcttacttggaatttcatattttcatcctgttgtctcattcaaaaccctaatcatcatcttattataatagttaatggttgtcgagtgttcacaatcactcagtgttctatgtgctttacatacatgaactcatataattcgaagaatttttaataccattaattactgttagtactctgatttcatagatgagggaagtgaggctcaaggttaaatgacttgtccaagagtgctcagctgggaaatggcaaggctrgcattcaaacccagggagactatctgcacagtccatggtacacaggatccctcaagctgggaattcctactcacctcactcccattgagctgagaccagaatggccagcaaaatgccagcagtgcaatcatcaggggacagaatgttctaggtagcaagctagtattgcttttcctcctgcagttctgtagcctattccctttttgtttctactgttattggtgcttgatcctctcagctgatattcctggtcttcctggagtagccattcaactactgtcatctgtcacttagaacaagagtctgtataaaaagcccgagacaacttttgggtgataaaattgggtgataaaatcaatctgccgataactgattacagctttctcctaaaggaaggaaaggaggtcaacacatttagatttgttgaactttggcaattcattatagagaaagtatgcatgtatatttcaaattggttttgcttttcatacttgatctagcttctaattgtattttgaaataaataaatttatttttctttaaaaaggaagcaaggaccccgatatctgggtctatgatacctaaataagccaaattattcaccagtggttctcaactggggttcataggggacattcagaaatgtccaagggcttttagatgtcactatatctgaaagaaatgctagcatttagttggtggggccagggctgcttaatgtcctgacatgtacagtctcacacaagaaattattctacctcattggtctcttggagaatatcaccatagaggcagctgaggacaaaggccaaggtgggctgtctcacctgtgcagaactaatcctttatttccttgccttatcagtaataaaacaccaatcatccatctatttggaaacaattgatatcttggcagctggaataaataaatgacttgctttaaaaaaatagccaattcttcctttccacgtcaattggaagtgaattgtgcacattcacatacagtcatggttttgtgaaaggagatctcaggagtggaggtgaactgtgcacttcct

SEQ ID NO: 61113 - DNA, 532 bp, Homo sapiens
ctttggtttcaggccaatcctaacccagatcaaagatcctgggacagctggaacaggcatggcctaatggaactcccaagtggacagggccargcatggacggacagagcttctgaaacagtcctcagaccccgtgcatctggatctttctgtaggaaccacccatcagcagtgccagacagaaccaagcacatgcactgatccaccgcacgatgggagctggtgtgggtgagcttgtttgctttagccatgcccacagacaggaacagaagagcacagtggaggccaccagccctctcgcctgctatttcaaaaggggttgcagcagggctggaaagcggttcccactgtggttgcccccttcctctctgtggcacacacagacctgaaaataaccagagagggactgtgagctgccagcctaaaacaggaaggctgcagaaagtcctaggctcagataggagagtttaaaagaatgttgaaaccaagaacgggcatcacagatcccacctgtctctgcaccaaagcagac

SEQ ID NO: 61114 - DNA, 532 bp, Homo sapiens
ctttggtttcaggccaatcctaacccagatcaaagatcctgggacagctggaacaggcatggcctaatggaactcccaagtggacagggccaggcatggacggacagagcttctgaaacagtcctcagaccccgtgcatctggatctttctgtaggaaccacccatcagcagtgccagacagaaccaagcacatgcactgatccaccrcacgatgggagctggtgtgggtgagcttgtttgctttagccatgcccacagacaggaacagaagagcacagtggaggccaccagccctctcgcctgctatttcaaaaggggttgcagcagggctggaaagcggttcccactgtggttgcccccttcctctctgtggcacacacagacctgaaaataaccagagagggactgtgagctgccagcctaaaacaggaaggctgcagaaagtcctaggctcagataggagagtttaaaagaatgttgaaaccaagaacgggcatcacagatcccacctgtctctgcaccaaagcagac

SEQ ID NO: 61115 - DNA, 839 bp, Homo sapiens
taaggttttgttttttaactctgcgcttttccgcatgcctcacatcttcctggcttctcaagtgagtatcaaggaagctaaagtcttatattaaagggagctttcctccagggaagggagggcggatgaggatggggtcctaggagtcagggccagggttagtgctggcctgaggagaaagaagtatagcttcctccgccgatggccaatatcagcatgatccagccccacccgcaggctaatttccccctgacccagccagtcttcagttatggaacaatccttctcaaaaacgtagactgggtgtggtggctcaatgcctgtaatcccagcattttgcgaggctgaggcaggaggatcacttgagcccagcccaggagttcaagaccagcctgggcaacatggggagaccccgcctgtattaaaaaaaaaaaaaaaaagggtgggggagcggagggtgtatggggggaagatgtgaagataagatctgtttccctcttcaggagaaacggcccctggcgggaatcccgccacagaccgccaggaacaccacctgacacccacctccacccagggagaggctgtccagtccacacaagcctttctttggggtctgtctggaaccctgagctttgggcagcaagtggcatctggcttcagtgcccccacccccgaaacacagaaagaagccttaatcccttgaggctggtgaggccccaagtccacccctcccacaagacaggtcttcagcactgcgctggcctcccrttgggggtctgttcagccactgggaatgtcttccttggctcctctcgctgaccctggctctcctgcaccca

SEQ ID NO: 61116 - DNA, 668 bp, Homo sapiens
  misc_feature (1)...(668): n = A,T,C or G
ggtggctcacgcctgtaatcccaacactttgggaggccgaggcaggcagatcacgaggtcaggagatcgagaccatggtgaaaccctgtctctactaaaaatacaaaaaattagccaggcacggtggtgggcgcctgtagtcccagctactcaggaggctgaggcaggagaatggcgtgaacccgggaagcggagcttgcagtgagccgagatcacgccactgcactccagcctgggcaacagagtgagactccgtctcaaaamaaaaaacaaaaaaaaaaaaaactatctcactttgggttttaggatttaagacgagactacaaaactgactcatcttttgtgaggaaatatcttctattcctttgtggaatgatacataaatggtgttgaaggcaggaggaggttaatttggcacctaaataattcagttggctacagttcaagccttcttttcactccgccatcccctttggtgaggctttgccttatgtttgcactatggctgctcatctcctgccctcatgtccacgttccancaggaagaaggaaggagagggaaagcctnnnnnnnnnnnnnnnnnnnnnnnnnnnnnnnnnnnnnnnnnnnnnnnnnnnnnnnnnnnnnnnnnnnnnnnnnnnnnnnnnnnnnnnnnnnnnnnnnnnng

SEQ ID NO: 61117 - DNA, 520 bp, Homo sapiens
atctcggtgtaatggcttccccctaagttattttaacacgaggcggttattggtacctctaagatgggtttcatttttggaacttagacatcagttagtaccaaggctggggaataagattaagtgaagtagtacatcacatttggtcaaaaacaaccaagttctggaagaagtttccaaagaggaatttgggaatgttttgcatgttggccttttgaagttcgatgattstttcagtgcacaaactccaacatacttgttaaaaatcacctcatttctttacagtttctcatcccagtttccccagcctcctgtgaaggtgtcagagaaagaagatagccctctcttcatgtgctttctgaactctgccttctcagtgggcagaggaagtgctttgtagcagcaaacccaacccctgagcctccatgtgtcgggtcaggcaaaatgaaattgacacaggctggaattttactgatttcagtcattgctgggctcgtttgtgcaaatagactcagaagag

SEQ ID NO: 61118 - DNA, 520 bp, Homo sapiens
atctcggtgtaatggcttccccctaagttattttaacacgaggcggttattggtacctctaagatgggtttcatttttggaacttagacatcagttagtaccaaggctggggaataagattaagtgaagtagtacatcacatttggtcaaaaacaaccaagttctggaagaagtttccaaagaggaatttgggaatgttttgcatgttggccttttgaagttcgatgattctttcagtgcacaaactccaacatacttgttaaaaatyacctcatttctttacagtttctcatcccagtttccccagcctcctgtgaaggtgtcagagaaagaagatagccctctcttcatgtgctttctgaactctgccttctcagtgggcagaggaagtgctttgtagcagcaaacccaacccctgagcctccatgtgtcgggtcaggcaaaatgaaattgacacaggctggaattttactgatttcagtcattgctgggctcgtttgtgcaaatagactcagaagag

SEQ ID NO: 61119 - DNA, 580 bp, Homo sapiens
ccgtgtagcctcagctcacagaggactcagcagcacttagcttcatgttgagccgatacagacatattagcatctctaacagaatttaaacagaggttgaactaccctaggttttctgcagaggtgggtcagcatacacatacaacaaaatcacagcgttgtaagagctgaaaggtctagaacctgtattcagttattttagttatgtgacaaggtatttttacacataaayagcaagtcacgatattatatttccttaaaaattaaaaaaaacaatattcaggctgggcacaatggctctcgcctgtaatcccagcactttgggagactgaggcaggtagatcacctgaggtcagaagttcgagaccagcctggacaacatggtaaaaccccgtctctattaaaaatacaaaaatagccaggcgtggtggtggacgtctgtagtccctacttgggaggcttgggcaggagaatcacttgaaccaagaggcggaggttgcagtgagctgaaatcacacgattgcactccagcctgggcaagagagtaagacttcgtctcacaaaaacaaaaaaacacaaa

SEQ ID NO: 61120 - DNA, 1816 bp, Homo sapiens
  misc_feature (1)...(1816): n = A,T,C or G
tgcattgttacactactattactctctggaattagttttctaccatgtagaaaaatgggagtgtgaacatgaacgaatctccccttctgttgattgcttcagctgaacctggagctgggcaggctgcttcgccgctccataggtcccatttgtggtttcagcctgtcaaggaggtcactcactgatgactcagacacactggcctganggtactcatgtgatctcccaagtcagcagaaagcctgccctcagaacnaggcacatatatccctgctcttgatggcttcaagctctgcaatggggggctgacctgacagctgcttgtcctgaggcagaaataaaggaaactggtgaaacacatgctatttccatgaattcccactcatgtgctgttagaaaattcagctgagaccctgacaataaaggttagacttgtagtgtcacaatagaaaggaagggaactttaacttgccttcagcataccaaacaggctgcacttcacaagatctgtaactcactgaaccatctaagatgcaccacagaaaaactatcaatgggcatttgtctgaattcatatttatggcatctgtttgacatgcggttttcatttagatggcaatccagatactgttttgcataaagttctggctttttgagctgtccatatcaattgtcttttaccaaatatcgaattttcagatgtttacagatgcaccagaaaaatattttcaaatcattcaaaagagtggcatccaacaaaaaaatctgaactgaatgctaatgaaaattcttgggttccatgtagaaaaatgctctaaaatgggaaaaatattctacccaaatttactgcaaaagtataatttttctgtctttgagttacagtattgccctcctctcctcattcctaatttaggcaaaaggcccatatcaaatgcattaaatgagagtttaatcatttttataactaagtgtagcttttttaagaaaagctgtaaaaaaatcccagtgcaatgacacaagcatctctgagtyaactgttatttcagggatttatgataatttctcatcttgaggagaaatgaagctaattgaaacaaactctatactttatattaatgccatttgaatacagtgtgcattgccagttacaaagtgacatggaaaatgaggccgctctcaacaacaccatcgtttctcagttttatgtatttttaaatttcctctatggaaaatctgttcttcataaaagaactgctagagaaaaatgtggaaaaagttgattcattccatatttacattctttctggtacctggaaatgaaccaaatgcaaaagtatgccaaaaagtagttgagtcatttagaaaactcatcttcccccaggcaaaaggacaaactgccttgagaaagccctgctttgataatataaaacacctttcagcctaatgagatctgtccttataaccttttacccaggcctcaaggaggccagcctcaaggaggccagcctcaagaaatggttaattttctttatcacacaatctaccctgcaaactccctaccaacctaagagagtcagtactacccaaattcaaaaattcctcctctgatatttgaatagatgggggcacttaacacaaatacatccagcagcaaagaagcaccaaattacgtacaccacaaagttgccttcagtcctcccggcctgatctgctaatgctatttgccatttcactttgaagagctgggcaaaataaaagcaaggtgttgctctcacgaggagagggcagctgattcatccctcacagggctgccaga

SEQ ID NO: 61121 - DNA, 1816 bp, Homo sapiens
  misc_feature (1)...(1816): n = A,T,C or G
tgcattgttacactactattactctctggaattagttttctaccatgtagaaaaatgggagtgtgaacatgaacgaatctccccttctgttgattgcttcagctgaacctggagctgggcaggctgcttcgccgctccataggtcccatttgtggtttcagcctgtcaaggaggtcactcactgatgactcagacacactggcctganggtactcatgtgatctcccaagtcagcagaaagcctgccctcagaacnaggcacatatatccctgctcttgatggcttcaagctctgcaatggggggctgacctgacagctgcttgtcctgaggcagaaataaaggaaactggtgaaacacatgctatttccatgaattcccactcatgtgctgttagaaaattcagctgagaccctgacaataaaggttagacttgtagtgtcacaatagaaaggaagggaactttaacttgccttcagcataccaaacaggctgcacttcacaagatctgtaactcactgaaccatctaagatgcaccacagaaaaactatcaatgggcatttgtctgaattcatatttatggcatctgtttgacatgcggttttcatttagatggcaatccagatactgttttgcataaagttctggctttttgagctgtccatatcaattgtcttttaccaaatatcgaattttcagatgtttacagatgcaccagaaaaatattttcaaatcattcaaaagagtggcatccaacaaaaaaatctgaactgaatgctaatgaaaattcttgggttccatgtagaaaaatgctctaaaatgggaaaaatattctacccaaatttactgcaaaagtataatttttctgtctttgagttacagtattgccctcctctcctcattcctaatttaggcaaaaggcccatatcaaatgcattaaatgagagtttaatcatttttataactaagtgtagcttttttaagaaaagctgtaaaaaaatcccagtgcaatgacacaagcatctctgagtcaactgttatttcagggatttatgataatttctcatcttgaggagaaatgaagctaattgaaacaaactctatactttatattaatgccatttgaatacagtgtgcattgccagttacaaagtgacatggaaaatgaggccgctctcaacaacaccatcgtttctcagttttatgtatttttaaatttcctctatggaaaatctgttcttcataaaagaactgctagagaaaaatgtggaaaaagttgattcattccatatttacattctttctggtacctggaaatgaaccaaatgcaaaagtatgccaaaaagtagttgagtcatttagaaaactcatcttcccccaggcaaaaggacaaactgccttgagaaagccctgctttgataatataaaacacctttcagcctaatgagatctgtccttataaccttttacccaggcctcaaggaggccagcctcaaggaggccagcctcaagaaatkgttaattttctttatcacacaatctaccctgcaaactccctaccaacctaagagagtcagtactacccaaattcaaaaattcctcctctgatatttgaatagatgggggcacttaacacaaatacatccagcagcaaagaagcaccaaattacgtacaccacaaagttgccttcagtcctcccggcctgatctgctaatgctatttgccatttcactttgaagagctgggcaaaataaaagcaaggtgttgctctcacgaggagagggcagctgattcatccctcacagggctgccaga

SEQ ID NO: 61122 - DNA, 1816 bp, Homo sapiens
  misc_feature (1)...(1816): n = A,T,C or G
tgcattgttacactactattactctctggaattagttttctaccatgtagaaaaatgggagtgtgaacatgaacgaatctccccttctgttgattgcttcagctgaacctggagctgggcaggctgcttcgccgctccataggtcccatttgtggtttcagcctgtcaaggaggtcactcactgatgactcagacacactggcctganggtactcatgtgatctcccaagtcagcagaaagcctgccctcagaacnaggcacatatatccctgctcttgatggcttcaagctctgcaatggggggctgacctgacagctgcttgtcctgaggcagaaataaaggaaactggtgaaacacatgctatttccatgaattcccactcatgtgctgttagaaaattcagctgagaccctgacaataaaggttagacttgtagtgtcacaatagaaaggaagggaactttaacttgccttcagcataccaaacaggctgcacttcacaagatctgtaactcactgaaccatctaagatgcaccacagaaaaactatcaatgggcatttgtctgaattcatatttatggcatctgtttgacatgcggttttcatttagatggcaatccagatactgttttgcataaagttctggctttttgagctgtccatatcaattgtcttttaccaaatatcgaattttcagatgtttacagatgcaccagaaaaatattttcaaatcattcaaaagagtggcatccaacaaaaaaatctgaactgaatgctaatgaaaattcttgggttccatgtagaaaaatgctctaaaatgggaaaaatattctacccaaatttactgcaaaagtataatttttctgtctttgagttacagtattgccctcctctcctcattcctaatttaggcaaaaggcccatatcaaatgcattaaatgagagtttaatcatttttataactaagtgtagcttttttaagaaaagctgtaaaaaaatcccagtgcaatgacacaagcatctctgagtcaactgttatttcagggatttatgataatttctcatcttgaggagaaatgaagctaattgaaacaaactctatactttatattaatgccatttgaatacagtgtgcattgccagttacaaagtgacatggaaaatgaggccgctctcaacaacaccatcgtttctcagttttatgtatttttaaatttcctctatggaaaatctgttcttcataaaagaactgctagagaaaaatgtggaaaaagttgattcattccatatttacattctttctggtacctggaaatgaaccaaatgcaaaagtatgccaaaaagtagttgagtcatttagaaaactcatcttcccccaggcaaaaggacaaactgccttgagaaagccctgctttgataatataaaacacctttcagcctaatgagatctgtccttataaccttttacccaggcctcaaggaggccagcctcaaggaggccagcctcaagaaatggttaattttctttatcacacaatctaccctgcaaactccctaccaacctaagagagtcagtactacccaaattcaaaaattcctcctctgatatttgaatagatgggggcacttaacacaaatacatccagcagcaaagaagcaccaaattacgtacaycacaaagttgccttcagtcctcccggcctgatctgctaatgctatttgccatttcactttgaagagctgggcaaaataaaagcaaggtgttgctctcacgaggagagggcagctgattcatccctcacagggctgccaga

SEQ ID NO: 61123 - DNA, 560 bp, Homo sapiens
taccctgacaggagccgacgtttctaggttaaaaaacgtgggtaggggcgggtgtgcttgtgcggagtggttaacaaaatctacattttacaaagtggaaggaagcaggcagaaagacgcaaaggagggactcgccgttcccaggtgctgcggttcccaggtgcttcagttcccaggtgaaaagcagggtgaaatggttttagagaaacagggatgaagggattaggtgggcagaaggcaataattgatkgcatgtaggtaacagcagcaaaatgcctgcctttggttacttaggctgggaccagcacctttccacatccacaccacggaatttcagaggctgggagtgctgtaggtagagcaaccacccggctccctgagtggggagaacctgctgtcttgggggaatgcgcctcctgaaaaaagccatttccacggacggaggtcatggtgcttagagacgagcctccacccaggccagaaaaatgccagccctctgtggggtagggcggaggtgggagcaagagcacggggctttgaggtcggacacatctgccttt

SEQ ID NO: 61124 - DNA, 1431 bp, Homo sapiens
cttcttaccttggatttgcttattttttcccgaagtttcttgccagggatgcttacacaaatctagggctctagatctcccacactttctcagactctcggtgtttttggtttaggtcttaaaacttaggaagaaaaagtatgtaggaaaaagctaccagaaatgcttgggtttatctctagctaatgcacaaaaaaagtgtctgacaaygcagcctttaactgacttggaagggtggctcttcaccctaacagaagtgcagggattacaggttcctatcagttagtcccagatccgccttggtggccgaagaccagcacactggcagtttcctttccctggaacagttcctgatttcccaagaccaaaccacacatatttgtcagcagtcagaatgccttctgtttttgttcctactgggcaggggaaggtgaggggtaaggagagagagagctgtaggatagtcactttctcactcaggctagaggaagcaagaagagaatttcaagccggaatgtcctcccaggcccccaggtttctggtcctgctcactttaccacctatcatctacccacctggctttccaggtgatggaggcagagtgtggcttagtgctagtggaatggaacatgccccagggaccattgagccatgggggttgggagaacactgcaggcttacatggtcaggggttggaggggtgtcccaggaaggaaaggaaaagcctaaagtcacagaagtgacagaagtagacatgatcttgggtctggtgagtttggtgatcaggctggctttatccatgaagctataacatgataagttcagttattctctagtcagggaacagagggttgtggagatacatgtaagcccgaagtcccttacaatggcagcgtcatgaagattaaagacatgcagcagaaatcctgaatgatcaatctgacagagcagtcctagctctcctctgaattctgggcaggaaaagagggacagatctcaatgttgaggcaggagcatcataaaaaatgtccttaaccagagggaaaatgggtcaagaaacgtctgggacctgggacccacataaattctttcttgaggttctgaacagccagtgcttttttgtaaactgctctaaagccagacaacacagactgagaaacatcaagcaaggacctccttttcttatgggtcccatgtcataaactcttgacattttaacatggtggcactttatacaactcatatttttaaaaactgaccttgtgaaactctccttgaaaaccttgttggcaaatagctacactagaaaaatgagaaggccaagggagaataagtacttaaggatatccttgccgtggctgctttgtccctctgaagcctgctctgcctgtgtaagctatagcattcttgcggcagtcaggaaggttcagt

SEQ ID NO: 61125 - DNA, 1431 bp, Homo sapiens
cttcttaccttggatttgcttattttttcccgaagtttcttgccagggatgcttacacaaatctagggctctagatctcccacactttctcagactctcggtgtttttggtttaggtcttaaaacttaggaagaaaaagtatgtaggaaaaagctaccagaaatgcttgggtttatctctagctaatgcacaaaaaaagtgtctgacaacgcagcctttaactgacttggaagggtggctcttcaccctaacagaagtgcagggattacaggttcctatcagttagtcccagatccgccttggtggccgaagaccagcacactggcagtttcctttccctggaacagttcctgatttcccaagaccaaaccacacatatttgtcagcagtcagaatgccttctgtttttgttcctactgggcaggggaaggtgaggggtaaggagagagagagctgtaggatagtcactttctcactcaggctagaggaagcaagaagagaatttcaagccggaatgtcctcccaggcccccaggtttctggtcctgctcactttaccacctatcatctacccacctggctttccaggtgatggaggcagagtgtggcttagtgctagtggaatggaacatgccccagggaccattgagccatgggggttgggagaacactgcaggcttacatggtcaggggttggaggggtgtcccaggaaggaaaggaaaagcctaaagtcacagaagtgacagaagtagacatgatcttgggtctggtgagtttggtgatcaggctggctttatccatgaagctataacatgataagttcagttattctctagtcagggaacagagggttgtggagatacatgtaagcccgaagtcccttacaatggcagcgtcatgaagattaaagacatgcagcagaaatcctgaatgatcaatctgacagagcagtcctagctctcctctgaattctgggcaggaaaagagggacagatctcaatgttgaggcaggagcatcataaaaaatgtccttaaccagagggaaaatgggtcaagaaacgtctgggacctgggacccacataaattctttcttgaggttctgaacagccagtgcttttttgtaaactgctctaaagccagacaacacagactgagaaacatcaagcaaggacctccttttcttatgggtcccatgtcataaactcttgacattttaacatggtggcactttatacaactcatatttttaaaaactgaccttgtgaaactctccttgaaaaccttgttggcaaatagctacactagaaaaatgagaaggccaagggagaataagtacttaaggatatccttgccrtggctgctttgtccctctgaagcctgctctgcctgtgtaagctatagcattcttgcggcagtcaggaaggttcagt

SEQ ID NO: 61126 - DNA, 696 bp, Homo sapiens
tgcttgggctggtctggtcaggatatgagaagagaccaggggaatgggagcatgttttgtgctgtcagaaagagagagatacttgcaaaaggaagaagagtgtagccttggtacagaaggcaatgagaaggttagaaagggtgaccatatggagccataaatcagtagctacccaggcaacaaagctgactctgtacatctggtatgtgacgcaccagttacttattgagcacctgctgtgagcacaacccggccatcaccactgttggggagtacaaaatactccagagaccttttctttgccttcaactctagttggaggcagacttctacaacttaacatcctccttcaagacaaggactcatctcttcggttcctcctcatatcccattgcctggtacgaggtttagctcacagtagttacccttaataaatgattcgctaataaatgaatgaatggatgaatataataacatgagaatagttacagggtcacttacaagagatctaataacccactttaaactaaatatgtaaatgccaatagggtgstcatagaataaaggaatatcagagcagcatgaggttctgcaaaaagatttcaggcttctgacaagcctgtgctggtttccacttcctcagtctccccagacagggtaaattaagatgacggccctgatggttaaagtgcccag

SEQ ID NO: 61127 - DNA, 357 bp, Homo sapiens
aagcttgggctcttctcaggagctatctccttcaggaagccttccatgagagggccctgtgccatgtcttactcttgaggtctggtactctcagatcagacagtatctgatgctgactaggcattcaggaaatgtttgttgaatgaatacaatggcgttggtttctattctttttctctaatcttctcaccagagtttagatgtttcarctttgtaacaggatgggacatctatttcagacttggagagactctgaagagtttgtcagaggacagacagttcattagttggttctcattttgaaatgcttgaactcagggaacacatctcagcttcatacacagagcctttgtggtt

SEQ ID NO: 61128 - DNA, 791 bp, Homo sapiens
tctcattctcagcagcccagaccctcagctagctgggctacacagtatgaaactagcttttcttctctgtcccaaactcattggaaaccacagaaaccacatgaaaaatggagtctgaccacctctcatctatggatctcagacttctccttctgtaatgattcaccatcaagggttatggaagccmcagcagcaataaaagactcttgtattgatccactttgaaattatagaggaaaacaaattaccctgaggttctttattggcattgagtgttaggtccagacagattccagaacaatttagcttttaagatttaattcaaaagtcccttgcaaactatggatacaggaaaatgaatcatttcatattaggggatggggcgataatgatgataaatgcctttttgaaagctttgtgttccaaccataagcccttctctaatagttcttcggagctgattagaagcttaaaaagccccattttggtcaagagctggtaattcctagtttccctttggtggaaataattggtctgataatatccaaataatatttattaattaaataatattcattttatgtgattgtactatgtacatgttaattggatgctgaataatcagttttactatcttcattatgtaagtaatgcataaatccaattttgtttaagagtttcagataatatgtactatgcaggagaaaaatagaaagtctttcttcaacatccttctcccacctgcctcagccatcctgttccaggtgtagccacagccggtagatgagtat

SEQ ID NO: 61129 - DNA, 791 bp, Homo sapiens
tctcattctcagcagcccagaccctcagctagctgggctacacagtatgaaactagcttttcttctctgtcccaaactcattggaaaccacagaaaccacatgaaaaatggagtctgaccacctctcatctatggatctcagacttctccttctgtaatgattcaccatcaagggttatggaagccacagcagcaataaaagactcttgtattgatccmctttgaaattatagaggaaaacaaattaccctgaggttctttattggcattgagtgttaggtccagacagattccagaacaatttagcttttaagatttaattcaaaagtcccttgcaaactatggatacaggaaaatgaatcatttcatattaggggatggggcgataatgatgataaatgcctttttgaaagctttgtgttccaaccataagcccttctctaatagttcttcggagctgattagaagcttaaaaagccccattttggtcaagagctggtaattcctagtttccctttggtggaaataattggtctgataatatccaaataatatttattaattaaataatattcattttatgtgattgtactatgtacatgttaattggatgctgaataatcagttttactatcttcattatgtaagtaatgcataaatccaattttgtttaagagtttcagataatatgtactatgcaggagaaaaatagaaagtctttcttcaacatccttctcccacctgcctcagccatcctgttccaggtgtagccacagccggtagatgagtat

SEQ ID NO: 61130 - DNA, 636 bp, Homo sapiens
agcattgtttgaatggaaattactctttgaactgtctagccataggcagtaatgcattcccattttgctgtgrcttgagtttctatattttgtaactgaaagagtttcaattaataaatatcctaattgtactagacatttgtgtaaataggccacttttcaacatagtacgatgtcatgattttgatgagatgctaaataaaaaaaattagagtgaatatccatgacacgcagtaaatctttgttgaatgaaagagcaagtgccaattgtggatgaaagggtaaaaatgaagtaaaataagccacaagcttctccagaattttagatctcaatgaacagaaatcttcggaaagtacatgccccagaataccacaatgtaagaatcacagacatttgtttcctctggtttgttccttttagactgtgtggttcagttaatacatttgcataatattttctacatcctgcatgataatgataatgacacttgaactgaaatgaccacattagttcttcctcagcttttctcatttaagattcttcacaggaaaaacaaccctaggctttttaggaaccgatttatcatcctctcttacatgtcaataggttatccttgctgaaaaaggtctttcgat

SEQ ID NO: 61131 - DNA, 636 bp, Homo sapiens
agcattgtttgaatggaaattactctttgaactgtctagccataggcagtaatgcattcccattttgctgtggcttgagtttctatattttgtaactgaaagagtttcaattaataaatatcctaattgtactagacatttgtgtaaataggccacttttcaacrtagtacgatgtcatgattttgatgagatgctaaataaaaaaaattagagtgaatatccatgacacgcagtaaatctttgttgaatgaaagagcaagtgccaattgtggatgaaagggtaaaaatgaagtaaaataagccacaagcttctccagaattttagatctcaatgaacagaaatcttcggaaagtacatgccccagaataccacaatgtaagaatcacagacatttgtttcctctggtttgttccttttagactgtgtggttcagttaatacatttgcataatattttctacatcctgcatgataatgataatgacacttgaactgaaatgaccacattagttcttcctcagcttttctcatttaagattcttcacaggaaaaacaaccctaggctttttaggaaccgatttatcatcctctcttacatgtcaataggttatccttgctgaaaaaggtctttcgat

SEQ ID NO: 61132 - DNA, 636 bp, Homo sapiens
agcattgtttgaatggaaattactctttgaactgtctagccataggcagtaatgcattcccattttgctgtggcttgagtttctatattttgtaactgaaagagtttcaattaataaatatcctaattgtactagacatttgtgtaaataggccacttttcaacatagtacgatgtcatgattttgatgagatgctaaataaaaaaaattagagtgaatatccatgacacgcagtaaatctttgttgaatgaaagarcaagtgccaattgtggatgaaagggtaaaaatgaagtaaaataagccacaagcttctccagaattttagatctcaatgaacagaaatcttcggaaagtacatgccccagaataccacaatgtaagaatcacagacatttgtttcctctggtttgttccttttagactgtgtggttcagttaatacatttgcataatattttctacatcctgcatgataatgataatgacacttgaactgaaatgaccacattagttcttcctcagcttttctcatttaagattcttcacaggaaaaacaaccctaggctttttaggaaccgatttatcatcctctcttacatgtcaataggttatccttgctgaaaaaggtctttcgat

SEQ ID NO: 61133 - DNA, 1364 bp, Homo sapiens
ccaacccgctggaaccagtacctggcctgtaaggaacgaggtcacacagcaggaggtgagcggcaggcaagccagtgaagcttcatctgtatttacagttgccccccattgctcacattaccacctcagctctgcttcctgtcagatcagcagtggcagcattcgcataggagcacaatcccttttgtgaattgcgcatgcaagggatctaggttgaatgctccttatgagaacctaacgtctgatgatctgtcactgtctcccatcagcccctgatggctgtctagttgcaggaaaacaagctcagagttctcatttattctttattatggtgagttatataattatttcattatatattacaatgtaataataacagaaataaagtgcacaataaatgtaatatgcttgaattatcccgaaaccatccccaccaccctggtctgtggaaaaattatcttccaagaaaccagtccctggtgccaaaaaggttgggggccactgctgttgattcttgggaacttgatgtggatcctttttagaggacaaaagtgtgttaatacatgtgaagtttacacaattcttgtaaacttctgattccctagaccagtattacatttcagagaccaaatttaacaaagcaactctgaatccacataaatgtttagtaatttgagataaataaattaaatgaatgttgttgatattctgttttgatagtgtcaaattttccttttcacaatgaaggattcctggaatgaaacccagagaaatatgtcaaggaatcagaagaaataatacagacagtaatttctttaatctgaagtatctaaagctgaaaaggcattaaacaatcacaaaaactggagaaaaaaaagcaaaggaaaatgagaagcataatactttaattctctttgttgatattttaagatagttctttactaatttattctttgctcttttccaaagagatagcttgtttcatcaccttaatgtatttatagtcatttataattatttcagaaaagcttttttggtgaattccaaactggattttagtgagaaagcactgagtggaatgctgatgtgtcttctcattgacttcatgatctccaatccaaaaattggtacaatgaaacttcattctgtataatcactaacctcaaaggacatgttattgattaaagtacgtaagtctagtttgtactccaaatwtttaaaagaatgagaggtgttcaaatagaagagtctgtccacttataaaaaaatagactatcagtctattttacactagactactcaagaagaaatctctcaatgttctttcaaaaagccatttgacattgataccctgtgaggaaatg

SEQ ID NO: 61134 - DNA, 672 bp, Homo sapiens
atttcccagatgagggagctgaaacttagcaggctgtacactttttggaatttgcaaactaacccactctctgccttctagcagcaattttcatgtattgtcttcttgcttggtattgggaactgtattaagtactcaacatgtatcacctcctttattcctgataattgtactactaggtgatgagcatggttaattttatttttaaaagaacaaaactgaggataactaaagctaaggaactttctgtgttaagtcacttatagttgcaataataccacataacaaatgacttaaaaaatctcaacagcttccagcaaccaacatttatttctcactaaaaggatcagctggagggttgagctcactctgatttaggctactggttgggttcagttatcttccacgtgtcattcatttctaacctaagctgaaggtgcagtagcttggggcaaaatyttctactgactaatggcagtagcattcatcatgggtggcatgaggccagctaacccatcaagcatatttaaagcctatgccatttgtcaggcctctgagcccaagctaagccatcatatcccctgtgacctgcacgtacacatccagatggccggttcctgccttaactgatgacattccaccacaaaagaagtgaaaatggcctgttcctgc

SEQ ID NO: 61135 - DNA, 1257 bp, Homo sapiens
cgtctttctcatgcagctgaaatagagttactatttcttcactgcgtattttgtgaactcaacgtaagttctgggcagtgggtattttacctcctgtaggagtcgccgttggggctgcagaactaagccagtgtgcctagcctccagctgtgtaatagctcgcagctgtccccattctcctgtctcagttaacaggagcatacacggttgggagcctccaagagcatcccatattaatgactgacatgggggtgcaaaagtttgcccgtatctcagctggggcaggaacaatttaatggggtatgacctattctatagcccccagtgggtcagacctaagccaaacttacttgaggctgcttcagtgctcagccaactacccttccatatcctgctttcccacccacacgttcccgtaaagagcagccttccaataactgacgtgtacccaaagccttaaggtgcctccgctccattttacagatgtggaatctgaggcttgcataggatgtcctccagcttggtctgtccctaaaattcaagccctttctgttccttcatcctgcctggatggaatagaaagcagacagtttgggagcggaaaccccacatcgccgcagggatgggcagcttttcttcccacagctgcagccgacctccctgggcagagcaggcgcctctcgcctcctcccccgcagtgagtcatcacccacgctgagcgaggagaaagtctgagcgggcgctgggctggcggtaacactccaaatgagatttaacagaagcctccgtcgcgctctgcttaggaaagcaggggctgtggctgtgggggaggctcttcactcctggwcccccgggggctggggacggttgggggaagaggggtgccaagggtgccctgcctccagctgagcctctcctcagagacaagctttccaaggtgttgcaggaaggaggaggcagatgagaaagcccagacactgggggctaagctgactcagccaccaaagcagcagagctgagctgagggagccacagtgtgcccggaacacatggcaatactgagccaggtcctcctgcaacctgtttcaacacctcccatggctccccagggccctaaaacactagagtcaaacgctttagccctgaaatcctggctcttctcattgggctccagacactgtcccttaagtcatcacatctgcccctcactttttacattttttttaattgaagtgaaatttacatatattgagatgc

SEQ ID NO: 61136 - DNA, 1321 bp, Homo sapiens
aggaacaggaatgaggacattaagtctaatgatactcctgtcttcaggaagcatcaatcctcaatcccaaccctcaatcccaactcctacgatgatttstatttttgtgttgttgtaaacatgtaaacgtggtgtacattctgttttctgtcctgctcttctttcttaaggtgtttttccacgttgctgaagtctctgtagcctccagttgtaatggttgcataaggttacatcaactgcttttgcctcattgacttaacatttcccaattgctaaacatttcaatttcatctcatttttcctgttattaaaatgtgtgatgcaaagctttcctgtgtataacatagaaaataattctttaaggggatgttgttcaagccaagtcagcaaagagatacaaatggacagaaaatgtttgggggaaaaatagccaccttcattaataagtaaattaaaattaggatacacgtgaactatcgttgtttaactttatcaaattggcattcaattttttttaattgacaatatctagcattggtaagaatgcaatcaaagcataaagcagcatggcttttaaggagagcagattgattatatgtaaagacctttaagaatatccatgccttttgattctgtaattccacttgtaggaagttataaagaatcaggccaggtgaggtggctgacacttgtaatctcaacaccttgggaagccgaggcgggtggatctcttgaagcctggagttcgagaccagcctggccaacatggcacaaccccaggcatggtggcaccttagaaggctgaagcacgagaattacttgaacccaggaagtggaggcagcagtgagctgagattgcgccactgcactgcagcctgggtgacagagcaaaaccctgtctcagaaaagaaaagaatgaatcagatacacacccaaagatttatatataaggacgtgcattacaattctatttatattaaaaaatgagaaacactcttgaatgttcaacaataagttaatggttaagtaaattatggcaaatctgtatgatagaaattttaggtagctattaaaagtcacgttcttgaaaaatatatgatgacacagaaaaaagctcacaatgtcgtgtttagtgaaaagtagaggatataaaaccaagacagccaaaacggcatcatcctaattttagaagagacgtatgttaacagatcaggtccacagaaaaaagtaggtgtctgttttgcccttcttctttaagatctgaagtgcttcctgaagacaggagtatcattagacttaatttcctcattcctgttccttc

SEQ ID NO: 61137 - DNA, 1321 bp, Homo sapiens
aggaacaggaatgaggacattaagtctaatgatactcctgtcttcaggaagcatcaatcctcaatcccaaccctcaatcccaactcctacgatgatttgtatttttgtgttgttgtaaacatgtaaacgtggtgtacattctgttttctgtcctgctcttctttcttaaggtgtttttccacgttgctgaagtctctgtagcctccagttgtaatggttgcataaggttacatcaactgcttttgcctcattgacttaacatttcccaattgctaaacatttcaatttcatctcatttttcctgttattaaaatgtgtgatgcaaagctttcctgtgtataacatagaaaataattctttaaggggatgttgttcaagccaagtcagcaaagagatacaaatggacagaaaatgtttgggggaaaaatagccaccttcattaataagtaaattaaaattaggatacacgtgaactatcgttgtttaactttatcaaattggcattcaattttttttaattgacaatatctagcattggtaagaatgcaatcaaagcataaagcagcatggcttttaaggagagcagattgattatatgtaaagacctttaagaatatccatgccttttgattctgtaattccacttgtaggaagttataaagaatcaggccaggtgaggtggctgacacttgtaatctcaacaccttgggaagccgaggcgggtggatctcttgaagcctggagttcgagaccagcctggccaacatggcacaaccccaggcatggtggcaccttagaaggctgaagcacgagaattacttgaacccaggaagtggaggcagcagtgagctgagattgcgccactgcactgcagcctgggtgacagagcaaaaccctgtctcagaaaagaaaagaatgaatcagatacacacccaaagatttatatataaggacgtgcattacaattctatttatattaaaaaatgagaaacactcttgaatgttcaacaataagttaatggttaagtaaattatggcaaatctgtatgatagaaattttaggtagctattaaaagtcacgttcttgaaaaatatatgatgacacagaaaaaagctcacaatgtcrtgtttagtgaaaagtagaggatataaaaccaagacagccaaaacggcatcatcctaattttagaagagacgtatgttaacagatcaggtccacagaaaaaagtaggtgtctgttttgcccttcttctttaagatctgaagtgcttcctgaagacaggagtatcattagacttaatttcctcattcctgttccttc

SEQ ID NO: 61138 - DNA, 939 bp, Homo sapiens
gggagggagggtgctgcagcaagcctgtatgaagcttctccagtgtggtaagcactgccccaaagcatcctgcccgtatcctgttcagtcctcccaactgccctgagatgctcctatttcacagaggtatagaaactgatactcagagaggtgaagtttcttacctaagggctcatgtttaggaagtgacagaatcagtatcaaacccaggattttccaggcccagtgcctgtcctctcttttgctgccacaccttgcctcctaggatactccatctcctgggacccctataaagcacttttccctttttttccttttctgatatttattgttattatatcagaaatgttctaayaaccacagagcaacctcaggaaaatggaagatgcactcctcccgccccctggccatctctgatgctttcatcatctcttagacccactggagctgaaactttctaatgcaatccaggcttagcccagtcccacctttttaaagtggtggcctgaggaggcttggaatgtaaccatgtccaaggccaacctcagcctagacagtgctgagtttgggggacaaggattccttggggctgtcctgtacgtcaggctgatctgcttcctcacggcggcagggtcaggtggaggtgtcctttggcaggaaacctcagattctaaagcagtttttgttagccagaggtggtcttgaccctagggacacttggcaatgtctagaggcatttttggctgtcagaactcacaaaggagggtgctactggcaacgagtaggtaggggtcggggatgctcctaaacctcctacagtgcacagggcagcccccaacacagaattttcctgccccaaagcgcctgtagtacagaggttgagaaatcctgctctaggcaaacacagctacagaactggtcctgctctccccgtgggcc

SEQ ID NO: 61139 - DNA, 641 bp, Homo sapiens
ggacaattccacagggtttggacttgatcagggcagaaggtgaagctgcaaggtattagatgtgggaatggagaaaaatacaggctggagctgtgggtttgagtgttgtcctcataggaggtgatggctgaggggtaggtaagtgagaggatgagatccccgaggccgacagcacagagtgacaggagcatagggcaggactttgggtcacccaaggagacagtgatgcttttgaagaagtcagaggaggccccatcagcaatcagaggattgctctgattggcacctcagagctggaggacatcaaaaaataccgctgtaagaaagagacctggaaaagtctttagagattgtctatcccaccctacccatttgacacatgagaagatggaggccaagagatcactgagaaaataaatggtagagcttgggcaaaatcagtgctgcccaaaatggtgtttttccaacaaagacatttaaaaggttccttccacaaggatcaaacaccttggggttttgatttttatcttaaaaarttatataaatttagccttctacaggccaggcacggtggctcacacctataatcccagcactttgggaggctgaggtgggtggatcatgaggtcaggagatcaaaa

SEQ ID NO: 61140 - DNA, 728 bp, Homo sapiens
ccaaacactgttgtaagcccttgagagacagaagtgacaacagggaaaaagcagagcttatattccagtggagggcagggccaccctgttgtccaactccaggagttgccattgctgcattacgttgaagtcaatgtgaatggtgacctctatggctgtacagtgcacagcctgtgcagcaggacatgactgtcccagttgggagaggcaagtaacaaacaacatagataagcataagataccatgttaggtggtgataaatgttgaagaacacaaagcagggactccagagaggatatgggcatgggtaagggcgctattttagatagggtgaccagggacagctcgctgtgaagatcaccgcatcagtcagggcgcaacagaaagtgggtcgttggaggagagttagcaaagggcctatttacagcgatgtgggcaggatggagggaaactatagggagagtggggctattatccccttgtggcagaaaggggaggacacgtgacagaccacaaagagagagggcggtatggagagcccacttgacagttgcctggagagcaagcctgggaataaatgtcctggcttaacccctctcttccctcagtcaatctttacacagtgcccccatgggccaaatccartggaagccagagggccaagaagcatgttgatttcatcctagtcaacacctggggacacagcagagtggacaccggtattgagt

SEQ ID NO: 61141 - DNA, 598 bp, Homo sapiens
catcctggtggcaaaggtcaatcattatcagattgcaggaccggttataatggcaataatacagcaagtgagtccatggaaacaacagaatgatyagaatggccttttttccccttcttctgacttgtgaagaaagattgccttccttggacttaggaaaccccttagcttcttggaaaattcaaagaaggaagacacaggagagagccccaggggacaagattttctgttaaactggacattacaagactcaataactaattagaaaagtcaggccaggcatggtggctagcactttcagaggccgaggcagggggattacttgacctcaaaagttcaagaccagccagggcaacagagtgagaccttgtctctacaaaaaaaaaaaaaaaaaaaggaaaggaaaggaaaagaaatcaaagacatggctccttttatcccatgcatggggattatacttagaataaaatgaataacattgagatccctagggataaaggtctcaaaaatccagaaaaaatcttgcactctacttctaactaatctagacttctgcttgatttctggctaaaaggcagactaactcttcgctatttca

SEQ ID NO: 61142 - DNA, 598 bp, Homo sapiens
catcctggtggcaaaggtcaatcattatcagattgcaggaccggttataatggcaataatacagcaagtgagtccatggaaacaacagaatgatcagaatggccttttttccccttcttctgacttgtgaagaaagattgccttccttggacttaggaaaccccttagcttcttggaaaattcaaagaaggaagacacaggagagagccccaggggacaagattttctgttaaactggacattacaagactcaataactaattagaaaagtcaggccaggcatggtggctagcactttcagaggccgaggcagggggattacttgacctcaaaagttcaagaccagccagggcaacagagtgagaccttgtctctacaaaaaaaaaaaaaaaaaaaggaaaggaaaggaaaagaaatcaaagacatggctcyttttatcccatgcatggggattatacttagaataaaatgaataacattgagatccctagggataaaggtctcaaaaatccagaaaaaatcttgcactctacttctaactaatctagacttctgcttgatttctggctaaaaggcagactaactcttcgctatttca

SEQ ID NO: 61143 - DNA, 598 bp, Homo sapiens
catcctggtggcaaaggtcaatcattatcagattgcaggaccggttataatggcaataatacagcaagtgagtccatggaaacaacagaatgatcagaatggccttttttccccttcttctgacttgtgaagaaagattgccttccttggacttaggaaaccccttagcttcttggaaaattcaaagaaggaagacacaggagagagccccaggggacaagattttctgttaaactggacattacaagactcaataactaattagaaaagtcaggccaggcatggtggctagcactttcagaggccgaggcagggggattacttgacctcaaaagttcaagaccagccagggcaacagagtgagaccttgtctctacaaaaaaaaaaaaaaaaaaaggaaaggaaaggaaaagaaatcaaagacatggctccttttatcccatgcatggggattatacttagaataaaatgaataacattgagatccctagggataaaggtctcaaaaatccagaaaaaatctygcactctacttctaactaatctagacttctgcttgatttctggctaaaaggcagactaactcttcgctatttca

SEQ ID NO: 61144 - DNA, 1005 bp, Homo sapiens
tgcatatataattcaatacatcatgctgtagatggtaaatacatacaattttatttgtaaattaaaaaataaagtcaaaaaaagaagaaaaggtagcatataataagagccaacatgggtgagtcacataataagtaaggcaggagagtataatgggtggattattgtggataagtgaaatagaatttcatagagaatagaagctctggtgtgaatttcaaggataggcaggaatcagttaagtggaaaggaatggggacaatatcctagcgagatctcctggcatatacaaagatctggagactaaattcacattttatgtctgagagacaaggttttcagaatataagttttgatttgagagcaagagaagataaatttagagaggtatattgaggccagattagtagagggttttaagtatcaggttaaagaatttggactttatgctgtagacagtgaggagttattaaaagttgctgggtaagaaattgacagctgcaagacaacatttaaaacatgtttgtatagaaactatgtaaaaaaatatagtctaaacccttctctgacaaatgaggggccaatgttaggtgtggaaagtcactggaccttagaagctgagggtggagaaaatggaattgagaaacaacctacaagcaaaggcrgatggttgggtaggtttaggaacaaaaccgaatctaggataaacaattcaaagggagcagccagagaaaagatctgtgattgatggtctaacgaagtgtggagatttggtccagggtgacgagaaagcactaagtggcaacagcactggaatggaaagaatgctgcaaattggagactttggaaaagaatttaggacagatcttagtttacttgatatggagggtgaagaaaaggaaacaaattagagattatttcaaaggttcacaccatgtaggaagaaaagtgactggtgtaactggaagacataaagaaatctagagaaataccttttctttgggg

SEQ ID NO: 61145 - DNA, 1034 bp, Homo sapiens
tgttccttgctgagaaaaagaattcagcgacaattctcccatttgcctttgaaagaagagaaatatggctctgttycacccgggtcaccggcagtcagagtttaaggttatctctcttgttccctgaacattgctgttatcctgttcttttctcaaggtgcccagatttcatattgttcaaacaaacacacatgctctacaaacaatttgtgcagttaacacaaccatcacagggtcctgaggcttatgaagatgacaggattaagagattaaagtaaagacaggcgtaggaaatcacaagggtattgattggggaagtgataagtgtccatgaaatcttcacaatttatgttcagagattgcagtaaaaacaggtgtaagaaattatgaaagtattaatttggggaactaataaatgtccatgaaatcttcacaatccacattcttctgccatggcttcagctggtccctccgttcggggtccctgacttcccgcaacagagagtaggaagaaataaataataaaaagcaaaactaaaattgataaaacataaaactaaaaagaaggattaaattatttttaagctgctttttttggttcttttttattatcccaaataaaatcaattagtaagaaaacaaagaaaccaagagagcaaaagtgttcaaaattggaaatggctaaagagacctgccaagaatacataatacatcaaaagaacctaacattacatcattccttaataatgccgtggacttattatgaaactttacaatcatgctacactttctccatctacttaactataggcaattgatctggggcaccatttaggaaacctgggtcaaggagcagcccaaattttagcctttctagaattgtccccaaatttttccaagcttaaaaatcattttaacaaactaaaaattgcataattgtacatggtctaaaacttaattctgaaaataagtactttatcttttaatactttgagatatggtaagtgccttgacttttaaagagttgctactaa

SEQ ID NO: 61146 - DNA, 534 bp, Homo sapiens
gactggagtaaacatgcaaaaagaccctccctgtctctcctcacactactttcttccaagttctttgtgtccttttccctttttgtggggctcagtcatgtcacttcccacttccagtctcccgctcttactatctgaatttcaaagcaatgtccattttgcacaagggctctctccctggctacccgcccaagtggaatcagtatgatgtgacctatacacaaacacagtaaagtgtttaccctctttccaaacaaatcacaagcccctttaaaccgtttctgtctttctaaaacatgraaaaaggaagtgctgtcttagatggatgtctaaggaggtgaaagtcttccaccaatcagaggaatggattttaaaagatgcaagatcatccttgaaagccattatgaatggaacataagaattccatttttcagcatttctcctctataaatgcaagaaaatggattcagaaaataaacctaagcaaacacttgtcactgataaatctcccactgcttgggaaaaaagtggtca

SEQ ID NO: 61147 - DNA, 544 bp, Homo sapiens
ctctcctgaatgggattaaggcccttattttaaaaggctgtgtgcatttggttagcttgcccttccaccttctgccgtgttaggatttggtgttcctcccttccagaagatgcattccctcatcagacaaccgaacgtgtgggtgccttgattttggacttccaaacctccagaactgtgagaaaatacatttctattcttaattaattacccagtgtcagatatttgttgtagccgcccaaatggactaagaaaacacccatgcctgtttatttctgcgtcgtccatggctgttttcacactacagtggcagtggttgagtagttgtgacagagactgtgtagtctgtgaagcttgaagtatttgctataaaaaaatcttgcagacctccattttagacagtctaagaacttgtatatttaccccaatatgtacatttctagggcttttctgcactttcagcttttgtttgatagagttttatttcaccttcatttttgattgatgtttttattstatgttggcattttttgcttttgttatt

SEQ ID NO: 61148 - DNA, 1059 bp, Homo sapiens
aatacaatttttaaggtagtggttacctctgaagtttttggaaaagcgggtgctagaactctaacttctaggttacgtgcatacatgcctgggaaggaaggaagacaggaagggatgaagggaggaagggaggaaggagaggatgatatcagatggagaaagaaacagaaatgatgagatgtctactgataagaaaagtaaagttcaggtgaaggctgagagatattttatagtgacctgactcttagtaatcgtaactgctttataatccagttatgtgtcttggtttcctaacaattaayagcaaagaaccccttcagtgggtttttacaaccaatgtaataaaatgattaataaaagacagttccacctagaaaactgaacggtataaacatttatccatctcctctctaaaattccctcagtatcattccctgctccctaaatattccaacagtatttgcttatattttagtacaaaagagtttgttgcctttatcaactcagtaatttcatgtgtcccattctttaaggcataatgaaataactacattggacacattgagaaaaagttttgcattgtcgtatgaatatatcagcattttgcaatattagtatccaaaatgattgaaaatagtttgcttaaaaatgtaactttttaaattggagattctcctcctttaaatataagtatacttgcaattaatatatcttctccatattttttaactttgaggataaccaaatagtttaaatgtagtaattggatattccttgaccttcgtacattgacgtacccctccacatccggattcttctctcttcttttactctccaggtgctccacatgatgcaaggcctggtccaagtccccacacccacctcagactgaaataacctttttgtgatcagaaggctaattagtatgtattacaactattacacatttggtcttaggcatgtgctgcatagagataccctttctgctgtcatcttcaactactatataattctggtgggttttaattttagtgttcatatctcatcttcctcaataca

SEQ ID NO: 61149 - DNA, 974 bp, Homo sapiens
gatccaatcactcttgggttttctattatttgcagccaaaagattttctgatagcaaaagttagagttactcccttgggcaaaaagcaaagggaacatggaagaggtgaagaagagagttataaatggtagctacagccttaggatcagttgtagaaataaggggattgtccctccctctttttcaggtgaattttccactctctgctaaagtatctgacaattgaataacactactccattccctctttcatttttttaaaaaacaaaatagatgttattattttctktattgccagcttaaaaattctctgttcaccttccaccatatttgtcaggtgtgttggttgtgtctccattcaccatttgccccgagtttgcagaatagagaggacctatcgttagaaagggttgcagaaggaacactggaggagtattatcagaagatcatgggcttgctgcagaaagtcaacttttcaagggtccacatgacttagccattgcacatagtacctgcagaacacatgtctttggttgccttcttgctgggagcaagtgagttgtgtatagctgtgtaatactcattacaatgaataggatgtattgaaagctgttaagaaagaagggtatgttgcaggtatataagcaaggagtggaatatctgtcatggggcctgccgtgttcagcattctctctgagctgaaactccttggcctcaatagtatctgcgtacatgtgtgaaatggtggttcacaataataggaggcatagtcagtctacagtaagtgcttggtgcacatatggtttcttagacccctgaaatatcttcatagcccccaggaactgggaaccactggttgacgtactctgccttcagtatcagatttaattagctgcatttgtcccgcacaccaacagagtaggaaggggatgcaatgttcagggaaataatcctgctcttccaggattgtttgg

SEQ ID NO: 61150 - DNA, 974 bp, Homo sapiens
gatccaatcactcttgggttttctattatttgcagccaaaagattttctgatagcaaaagttagagttactcccttgggcaaaaagcaaagggaacatggaagaggtgaagaagagagttataaatggtagctacagccttaggatcagttgtagaaataaggggattgtccctccctctttttcaggtgaattttccactctctgctaaagtatctgacaattgaataacactactccattccctctttcatttttttaaaaaacaaaatagatgttattattttctttattgccagcttaaaaattctctgttcaccttccaccatatttgtcaggtgtgttggttgtgtstccattcaccatttgccccgagtttgcagaatagagaggacctatcgttagaaagggttgcagaaggaacactggaggagtattatcagaagatcatgggcttgctgcagaaagtcaacttttcaagggtccacatgacttagccattgcacatagtacctgcagaacacatgtctttggttgccttcttgctgggagcaagtgagttgtgtatagctgtgtaatactcattacaatgaataggatgtattgaaagctgttaagaaagaagggtatgttgcaggtatataagcaaggagtggaatatctgtcatggggcctgccgtgttcagcattctctctgagctgaaactccttggcctcaatagtatctgcgtacatgtgtgaaatggtggttcacaataataggaggcatagtcagtctacagtaagtgcttggtgcacatatggtttcttagacccctgaaatatcttcatagcccccaggaactgggaaccactggttgacgtactctgccttcagtatcagatttaattagctgcatttgtcccgcacaccaacagagtaggaaggggatgcaatgttcagggaaataatcctgctcttccaggattgtttgg

SEQ ID NO: 61151 - DNA, 558 bp, Homo sapiens
tagtgcatttactgaagcygtcctccctcctgaagtggggcatacacgaggccaggagaaggggttaaagccaaccaagtccagggagaaacccctagatttcctgcaggatttgcacaggaacgtgttgcaaggtgtctcctccgagaattcactgagtcccttcaggagacccacagagcatagaatgggcccccagactttggagcagcacccggctcctactgtctccctaggagaccgtgggtcccaccagcttttattttctattcagcaacactattgcctatgtttatggataggactgtgttgagcaagagttgacctttattatcttaattcaatcttcccaaagaccttctgagataggtacttttattttcttcattttacagataaggaaattgaggtttaactatgatcccatagctaataaaagtgacagaaccgggtttttttctttttactgaaatggtattatttcatcagaatttgcccacatgctcaacactgctggaatgtgttattttgaaatctgacaatgaactacagaatggt

SEQ ID NO: 61152 - DNA, 558 bp, Homo sapiens
tagtgcatttactgaagctgtcctccctcctgaartggggcatacacgaggccaggagaaggggttaaagccaaccaagtccagggagaaacccctagatttcctgcaggatttgcacaggaacgtgttgcaaggtgtctcctccgagaattcactgagtcccttcaggagacccacagagcatagaatgggcccccagactttggagcagcacccggctcctactgtctccctaggagaccgtgggtcccaccagcttttattttctattcagcaacactattgcctatgtttatggataggactgtgttgagcaagagttgacctttattatcttaattcaatcttcccaaagaccttctgagataggtacttttattttcttcattttacagataaggaaattgaggtttaactatgatcccatagctaataaaagtgacagaaccgggtttttttctttttactgaaatggtattatttcatcagaatttgcccacatgctcaacactgctggaatgtgttattttgaaatctgacaatgaactacagaatggt

SEQ ID NO: 61153 - DNA, 558 bp, Homo sapiens
tagtgcatttactgaagctgtcctccctcctgaagtggggcatacacgaggccaggagaaggggttaaagccaaccaagtccagggagaaacccctagatttcctgcaggatttgcacaggaacgtgttgcaaggygtctcctccgagaattcactgagtcccttcaggagacccacagagcatagaatgggcccccagactttggagcagcacccggctcctactgtctccctaggagaccgtgggtcccaccagcttttattttctattcagcaacactattgcctatgtttatggataggactgtgttgagcaagagttgacctttattatcttaattcaatcttcccaaagaccttctgagataggtacttttattttcttcattttacagataaggaaattgaggtttaactatgatcccatagctaataaaagtgacagaaccgggtttttttctttttactgaaatggtattatttcatcagaatttgcccacatgctcaacactgctggaatgtgttattttgaaatctgacaatgaactacagaatggt

SEQ ID NO: 61154 - DNA, 558 bp, Homo sapiens
tagtgcatttactgaagctgtcctccctcctgaagtggggcatacacgaggccaggagaaggggttaaagccaaccaagtccagggagaaacccctagatttcctgcaggatttgcacaggaacgtgttgcaaggtgtctcctccgagaattcactgagtcccttcaggagacccacagagcatagaatgggcccccagactttggagcagcacccggctcctactgtctccctaggagaccktgggtcccaccagcttttattttctattcagcaacactattgcctatgtttatggataggactgtgttgagcaagagttgacctttattatcttaattcaatcttcccaaagaccttctgagataggtacttttattttcttcattttacagataaggaaattgaggtttaactatgatcccatagctaataaaagtgacagaaccgggtttttttctttttactgaaatggtattatttcatcagaatttgcccacatgctcaacactgctggaatgtgttattttgaaatctgacaatgaactacagaatggt

SEQ ID NO: 61155 - DNA, 564 bp, Homo sapiens
gtggaaccccgtctttattaaaatacaaaaaataagcgggcatggtggcaggtgctccaaatcccagctattcgggaggctgaggcaggaggctcacttaaacccccaggaggcggaggtcacagtgagccaagattgtgccactgtactctagcctgggcagcagagcaagactctaactcaaaaacaacaacaacatcaacaaaaactccacaaaattagcccagacatggtggcacacgcatgtagtcccagcttctcaagaggctgaggtgggaggcttgcttgaacctgggaggcagaggttgcagtgagtcragatggtgccactgcactccagcctgggcaatagagggagaccctgcctcaaaaaaaaaaaaaaaaaacaaaaaaaagtattaccacaaaagtattgacaggaataccagcatctttgttctatcagattttgcagagatgaactgtgccagtttaaaccttgtgaatacagttaatgctatatttatattagtaaatgcacagtatttacaaagtaaatattaattttacaaatgattgaggatc

SEQ ID NO: 61156 - DNA, 1783 bp, Homo sapiens
tggacaatttaataaagtttaaatagtttatttattatgataatttaatatagtttaaagatctatgaaacatgtccatattggatcaatctaattcccattattatcctcattcaacttcctatcattcttgttatctggagaatgcttgcatttcttactcttttctgcgaaaattatcctgataggtattttaaaaatagaaaaaataaaaagcaaaacttgttatataacagaatagtaaaaaggtttccgaagtcataacattataattaggttaataataataatgatcataaaattaatacctgcaaaacatatattttcctattattaaatctatctttaaagaagcaattgggatgggggctgtggttgatgcctgtaattccaacactttgggaggctgaggtgggtggatcacttgaggtcaggagttcaagactggcctggcccacatagtgaaaccccgtctctactaaaaaaatacaaaaattagccgggcatggtggcacatgcctgtagtcccagctactcaggaggctgaggcattgagaatggcttgaaccctggaggcagaggttgcagtgagccaagatcgtgctattgcactccagcctgggtgacagagcaagaatccgtctcaaaaaataaaataaaataaaaaattaaatacaaataaataaaaatacaaaagaagccactgtatttagtgaattattccaaatttgctgaaacaatcatctatatattattacttataattgcacaattttaactagagtgagtcaaatgaaaattatattttttgcatatttgacttgctttatatttgtactacaggaaaatagacccccaaaattttcacttatatttttcctagtttacaaattaaaattgaaggttattcaaaggagaacagcttctaggaagaaaggtttyctagttaaatcagaacagcctcttccaaaaacccaggaccagaggcaattccaatatagtcagtaaaaccacatctggagccatgaggagagacaaatgctatagcaagtaatgtctcctgcagccaatgctttgctctgtcactatcttccaaagaagagaagaatttaaaagaaaagccttaagttcctccctttttcttacaaatcagcaatgatgggatattgtgatcaaaatactgccagaaaataacaaagtaatattctcaattcgatttatttttagggttcctcctttgttcattattgtgattacaattattgggagttaaatttcccttactgccttcaaggaagccttcacattctcatcaaagataatgtttgagcaggaattgataaagaaaaaaaataaaccaaagacaataggatcaattactttgtgataaattttactttatggaatcatatggcttaaaaattatcttcaatttatatcaattttttaatacaaagttattgctattgtcaattcaagaatatagagatatccaggtcttggagctatgcctctactaccattcatttaaataattagtggtgatctaaattgtgtagtgcagcatattatttttctgctttgcctcaggaaactatgagctgggtaggaaggaagatcccagtctacctgcagcagagctactgcgacaggacaaagtggtgatatcacacagtgctatggcctgactatttctgccctctcatgattaatatacaattctaaccccaaaagtgatggcattaacaggggcaggcccttttggagattattaggttgtaag

SEQ ID NO: 61157 - DNA, 643 bp, Homo sapiens
tcaaaaaataaaaataatccctccttcacagagctcaactaggggatgttaatgcagagacgtattttatgtatcagtttctcttaatagatttccactgttttcattataaaaataaagtcctaaggaataggaaagatgaaacatgtgactatgctgcattttagtcaccatcaaattggyaatgacacttaccggtcctggcaaatgtgaacccaaggtgctaagaagtacaacagtaatttgtgtttcctttagatttttctccattagtttttctagtcccctctcccctcatcaaaagctttcattctgagagtgaataaagcattcttcagcaactgttgtagcttactcctagacagtttgattagttctaaacttggcgcgcttcgtgctatcctgttgttctgatctgtgcatgtgaaagaggaagcagggactagtgtggaactggaaaagctgacaaacaatacagagtgcctcatgcatttctataaaacccattatttacagttagggtttttggaaaggaaaaaaagcaaagcaaaactctagaataactattttagcctaatgctatttggtcatttgtgatgtttgagttagccaacaaatggggagggcagcaaaaaggagaaac

SEQ ID NO: 61158 - DNA, 671 bp, Homo sapiens
tgcatttctggcagatgtcaccaacatgcagaatttatgaatgccagctgtctgggccttatctagatttcctttgttgacaaactgatacaccaaagctctgctagggtctgtatgcrgtgattcacaccagggttcaaaacgggttcaggacaggacagggtagaccctgaagacgaaactataccagctaattaatccttgtactctgagaactcatttatttctgaaaaaaatctgtgaaggcagcaatgtcctaggcactaaagattcaaagcaaaaaagatacagttactgcccttaggagctgacaattgtaaagtcagcttgcaagcacctacttgctgtaacagtgctacagtaaatgctagggcatggaagggacagaatcccttctatggtcaaaggaaagctgtctgcagtatctgtacacagagaccaccaatgtgctaggtcttcagggatgacttcatcaagaagagactggggtgggagcagggagcagactgaataattctttaaaagaaggatttagaggagtggttttgatggagatagaggggttgctcttgattttacataagacactaatgtcttaaatgcaatatgtttcaaagtgatgttttggccctgttctctagtctccataaacctttctactcccagtaaat

SEQ ID NO: 61159 - DNA, 671 bp, Homo sapiens
tgcatttctggcagatgtcaccaacatgcagaatttatgaatgccagctgtctgggccttatctagatttcctttgttgacaaactgatacaccaaagctctgctagggtctgtatgcggtgattcacaccagggttcaaaacgggttcaggacaggacagggtagaccctgaagacgaaactataccagctaattaatccttgtrctctgagaactcatttatttctgaaaaaaatctgtgaaggcagcaatgtcctaggcactaaagattcaaagcaaaaaagatacagttactgcccttaggagctgacaattgtaaagtcagcttgcaagcacctacttgctgtaacagtgctacagtaaatgctagggcatggaagggacagaatcccttctatggtcaaaggaaagctgtctgcagtatctgtacacagagaccaccaatgtgctaggtcttcagggatgacttcatcaagaagagactggggtgggagcagggagcagactgaataattctttaaaagaaggatttagaggagtggttttgatggagatagaggggttgctcttgattttacataagacactaatgtcttaaatgcaatatgtttcaaagtgatgttttggccctgttctctagtctccataaacctttctactcccagtaaat

SEQ ID NO: 61160 - DNA, 1481 bp, Homo sapiens
tcccgactgccctgcttcaaggtggcaagcatgctcgagagatgttctatattctacagacagcttgtgggcagaactgttcaacagaaggtacccttagtgcaaacacatttgctaaaatacagctatccaatctgccttttacggtttttttttaaagcaaattgaattacatctttcataactgcctgtgacaggctgaagtgcagcccacagatttcatatatgcctctaacaactattgcattactcgtatccaatgacttctttgtttgaggtttgatagggtttggattttttttgaggggggggttgttttgacttttatttctttgcttttgaggtatgtgggctttttgttgttttgtttttatctttttgtaggttggtttatttaastgggccttttccaatggaaaaagaaattaaaatgtatttcagcccctctgttttgcagcggtagtaccattcatgcaccaaaagccccatcaggagagtcccctggctgtcgtccataagaggaagggcaggaaatggaacctagatatatagccagtcagcctcccccgcaagccgaatagaggaagcagatggaagcatgcaggatagaccctgggagccaacctttaaattccttgaaagaaagcaagcaagcacgccaggctgcaaaaggaaagggcaaaacagccctatggcccttgacaaaccagcagggagaggcgctggagaggaaatgagtgccgaggaccaggaaacaaaacaggctgttgctaaaacagaggggagagtgtgtgtcgcccaatccgacactgggttgagctaaagctgacttcccacgcttctctgtgggaggcaggggatccaggagagagtcggtctgggggaatcatttccttccccatggcactgcctggataggatgggcaggaacctgcctctcccccccaggaatggctgtacttgggaaaagcatttagaaagttccacagcggttttaacaaggcacagaaaaagaacgccccatggcccgcagtcaaacctctatagagagtcctctgaacttccaaaaaagcaaagagctgttttctacgtgtttcatttgatgaaatgatggtggaacatttttgttttacttacttggtattaatcatgccatcgtgtacatgggcatcctcacagcaagctttcacttctttcttcattgctactcaacatatttgaaatgaaacttcttctgatccatgaaaggggtctccatttctttatcttcttagtaattttcagctcattaagatattatctgatgcagtttcttctttcttggcaccacaaagggttgcacgtagtcatggtctggttttctgtacagtcacctttaatgatttcttcacttccacccccagagtcacagaaagtgcaattcagttcttacacgtgcccttagtgccaggtgtccagagacatgtgcaatagtgattttt

SEQ ID NO: 61161 - DNA, 579 bp, Homo sapiens
cccactacctgggtgtgaccatggcctgacctctaggaacttccttattttatctgataaatgagactcactaatactcacttcatcgggaacaataaggtttctggattcataaaccacaatgcagcacacaacattaggtgctttattgttgtaattattgtaattactatagatcctgaaatcagcttcctctctatattgctcataaaccaaacaactggaaatcatgggagtttttttattctgatgtttaggctgaagactgggaaacatccaaacctctagtccatgtgagcctcaattagtatgagaaaactggtggataggttatcatgtgagattctaattatgagtgaggatgagctctgttacagttgaagttactttgccatttcaactttcagtcattccgattcttctctttcaccraacagggtacattcaaaacctttagaccttgtaaaataaaaatttgaaggtgagactttttccctaggaaagctggctcacattttatatattgtatattgggccaagcctctaatattttctttgaggatctggaaacctttaatg

SEQ ID NO: 61162 - DNA, 770 bp, Homo sapiens
ggatccaggcctcatcacttattagatgtgcaactttgggtaaataacttaacctctctgaaccactgtcctcctcttgatcaaatggggataacatgaaacaaacttatcatattagctgtataataaaaataaatgatgcacaaaaagctgttatcttgtttgcttgtttttgtttgtttgttttgagaaagagtctctgtcacccagattactgtgcagtgcctcagcctcccaagtagctgggattataggtgccgactaccatgcctagctaatttttgtatttttagtagagacagggtttcaccatgttggccaggctggaactcgaactcctgacctcatgtgatgcacctgcctcagcttcccaaagtgttgggattacaggtgtgagccaccacacctggcccattaccattattattgttgttttcacaaaggcaccagaatccttgaggtgaatatagatgtcagacttgctctaaaataaatctggctgctttaggagcatttctgaggctaggaaatgactgaaaaattgggctacttgggtcatgataggacataygaaatctcctataccccctgtctccaatttcctccctgagcaagaacagaaattgccttcaaaagtcagtggggatagacccatgtggtagaaaacgatacagccaatccttttaaaggaccacccctgttgtggaattgattaggagacacattctaatgaactgttgagcgattacagctcaaaggaagccagccct

SEQ ID NO: 61163 - DNA, 682 bp, Homo sapiens
cttgagccagaacccagttggctctttgcatcctttggtaactccaatgagaggggagagattaggttgtgttccttctttaaaaaattggactgagatcatctttttgacctcgagcagtggggtgttggtgaccacaccacctcaggctagatgctcaggcttcagcacttaaacagtttcaccattcttcctctaatacttcctgccctggtgaccagattggcggggctgccctgaggtcaacttggctcttcactgtttcagcctcacagtgcatgcactcttctcagatcatatctcctagtgcctaggaggttggtctctgcctgacctttgagaaacctggctctgtacactactgcttcagagaagggtttgccatccttaaggtcctctgagcatggcagagtygtggagtcttctgcttcctgacacccatggagatgccactcttgaacagtgtctgtgccaagatgttggtttaagctacctccctcgctcccttttcctagatctcagccctcacctctccaggattcctgtcccatcttacttcccactcagggaccctttggcattctctgacaccctcccaaacactccctttgctcctccccagcccattgggccacacagcctttcttggtatttattcccagccagttctgagcttcctgga

SEQ ID NO: 61164 - DNA, 1499 bp, Homo sapiens
aaacattaatttttagagagtacaatctaaaagcattcttgggctgggtacggtggctcacccctgtaatcccagcactttgggaggccaaagtaggaggattgcttgagcccaggagttaaagaccagactgagcaacatagtaagaccccatctctacaaaaaactgaaaaattagccaggtgtggtggcatgtgcctgtagtcctggctacttgggagactgaggtgggaggaccacttgagcctgggaggtcgaggctgcagtgagctgtgactgcgccactgcactccagctgagcaacagagcaagaccctgtctcaaaacaaaaccaaccgaccgaccaaccaaccaaccaaccaaacaaagcatgtatctgcatgcttgtctgagggactgtggatgagcgggtgggtagagagcttaaccctcttgaacttamactctcctcttgagcatcagtggtgggagttccagaaaggtactgcagctgggctgaggctagatgaagacaccatcttagtaaaaggctgtggggcatcctgaccagatggggacagtttggggaaatattttgagccaccactcaaagaatggcagcagtcccccgctttgcaggtctctctcctctttgaggtcccatttttctgctacatagtcataagacctatttatgctctggcagccttttgcaaagttctctcttacccaccatctctttggggaggacatgaggtaggcctgaagatcagagaggataaatgaagtggctaaggttacccaacaagtaagtggtgagtggcagaaacaggattcacagccagttctctgtgtgtgttcaggacttgttgcaccttatcgaatccatcctcgttcctctttgctgccagtcatgcatgatcattgaaaacacccagcattcagaaaacattaaaaaattatttttaaaaatttcatttcactcttgcatggtcataatgcttactctagaccaggatcaaaaataacagagttcaataaagaatataggtgggaagaaaaaacatattgataattcattgagggacatcagtgtgatcagtgtcactattaactttttatcaattttataaaagcagcaagatttaaattaagtgaattatccagagtatatacaaccaaggagggtgcagccaggatgtgaacataggggtgctgataaaagccctggcgtcctgcagaaccctggtggggggcagagagcttacccctctgctattccgccccttccccaaggttgttgtgggcatcaaaacagaccaagtacctacaagtcagctcctactggaccctcaaattcacagagcacctcttttcagctcaccctgtgtttcatttatctccttaattctccttttgtttttctacagtgtctgcctaggtcatgggttggattgacaggtaaaatataggatgccctaataaaattaaatttaacataaataacgaataacatttct

SEQ ID NO: 61165 - DNA, 879 bp, Homo sapiens
ccagccctgctatttatcagyagtgtgatcttgggaagtaatctaatctctttgtttccccatctcctcactgtgaaatgggatagtaatattgcatatctcagagggtcattgtgaggattaatttaattcgtacacatgaaaggcttactactgtctaacaaaaatcaattctgttagaaatcactagagtagctaccctccagggccagggtgggaaggaggtagaaggcagtagtttttgtttttcttgtttttttctttttttttaaatagagttcaggaattagcaaatatttctgggagaatttatttatttattgacagggtcccgctttgtcacccaggctagagtgcagtggcgtgatcttggctcactcttggctgttctcctggacaggtagagcagcctctacctgtcctggagaactttagactttcaaaggcaatagaattggtagggtccaaactcagatttctaaggaacaaagggggacctaggtaatacctgggttataagttgaaaaaacagaaaattgcactaaaattatatatacatagtcaattttcattatctgctgtagttataatctataaaattgctgagaacactgaattagtgaccactgaaccatttcttctgcggaaaatgcagagttaggtccctacaatcccatagtcataacattttcataaaccaatcaatacataacatagttttatatgtgtttctgttcaaaaacaccttatttaatatatattgttggttctttaacattgaactcccagctgacagcattatagcttgtgtctgcacaaagcctacctaacccctgtattttctctgttaaggcacgtcacagcctgtgctcaggagca

SEQ ID NO: 61166 - DNA, 797 bp, Homo sapiens
gtaacctagcttaatagtcagataaaactgaaaacctaacttagtggtgtgcacctgtaacaatagcggagtgctggccaatcacaggggccatacttcaaccactgatagactactgaatgttcaaactgcattcaaataaggcaaatgccaagtgtaaccaatttcactcgttctgtacttcacttctgattcctgtacgtcactttacctttttggtctataaatttgttcagaccaygaggcacccctggagtctctgtgaatctgctgtgattctggcgcctgcccaattcgcgaatcattcattctcaattaaactcctttaaacttaatttggctgaagtttttcttttatcaaagtctaaacatagagccatcatttctaatgaacatttaatatgcaaattgagatgttctataaatataaaatatataccagatttcagagacctaaaagaatgtaaaatatctaattaatacctaacaaatatgattacatgttaaaatggcaatattttggatatattgagttaaactaaatatcttttaaaagttaatttcattaaaaaaattttaaaatatggctactagaaaattttaaattacatacattatatttatagtgaatagtactgaactaggatcttatttgcccctgctcaccttgtttatgattatggcaccaggcagtagaaacacaggtgtctactcatgagtcatggacctgacctgctgagactccacaggccttctccaacgctcttagccattgaatatgaccagtctttttcttg

SEQ ID NO: 61167 - DNA, 797 bp, Homo sapiens
gtaacctagcttaatagtcagataaaactgaaaacctaacttagtggtgtgcacctgtaacaatagcggagtgctggccaatcacaggggccatacttcaaccactgatagactactgaatgttcaaactgcattcaaataaggcaaatgccaagtgtaaccaatttcactcgttctgtacttcacttctgattcctgtacgtcactttacctttttggtctataaatttgttcagaccacgaggcacccctggagtctctgtgaatctgctgtgattctggcgcctgcccaattcgcgaatcattcattctcaattaaactcctttaaacttaatttggctgaagtttttcttttatcaaagtctaaacatagagccatcatttctaatgaacatttaatatgcaaattgagatgttctataaatataaaatatataccagatttcagagacctaaaagaatgtaaaatatctaattaatacctaacaaatatgattacatgttaaaatggcaatattttggatatattgagttaaactaaatatcttttaaaagttaatttcattaaaaaaawtttaaaatatggctactagaaaattttaaattacatacattatatttatagtgaatagtactgaactaggatcttatttgcccctgctcaccttgtttatgattatggcaccaggcagtagaaacacaggtgtctactcatgagtcatggacctgacctgctgagactccacaggccttctccaacgctcttagccattgaatatgaccagtctttttcttg

SEQ ID NO: 61168 - DNA, 797 bp, Homo sapiens
gtaacctagcttaatagtcagataaaactgaaaacctaacttagtggtgtgcacctgtaacaatagcggagtgctggccaatcacaggggccatacttcaaccactgatagactactgaatgttcaaactgcattcaaataaggcaaatgccaagtgtaaccaatttcactcgttctgtacttcacttctgattcctgtacgtcactttacctttttggtctataaatttgttcagaccacgaggcacccctggagtctctgtgaatctgctgtgattctggcgcctgcccaattcgcgaatcattcattctcaattaaactcctttaaacttaatttggctgaagtttttcttttatcaaagtctaaacatagagccatcatttctaatgaacatttaatatgcaaattgagatgttctataaatataaaatatataccagatttcagagacctaaaagaatgtaaaatatctaattaatacctaacaaatatgattacatgttaaaatggcaatattttggatatattgagttaaactaaatatcttttaaaagttaatttcattaaaaaaattttaaaatatggctactagaaaattttaaattacatacattatatttatagtgaatagtactgaactaggatcttatttgcccctgctcaccttgtttatgattatggcaccaggcagtagaaacacaggtgtctactcatgagtcatggacctgacctgctgagactccacaggccttctccaacgctcttagccrttgaatatgaccagtctttttcttg

SEQ ID NO: 61169 - DNA, 632 bp, Homo sapiens
ttcactcaatgtgctcgcttaagcaaataataagaaaaatatatttgaaaagggaagacaaagtttgatcataaatatattctttctgaacttctgctttctggtcatgtaattcactttggggattacaaaggaaaagtgaaagtagagtcaaattattaagtaatgcgttattaaggaagtcagatgtgtcaggttggggatgttctggcacaaagttaaaaaataacttatgtcctggtcctggtgctggtaccaattgactgtgtgatatttggcaaaacgcttaggtctataattttttcagctataaaaaaagatattcaataataaaaactttaagatttcttcttgttctaaaattctatgrttataaaatacataaataatggctgaatttagagaaaattcattctttcctcttttattcaagcattatccatcattcttcaaccattgtcaatttttcatgtgtacttatattttattaatctattgcacatgtgaacctatctcaaagcctgtttaagaggaagcagcatatgaataaatatttactatatggtatttaactgtaatacagaataaataaaaccaaatataataataaccattattgtcttagtaaaatg

SEQ ID NO: 61170 - DNA, 632 bp, Homo sapiens
ttcactcaatgtgctcgcttaagcaaataataagaaaaatatatttgaaaagggaagacaaagtttgatcataaatatattctttctgaacttctgctttctggtcatgtaattcactttggggattacaaaggaaaagtgaaagtagagtcaaattattaagtaatgcgttattaaggaagtcagatgtgtcaggttggggatgttctggcacaaagttaaaaaataacttatgtcctggtcctggtgctggtaccaattgactgtgtgatatttggcaaaacgcttaggtctataattttttcagctataaaaaaagatattcaataataaaaactttaagatttcttcttgttctaaaattctatgattataaaatacataaataatggctgaatttagagaaaattcattctttcctcttttattcaagcattatccatcattcttcaaccattgtcaatttttcatgtgtacttatattttattaatctattgcacatgtgarcctatctcaaagcctgtttaagaggaagcagcatatgaataaatatttactatatggtatttaactgtaatacagaataaataaaaccaaatataataataaccattattgtcttagtaaaatg

SEQ ID NO: 61171 - DNA, 1969 bp, Homo sapiens
agtagtcagtatgttagcattctcagaagctggtgtttctgatacctttagtcaggttactgacctatccctgattccgtgagtccaaagcaaaagaaaggtgtaagagtgtaagggaaagaacctgacaggctacaaagcatatttattcaccacatgagtatgttctctgtactcatttgtgaaactttccatctcttttgaagtcagtgaaatatttcattcccaacagtttacagaaaccatgttcttcatctcaccaccaccatcttttcaactacattctttatctgaccaccaacttcctttgctaaacacacatatttttattcctattaattctagtcctttcttccataaaactcagataaataaagttggtttcagaaagttattttaaaaaataaaataaaactttctctcctatttttcttctatcaacttatatttaccagtttttctttcctagcctggcccattaatgcagatattacacaaggcgttttattttaacctgacccctccactgcctccttggctctttcctaattacctgaaatctccagctttggggacaactggatcccctttcattaccctggatggaggctggtttgggtggcctcacaaggccccagttgcctttacatatcttggtagtgattcaattgtctttctggaaaatactaatttcagttcactaattttaacccatctactttctcttgcagatacaaagagaatgtgcagggagaaagcagagttttctttaatcctggagctgtggatgatggacagagaagctgactgctttctctctgcaaactttctgaaaaagccccggtccctcctccctgcagtccctgcagcccctctctttaccctcccaaaacctttagtgctcatgatttatccagctcatgtaggtactattcacagtaaccaaaatctcccaccattattaacacaaaaggaaaagaggataaatccattccccacccatacccctctcagagcaagacagccaccccaaacatcccttaatctccagaattttcccactagtgataatgaatagttaagatcaacctttgggtgcatattcctaacctcatttcccaagtgtaactgactgatttgaaacattttctaaagccaaaaacttgcacttgaatttgcagataatttgctggatatacctcgtggtcctcagtaccatatctgagagtaaatcacgcagtaaagtaattagccattgtgaaaaatgggggtggtagctgcttgttattagggattctatcaatttgagatctctctctcatatatgcatgtataatgtactatatatataataatggaagtaaactacatattaagcaacatataatgcatatattcatgtacatgtataatatgcatatatattatacataactaaatacatagatatatcgatatgtagatagatacctacctctgcctcttcctatttctcattttttttctcactgtgtcatcactctgttgctcaggctgaagttcagtgccgctatctctatcactgcaaattctgcctcccacgttcaagctattctcatgcctccgcctcctgactagctgagagtacaggcatgtgtcaacacaccctgctgatttttgtatttttagtagagagggggtttcaycttgttggccaggctggtctcgaacttcttgcctcaggcaatccgtctgcctaggccacccaaagtgctgggattgtaggtgtgagccaccacgctggcttataatacattcttgggtgaggtattatgggacaagggcaggcagaaaggcttttaggtgggggttcgggagggatattgcagggaccaagaggggtgcttggaggaggagaggattaggacatactccagaaattgaccttcaggaataacttgaggtggccaggcacagtgatggagctgga

SEQ ID NO: 61172 - DNA, 1969 bp, Homo sapiens
agtagtcagtatgttagcattctcagaagctggtgtttctgatacctttagtcaggttactgacctatccctgattccgtgagtccaaagcaaaagaaaggtgtaagagtgtaagggaaagaacctgacaggctacaaagcatatttattcaccacatgagtatgttctctgtactcatttgtgaaactttccatctcttttgaagtcagtgaaatatttcattcccaacagtttacagaaaccatgttcttcatctcaccaccaccatcttttcaactacattctttatctgaccaccaacttcctttgctaaacacacatatttttattcctattaattctagtcctttcttccataaaactcagataaataaagttggtttcagaaagttattttaaaaaataaaataaaactttctctcctatttttcttctatcaacttatatttaccagtttttctttcctagcctggcccattaatgcagatattacacaaggcgttttattttaacctgacccctccactgcctccttggctctttcctaattacctgaaatctccagctttggggacaactggatcccctttcattaccctggatggaggctggtttgggtggcctcacaaggccccagttgcctttacatatcttggtagtgattcaattgtctttctggaaaatactaatttcagttcactaattttaacccatctactttctcttgcagatacaaagagaatgtgcagggagaaagcagagttttctttaatcctggagctgtggatgatggacagagaagctgactgctttctctctgcaaactttctgaaaaagccccggtccctcctccctgcagtccctgcagcccctctctttaccctcccaaaacctttagtgctcatgatttatccagctcatgtaggtactattcacagtaaccaaaatctcccaccattattaacacaaaaggaaaagaggataaatccattccccacccatacccctctcagagcaagacagccaccccaaacatcccttaatctccagaattttcccactagtgataatgaatagttaagatcaacctttgggtgcatattcctaacctcatttcccaagtgtaactgactgatttgaaacattttctaaagccaaaaacttgcacttgaatttgcagataatttgctggatatacctcgtggtcctcagtaccatatctgagagtaaatcacgcagtaaagtaattagccattgtgaaaaatgggggtggtagctgcttgttattagggattctatcaatttgagatctctctctcatatatgcatgtataatgtactatatatataataatggaagtaaactacatattaagcaacatataatgcatatattcatgtacatgtataatatgcatatatattatacataactaaatacatagatatatcgatatgtagatagatacctacctctgcctcttcctatttctcattttttttctcactgtgtcatcactctgttgctcaggctgaagttcagtgccgctatctctatcactgcaaattctgcctcccacgttcaagctattctcatgcctccgcctcctgactagctgagagtacaggcatgtgtcaacacaccctgctgatttttgtatttttagtagagagggggtttcatcttgttggccaggctggtctcgaacttcttgcctcaggcaatcygtctgcctaggccacccaaagtgctgggattgtaggtgtgagccaccacgctggcttataatacattcttgggtgaggtattatgggacaagggcaggcagaaaggcttttaggtgggggttcgggagggatattgcagggaccaagaggggtgcttggaggaggagaggattaggacatactccagaaattgaccttcaggaataacttgaggtggccaggcacagtgatggagctgga

SEQ ID NO: 61173 - DNA, 546 bp, Homo sapiens
cccaagtgttctgtcctgtcctctgaatccgcctccaagtcgcaagacgccgtgagttccaagtccacgcagagtccgccaaaggctccggccgctgatccgctccgygaagatctgagtacaggccagccagcgtgggtttaaatagcctcgggcgcaacctagcagcggaaagggcggagcttcactcctcctttccgtcagtcacccccaactttcccaggctacacctcgtaggaaactgttctcctactttgatttcatgcgccacctttggaacaatctaagaacttccaagttttcttggccagatatattaggaattgtatgcactgaaacactgaaaaccaactagtggttctgtggttcccacgttgtggttttgacgccagcagcatccttgccacaatcaaaccccggagatccacagatctgtgttgtaacaagacctccccctgaccctgatgcatggcagtttaagaagtctttccgtgtaagcgaaaagactttgaagaaaaggtggagatatgcgttgtataaacattc

SEQ ID NO: 61174 - DNA, 722 bp, Homo sapiens
cctatagaggctctaatgctctaaggtgacagtgatgaggacctgggtgcacccatgagtggagaagctaggcctgtccagagaagcaagacaaacacacacatacacgcgcrcacacacacaggcacacatgcgtacacaaacacattgtatatacacatgtcagttcaggggatagaggacactgactctgagccctgttgacccaagcaggctcccgttgtggtgggttgtcaacccacaacatcactcttcctgagtccccatcgcctctgtgttgtggagaagttagagacacacagcagtgtctgtgagtagctctgcatgaaggaccattttctagatgacagacacatctcaacacagctcactgatcagactcaggtgagtgggacctgctctcctcacttcctcctggcttggggacagtcactatcaggtgggtggttttggcctctggacagctactgagggtaatccctgaacactcaccgggtgcctgttttgtgctgacagtcgtctcattcatcctcacagcaattccattctgcatttttctcatcacccccctgaccacccaggacaaccccatcagggccctgtcaccaggcccagtccagctccatgataaccaagacacaggtccagagactaccgtcctgcatcgtgcctgcatctgatcccccttggtgggtagtgaccagcacaacatggaagaagcc

SEQ ID NO: 61175 - DNA, 722 bp, Homo sapiens
cctatagaggctctaatgctctaaggtgacagtgatgaggacctgggtgcacccatgagtggagaagctaggcctgtccagagaagcaagacaaacacacacatacacgcgcacacacacacaggcacacatgcgtacacaaacacattgtatatacacatgtcagttcargggatagaggacactgactctgagccctgttgacccaagcaggctcccgttgtggtgggttgtcaacccacaacatcactcttcctgagtccccatcgcctctgtgttgtggagaagttagagacacacagcagtgtctgtgagtagctctgcatgaaggaccattttctagatgacagacacatctcaacacagctcactgatcagactcaggtgagtgggacctgctctcctcacttcctcctggcttggggacagtcactatcaggtgggtggttttggcctctggacagctactgagggtaatccctgaacactcaccgggtgcctgttttgtgctgacagtcgtctcattcatcctcacagcaattccattctgcatttttctcatcacccccctgaccacccaggacaaccccatcagggccctgtcaccaggcccagtccagctccatgataaccaagacacaggtccagagactaccgtcctgcatcgtgcctgcatctgatcccccttggtgggtagtgaccagcacaacatggaagaagcc

SEQ ID NO: 61176 - DNA, 1061 bp, Homo sapiens
tcaggtatgaggccataaagtatgatgaaataaatttcattaatatattttaaaataaactgattagacaggcaacaacacctgggcacgggtctcctcacctccagcaacacaaacccaatcacgcagctatggggttgcaaaggctgcatagtgacaaacagactgctctgagctgagatttctttacttgtatctgtattctgagaccgggtctcactctgtcactctggctgcaatgcaggggtgcactcatagctaactgcagccgtgacctcctgggctccggggatcctcttgcctcaccctcaccatagctatggctacagatgarcaccaaaacacccagctaattttttttttttttttttgtagaaagaggagccttgctatgttgcccaagctggcctcaaactcccaccctcaagagatctgcccacctcaacaacctaagtaacaggttctacaggaaaataccactatgccgggataattatattttattaatttttatttgcatagacaggaggtcttgctgtgttgcccagggtggtctaaaactcctggactcaaaccattctcccatctctgcctcccaaagtgctgaagctacgggcataagccactgcacctggcccgacttaagatttctgtaatctagcatcccatacttcatataattgggaaaagcagtagtggtttttttttaattacttactatttcaacaagaatcaaccatctctcaccattgccagggccctggtcagaaccattatcatctcccacctggaggttgccacagcatggcctccctgcttctacccaaatcttcccacaatctttctcaactcagctgccatgggatgcttttaaatcagtagacagttcgcgtcacctctctgctcagaacccttcctcatctcccatctcagacagaataaaaaccaaagccccagcaatagcctcccagggcttacacaatctgcactgatctgagtccaacaactccctggcctccttccctacttctctccctctctctactccacagacctctttc

SEQ ID NO: 61177 - DNA, 1061 bp, Homo sapiens
tcaggtatgaggccataaagtatgatgaaataaatttcattaatatattttaaaataaactgattagacaggcaacaacacctgggcacgggtctcctcacctccagcaacacaaacccaatcacgcagctatggggttgcaaaggctgcatagtgacaaacagactgctctgagctgagatttctttacttgtatctgtattctgagaccgggtctcactctgtcactctggctgcaatgcaggggtgcactcatagctaactgcagccgtgacctcctgggctccggggatcctcttgcctcaccctcaccatagctatggctacagatgaacaccaaaacacccagctaattttttttttttttttttgtagaaagaggagccttgctatgttgcccaagctggcctcaaactcccaccctcaagagatctgcccacctcaacaacctaagtaacaggttctacaggaaaataccactatgccgggataattatattttattaatttttatttgcatagacaggaggtcttgctgtgttgcccagggtggtctmaaactcctggactcaaaccattctcccatctctgcctcccaaagtgctgaagctacgggcataagccactgcacctggcccgacttaagatttctgtaatctagcatcccatacttcatataattgggaaaagcagtagtggtttttttttaattacttactatttcaacaagaatcaaccatctctcaccattgccagggccctggtcagaaccattatcatctcccacctggaggttgccacagcatggcctccctgcttctacccaaatcttcccacaatctttctcaactcagctgccatgggatgcttttaaatcagtagacagttcgcgtcacctctctgctcagaacccttcctcatctcccatctcagacagaataaaaaccaaagccccagcaatagcctcccagggcttacacaatctgcactgatctgagtccaacaactccctggcctccttccctacttctctccctctctctactccacagacctctttc

SEQ ID NO: 61178 - DNA, 1061 bp, Homo sapiens
tcaggtatgaggccataaagtatgatgaaataaatttcattaatatattttaaaataaactgattagacaggcaacaacacctgggcacgggtctcctcacctccagcaacacaaacccaatcacgcagctatggggttgcaaaggctgcatagtgacaaacagactgctctgagctgagatttctttacttgtatctgtattctgagaccgggtctcactctgtcactctggctgcaatgcaggggtgcactcatagctaactgcagccgtgacctcctgggctccggggatcctcttgcctcaccctcaccatagctatggctacagatgaacaccaaaacacccagctaattttttttttttttttttgtagaaagaggagccttgctatgttgcccaagctggcctcaaactcccaccctcaagagatctgcccacctcaacaacctaagtaacaggttctacaggaaaataccactatgccgggataattatattttattaatttttatttgcatagacaggaggtcttgctgtgttgcccagggtggtctaaaactcctggactcaaaccattctcccatctctgcctcccaaagtgctgaagctacgggcataagccactgcacctggcccgacttaagatttctgtaatctagcatcccatacttcatataattgggaaaagcagtagtggtttttttttaattacttastatttcaacaagaatcaaccatctctcaccattgccagggccctggtcagaaccattatcatctcccacctggaggttgccacagcatggcctccctgcttctacccaaatcttcccacaatctttctcaactcagctgccatgggatgcttttaaatcagtagacagttcgcgtcacctctctgctcagaacccttcctcatctcccatctcagacagaataaaaaccaaagccccagcaatagcctcccagggcttacacaatctgcactgatctgagtccaacaactccctggcctccttccctacttctctccctctctctactccacagacctctttc

SEQ ID NO: 61179 - DNA, 1369 bp, Homo sapiens
agatctgggaggggacaggagtggaatgatatggtttggatttgtgaccccacccaaatctcatgtcaaattgtaatccctaatattggaggtggggcctggtgggaggtgaatggatcatgggggtggattttccccttgctcttcttgatagtgagtgaattctcatgagatctggctgtttaaaagtgtatagcactcccccttcactctctttctcttgctcccccatgtaagatgtgcctgcttcccctctacaatgattaaaagttttctgaggcctctccagccatgcttcctgtacagccagcagaacagtgtgtcaattaaacctcttttctttataaatgatccagtcttgggtagttctttagagcaatgtaagaatggactaatacaatatcaaattggattatttttgcaatccaatttttcctagcaattaagattgacgggctgggacactgtagttctgggttttattcattcaacaacattcattaacaattatgcagtgggcacctactctgcagtcatgggggatcacagtggtaaataggcgagaactccaatgcgcctttattctagtcacaatctgtaaaaaggccagactctaagcaggacagtggtctgayaggaagattgtggagttctggaaacacaaaacagagctgcctaactcaggcaaagggcaggcaaggtctttctcagaaagctattgaaaaaaatttactgttctgataaaatatgcattacatacaatttgccattttaaccattttaagtgtccagttcagtgcattaagtatgctcatatttttgtgcaaccatcaccaccatccatctgcagaacctttccctcttcccagactgaaactctgtccccgttaaatactattgtaactccccatccctcccccagcccctggcacccctactctacttcctgtctctaggggtctgacaactccagggacctcatacaagcggaatcatacaggaggggcaagatgggatactcaggaggccaggagccagctcctggagggtctggaagccacattaaggtgtcccaaaggcaatgggaagcccctgacagaggtgtgagtaggaggcaacatgtttacactcaagtctcctgaagatgagtatggaggcagatggtgtggcgaagagaagggagccaggcctcaaatgagaggagcctgttgctatcatctgaggagcactaaccatggagatggagaaggatcagccattgagactatgagaagaacccattgaccatgggaagtgacctgaggtctggggtgaagttgtgggatgaggcaaagttgttctcaaactgatctcttgggccactgggtga

SEQ ID NO: 61180 - DNA, 1036 bp, Homo sapiens
aaaaaaataatgaagcgtagaaaactaacatcaaatacttaggtcaccccctggaaaaggagacatacaagcttcatttgtttgatccagctctgaaagggctctgcacacccctgggatgtgaggaatgctgtgctggataactgacccaccctctccaggaggaaygttttattccagttggggttcagtgtctgccctggggctctgacagctcatttatggaacctgcaaagattttagagggaaatatcagttaggtcaatgtttcattccctttgagaatgctcagtggggagagataagggtgtcggattaattacaccagatgctgtatcgggagacatccagcttctgtgcattgccaaaaaaaaaaaaatccttatggtggccttgaatacaaatatacaaatatcacgttcatggtaataacactgtatttacagtgcatttaagaggtgttcaaaggcttctcatagacttgagaacatttggtcttgagagaagtcattctgaacagagtccagacttaagagttcggtccaaaggaagaagctgggacacgacttcttcagtttcagttctgacaccatccctgatatgtgacccggggaaaattacttccattttctgaatttctattttctcactgctgaatagagatattgtgagcaaaagagacagtaatacactgagtgcctagcatggtggtgggaacattgtgagccctatctaaaaggccgctgttatcacaagttagtatgtcccaacctgcacagccatgcagtgagacttgctgtctgaaacccagtgcttccatcatggcaggctttcttttagaaaagtttattgtttataggtttgatggggggaaaatcacactaaagattggtaatattgcataaaacacctaatgatttggacaatgacttctcatccaggattcaaagaaaaagaaaacaaaataattttatcacatcctgatcttaactttgagttgaattaagttgaattgaccaggagcaaagtaaactac

SEQ ID NO: 61181 - DNA, 523 bp, Homo sapiens
tcaagagtgtgcatgggaaggaatgagtgtaacacgggcagggcagggaccagtggactttttgtaagctttcagctcaataaaatgaacctatgtggtgagataataacagtaagtaaaactaaaacttgaaggtttagcactgacagagaatctcctggtgggaaagatgtctaaagaacatgggccaggcgcggtggctcacacctataatcccagcactttgggaggcctaggcaggtggatcacttgaggtcaggagtctgaaagcagcctgaccaacatggtgaaaccccattctactaaaaatacaaaaaaattagtgggrcatggtggtgcatgtctgtaaccccagctacttaggaggctaaggcaggagaatcgcttgaacccaggacacggaggttgcagtgagccaagatcatgccattgcactccagcctggacaacagagtgagattctgtctcaaaaaaaaacaaaaagcaacaacaacaacaacaacaacagaaaccatagtcacta

SEQ ID NO: 61182 - DNA, 1082 bp, Homo sapiens
taacctcacttgtaatcagggaaatccacatttaaacaatgaaatgataccaacttcatatccatcagattgaccaaaaaaccaatagtctaaaattaacaagaactggtgaagatgtgggtatatcttcaaacaccgatggaaggataaattgatactttcatttacagagcaatctatcaactatcaagtgaagttgaaaatgtgtataccttatgatcccacaattctccatatatccttgagaaaatttttacaggtgggcacaacaatggtcacagcagaattgttcataatgggaaaattggaaactcacatttcacacagtaggggaatgataaattgaggaatagctgattatagaatgctagacaggagataaagttattgaatcagacatatatgaaataagagattctgaatactatggttgagatttttaaaaaagcaagttgcagaatgatactacaatataatgccctttattaaatactttcaattttgcaattaattattccttctatttctrtagatatacttaagttaaagcataacaagaagaccagatagttctttttaaaattaaaaatagaattaccatatcatctagcaattccatttctgtgtatattcccagaagaattaaaaacggagatgagcatattatttgtacacacatgttcataacagcattattcacagtacccaaaaggtgaaaacaacctaggtgtccattaacagatgaagggatacacaagatatacttaaaaaggaaaaaaattctgataacatgctaccacatggatgaaacttgaggacattatgctaagtggaataagtcagtcacaaaggacaaatactatatgattccacttatatgaggtatctagagctgtcaaattcatagagacagaatctaaaaaggtgattgcctgggctgaagcaaatggagactgaggagtttttaacgagtacagagtttgttatgtaagatgaaaaaacttctggcgatggatgatggtgatggaatgtgaatgtgcttaattccactgaactgtatgcttaaaaatagttaagatggt

SEQ ID NO: 61183 - DNA, 1082 bp, Homo sapiens
taacctcacttgtaatcagggaaatccacatttaaacaatgaaatgataccaacttcatatccatcagattgaccaaaaaaccaatagtctaaaattaacaagaactggtgaagatgtgggtatatcttcaaacaccgatggaaggataaattgatactttcatttacagagcaatctatcaactatcaagtgaagttgaaaatgtgtataccttatgatcccacaattctccatatatccttgagaaaatttttacaggtgggcacaacaatggtcacagcagaattgttcataatgggaaaattggaaactcacatttcacacagtaggggaatgataaattgaggaatagctgattatagaatgctagacaggagataaagttattgaatcagacatatatgaaataagagattctgaatactatggttgagatttttaaaaaagcaagttgcagaatgatactacaatataatgccctttattaaatactttcaattttgcaattaattattccttctatttctatagatatacttaagttaaagcataacaagaagaccagatagttctttttaaaattaaaaatagaattaccatatcatctagcaattccatttctgtgtatattcccagaagaattaaaaacggagatgagcatattatttgtacacacatgttcataacagcattattcacagtacccaaaaggtgaaaacaacctaggtgtccattaacagatgaagggatacacaagatatacttaaaaaggaaaaaaattctgataacatgytaccacatggatgaaacttgaggacattatgctaagtggaataagtcagtcacaaaggacaaatactatatgattccacttatatgaggtatctagagctgtcaaattcatagagacagaatctaaaaaggtgattgcctgggctgaagcaaatggagactgaggagtttttaacgagtacagagtttgttatgtaagatgaaaaaacttctggcgatggatgatggtgatggaatgtgaatgtgcttaattccactgaactgtatgcttaaaaatagttaagatggt

SEQ ID NO: 61184 - DNA, 632 bp, Homo sapiens
agcctggccaacacggtgaaacccagtctctactaaaatacaaaaaattagccgggcatgttagcacacgcctgtaattccagctactcgggaggctgaggcaggagaatcacttgaacctgggaggcagaggttgcagtgagccgagatctcgacactgcactccagcctgggtgatggagtgagactctgtctcagaaaaaaaaaaaaaagaaagacatatgaaaagaattgttcaaggcctccagtagtctcacctcctctccctttgaacaacagtacatgcttgacatggttggttgtggttagagacacaggtggagttgacagtttttctgtgcacccttcctagcatcagaggcctgctttgttctcttcattccatttgtttgcttgtcatgcaaattcttgggatatttattaataatgcctcatatgtayatagtgtttcaataaattataaaacattttcatatacagtcatgcaccacataagggcatgtcagtcaatgagtcaatgatagaatgcgtatacaatgatggtcacataagattattatgaagctgaaaaactcctatcatctagtcacatcttaatgatcctgacctgtgtaggcctaggctaatatgca

SEQ ID NO: 61185 - DNA, 1072 bp, Homo sapiens
acaatggaatattattcaatcacagaaaaggaagtcctgccatatgcaatacatggatgaaccttaaaaacattatgctaatgattcttctttctgtggggtatctaaaattggcaaactcatataagcagaaagtagaatggaggttatcaggggctgagggcaggggaaatgtgaagtaactgttcaatagaaaaaaagtttcagtcatgcgaaatgagtaagtttggagatccgctgtacaagctgtactgtgcttatagttaacaatattgtactatacacttgacaatttgtgaaaagggtagataccatattatgtgttcttaccacaataaaaaatgatatatcagaaacaaaatataaaaatgtctaactccaatatcamacgactaatgagaacatatgtgaagtgcaatgttgattacatttgtagaaaatgtttttagcactctttcaattgttgtctctaaatacagcactgtcccctctaatggaacaatatacccaattattgggacagccatattaagcgacttcctttttatatcaacatttttgttcgggttacagatggttgatgttgcagaaatggatcttgtagttagtgtactcacattttctaaaaccagaaagtctaagtaaattagacactaaaaattaagatttcataacttttcttttatctaattactcaatttttggattgaaatgatttgccatttctgtgacatactgatttaacttcagaatctacaaaatagagtagattttaactctgtagtgaacattatattgcatgattttacataaattatcacattagattctgtatttcttttatttaatgggatttatatttatattttccaggtgataaaagactatctcaaagttttaacaatttgcctaaagtctcataactaataagttgagaaatagttaatcatcccaggacggtcttactgaagacaatgtcctttctgctatttcattctattcaaaagtttatttcacctgtcccttgtatcactggattcttcgtcaaagaaaaggatctctgtaatcaaat

SEQ ID NO: 61186 - DNA, 1072 bp, Homo sapiens
acaatggaatattattcaatcacagaaaaggaagtcctgccatatgcaatacatggatgaaccttaaaaacattatgctaatgattcttctttctgtggggtatctaaaattggcaaactcatataagcagaaagtagaatggaggttatcaggggctgagggcaggggaaatgtgaagtaactgttcaatagaaaaaaagtttcagtcatgcgaaatgagtaagtttggagatccgctgtacaagctgtactgtgcttatagttaacaatattgtactatacacttgacaatttgtgaaaagggtagataccatattatgtgttcttaccacaataaaaaatgatatatcagaaacaaaatataaaaatgtctaactccaatatcacasgactaatgagaacatatgtgaagtgcaatgttgattacatttgtagaaaatgtttttagcactctttcaattgttgtctctaaatacagcactgtcccctctaatggaacaatatacccaattattgggacagccatattaagcgacttcctttttatatcaacatttttgttcgggttacagatggttgatgttgcagaaatggatcttgtagttagtgtactcacattttctaaaaccagaaagtctaagtaaattagacactaaaaattaagatttcataacttttcttttatctaattactcaatttttggattgaaatgatttgccatttctgtgacatactgatttaacttcagaatctacaaaatagagtagattttaactctgtagtgaacattatattgcatgattttacataaattatcacattagattctgtatttcttttatttaatgggatttatatttatattttccaggtgataaaagactatctcaaagttttaacaatttgcctaaagtctcataactaataagttgagaaatagttaatcatcccaggacggtcttactgaagacaatgtcctttctgctatttcattctattcaaaagtttatttcacctgtcccttgtatcactggattcttcgtcaaagaaaaggatctctgtaatcaaat

SEQ ID NO: 61187 - DNA, 656 bp, Homo sapiens
gcagaggaggtttggaaggcttttgaagcagggttagcctgcagggtaaaatgtggttgatgctaacttcttactatctccctaacatatccgtgtatattaatctccactgcctccacctgaatgcagaccacctttcctctttaccttgcaagaatcgaccagttttctacttcatttctgcttaagcactctttccctctttaaacccattgctcccactatagtgaaaaagattgtcttataacagaaatcagttgccttcctctgattcagatctttcagtggcttcataatgatcctaaagtccaaaatatttaacctaacagataagactctatataatttagccctgaacttcctccagcctcaccttaagcttcctttgcagactcagtcttgtttatgccagctttgctcccgtccctgtgtaaactaaccttcctcctttcccattggctttgcagagatgattactcctcttagcacactatcccaatgctgcctctcagtccaccctatgacctagaaaattctactcatgcttaggtctcaaataccccttccacayaggtttccccaatgtctcttccaattaagttgggggttctggttatacgtctccatggccagcgctcctctcctttttaacctgc

SEQ ID NO: 61188 - DNA, 1021 bp, Homo sapiens
aaagagaaaaagagacattttatagttttattacacttatgggagtaagccaaattatttccttagtctcactakttaaatacagcacatttttattgcaaagagaatgttaatatttttatggagcaaatttagaaacaaataccaatgggacatgaaatactctgtggcttttcttacaagattctacactgaattggacaaagatatctcctttaggtagtaaacatagttccagagactgttttttatcttcatttttcagaataatttgatttatcaccagtcacatttagagaaccatttaagaagactttataacttgattaaatctgattgtatcctcatttatccttgtacttgtaccaaggcaattccaaatttatcagacaggaggttaatcacagtgactcatggcagtttgtggggcagggcagggggcaatatcatacagccactttagtttaaattttccataagttaattcaatcatgaaagagttataaaacttcaggaatccacaagaaaacattgagaacatttgtatgttcactagcaatttgattcagcaagaaattgccagagagggagagagagggagcgaggaagtgagggactagggacggagggagggagggagagagagagagaatgaaaaaggggaaaataaaccaaagaagccacagatgctaaatgaatgctcataataaaaatgttagagttagagacacccccaaccccccaccccacacacaaaaagccagaagagaattctttaggttgacaagtttgagagtgaaggagggtaattagggaatttctgagaaattgagaaaggaatggataatgaaaggtttctagaacttttactaatagtggttaattaaatctcctctgatattctacaggcgacttttactacagctttccactactattcaattatttgtatttgcttgacttgtatttactgaagtataggtgcgagcagaaagtaaaccatgaggctgtttgattttaa

SEQ ID NO: 61189 - DNA, 1021 bp, Homo sapiens
aaagagaaaaagagacattttatagttttattacacttatgggagtaagccaaattatttccttagtctcactagttaaatacagcacatttttattgcaaagagaatgttaatatttttatggagcaaatttagaaacaaataccaatgggacatgaaatactctgtggcttttcttacaagattctacactgaattggacaaagatatctcctttaggtagtaaacatagttccagagactgttttttatcttcatttttcagaataatttgatttatcaccagtcacatttagagaaccatttaagaagactttataacttgattaaatctgattgtatcctcatttatccttgtacttgtaccaaggcaattccaaatttatcagacaggaggttaatcacagtgactcatggcagtttgtggggcagggcagggggcaatatcatacagccactttagtttaaattttccataagttaattcaatcatgaaagagttataaaacttcaggaatccacaagaaaacattgagaacatttgtatgttcactagcaatttgattcagcaagaaattgccagagagggagagagagggagcgaggaagtgagggactagggacggagggagggagggagagagagagagaatgaaaaaggggaaaataaaccaaagaagccacagatgctaaatgaatgctcataataaaaatgttagagttagagacacccccmaccccccaccccacacacaaaaagccagaagagaattctttaggttgacaagtttgagagtgaaggagggtaattagggaatttctgagaaattgagaaaggaatggataatgaaaggtttctagaacttttactaatagtggttaattaaatctcctctgatattctacaggcgacttttactacagctttccactactattcaattatttgtatttgcttgacttgtatttactgaagtataggtgcgagcagaaagtaaaccatgaggctgtttgattttaa

SEQ ID NO: 61190 - DNA, 1021 bp, Homo sapiens
aaagagaaaaagagacattttatagttttattacacttatgggagtaagccaaattatttccttagtctcactagttaaatacagcacatttttattgcaaagagaatgttaatatttttatggagcaaatttagaaacaaataccaatgggacatgaaatactctgtggcttttcttacaagattctacactgaattggacaaagatatctcctttaggtagtaaacatagttccagagactgttttttatcttcatttttcagaataatttgatttatcaccagtcacatttagagaaccatttaagaagactttataacttgattaaatctgattgtatcctcatttatccttgtacttgtaccaaggcaattccaaatttatcagacaggaggttaatcacagtgactcatggcagtttgtggggcagggcagggggcaatatcatacagccactttagtttaaattttccataagttaattcaatcatgaaagagttataaaacttcaggaatccacaagaaaacattgagaacatttgtatgttcactagcaatttgattcagcaagaaattgccagagagggagagagagggagcgaggaagtgagggactagggacggagggagggagggagagagagagagaatgaaaaaggggaaaataaaccaaagaagccacagatgctaaatgaatgctcataataaaaatgttagagttagagacacccccaaccccccaccccacacacaaaaagccagaagagaattctttaggttgacaagtttgagagtgaaggagggtaattagggaatttctgagaaattgagaaaggaatggataatgaaaggtttctagaacttttactaatagtggttaattaaatctcctctgatattctacaggcgacttttactacagctttccrctactattcaattatttgtatttgcttgacttgtatttactgaagtataggtgcgagcagaaagtaaaccatgaggctgtttgattttaa

SEQ ID NO: 61191 - DNA, 1014 bp, Homo sapiens
accaagacaacagagctctcaggttagcacaggtatctgacagttttgtggctttatgtgatgaccttgatcgttcagttttctcatctatacatggaggtaatactagtatactcttgacctcccagagtattgtgaagatataagtagacttattctattctggggctatctccaaaacagtgcttagcaacctggattatattagtatatacttacacacttgccttccccactaggctgaaagcttcttgaggtcagggattatgtctgattgaatcacaacagatttgataaatagttgttgagtgaagaaatgcattaaccaactcctttctatatagcaggctattgatatttttaaaaatacaaatgatcctctaataaaagataccagtcccgagacttggatgctagatggtcagctaggcctactcacttatgaaactggtgaacccaaagtgaggggatacaaaacaatcatttgggtagagaaagaaaatattagaattttaaaaaatcaaattcttaaaaaaaacaataatttatttttctgacacttaatattctcattgacactggatatttcctgtgtatttcagatgagcatatgtcccattagtttcatgaatttctgtaaatattttcactttaatacataaaatttgatacctcataaccacatatatactaattasataagttctaaattgtaataataaaattaatattcatgagcccgcaaattaaatatggttgtgttaggctgtgggctcataaactacaatactacctataacctttaaacctctgttttgctcctccacttgaatcaaatcccagagatgttcactatgctgtactgaaaattaccacactgtgctactgtggtggctcacgctcgtcatcccaacactctgggaggctgcggtacatggatcacttgagcccaggagtttgagaccagcctgggaaacatggacaacatgtcaaaactccatctctacaaaaaat

SEQ ID NO: 61192 - DNA, 1863 bp, Homo sapiens
gtaaaacacagaaaagtcttagtatatgttaatggcaatgatggtgcagatgatggggatggcgatgattaagctgagaaaaatgaacatgaaaggagaaattactaatcaagtatgttaataactagatgaataagacagtaacattttagaaatttagaaaagagagaaatttgtggaaactgttctgaactaagaaatacttatggccaggaaaggtagctcatgcctgtaatcccagtaccttaggaggctgaggtgggtggatcacctgaggtcaggagctcaagaccagcctggccaacatgatgaaacccaatctctactaaaaacacaaaaattagccgggcatgatggcgggtgcctgtaatctcagctacttggtaggctaggcatgagaatcacttgaacccaggaggtaaaggttgcagtgagtcaagattgcaccagtgcactccagcctgggtgacagagcgagactctgtctcaacaacaacaacaacaacaaaacatatgtgaggccaggctcagtggctcacacctgtaatcccagcactttgggaagccaaggcaggcagatcacctggggtcaggagttcgagaccagcctggccaacatggtgaaactctgtctctactaaaaacacaaaaaaattagccgggagtgatggcacatgtctgttgcccagctacttgggaggctgaggcagcagaattgcttgaatccaagaggcagaagttgcagtgagctgcgcctgccactacactcccgcctgggcgacagagcaagactctgtctcaagaaaagataaataaaataaaataaaatacatgtgtgagataaacttcattcaggaatgagttctagcactgttggccatgagttcaatattaatacatcaataatatatgtatatgtatatatatatatayacacacacacacggtaaagtacctttaaacataaacacacataaaattatatatttattatttgatgaacatgttatgactagaggcttgcaggaccctaatgttgtatttcccctaggatcaatagtttagtattcactaattcaatgtttgcagtgagtttataggatataactaccacaaataatgataatgagaatcaatagatagataggtacctagatagatagatagatagatagatagatagatagatagatagatagatagattgattaggtaaggacagatagatacatagatagctacatacataaatacatagatagatagatagatagatagatagatagatagatagataggacagacagacagatgtggaaagatagagatattgagtgatttttccaaagcaatctgggaagaggagaagggaagaagatgtgcactgagagaagaaatgcctcagatatatcctgagtctggagtaagacctggcttagaatcctggtttatatgtcagataagaaatgctgtttatagagaacgagtacatatatgtcttttactattgtagcttctgaaaacatcagtttcctcattgaacacgtatttatataatactgaacagtatttatataatactgatgaagatgcatactataaaatcaaattattaagataaaatttaaactgttccgaacttccctagaatataaactattatcctcaaggtattagtaagcatataattgaagaaagccacacttttaaacctgcatttaggatcacttgggagaagagctatggttgattaatgctgtctgccaggagcatcgttacaggaagtaggatgctggctacagtctcctgtgtgattgcctactgactaatgtagatattaagtcggtccaaaaataattgcaa

SEQ ID NO: 61193 - DNA, 1863 bp, Homo sapiens
gtaaaacacagaaaagtcttagtatatgttaatggcaatgatggtgcagatgatggggatggcgatgattaagctgagaaaaatgaacatgaaaggagaaattactaatcaagtatgttaataactagatgaataagacagtaacattttagaaatttagaaaagagagaaatttgtggaaactgttctgaactaagaaatacttatggccaggaaaggtagctcatgcctgtaatcccagtaccttaggaggctgaggtgggtggatcacctgaggtcaggagctcaagaccagcctggccaacatgatgaaacccaatctctactaaaaacacaaaaattagccgggcatgatggcgggtgcctgtaatctcagctacttggtaggctaggcatgagaatcacttgaacccaggaggtaaaggttgcagtgagtcaagattgcaccagtgcactccagcctgggtgacagagcgagactctgtctcaacaacaacaacaacaacaaaacatatgtgaggccaggctcagtggctcacacctgtaatcccagcactttgggaagccaaggcaggcagatcacctggggtcaggagttcgagaccagcctggccaacatggtgaaactctgtctctactaaaaacacaaaaaaattagccgggagtgatggcacatgtctgttgcccagctacttgggaggctgaggcagcagaattgcttgaatccaagaggcagaagttgcagtgagctgcgcctgccactacactcccgcctgggcgacagagcaagactctgtctcaagaaaagataaataaaataaaataaaatacatgtgtgagataaacttcattcaggaatgagttctagcactgttggccatgagttcaatattaatacatcaataatatatgtatatgtatatatatatatacacacacacacacggtaaagtacctttaaacataaacacacataaaattatatatttattatttgatgaacatgttatgactagaggcttgcaggaccctaatgttgtatttcccctaggatcaatagtttagtattcactaattcaatgttygcagtgagtttataggatataactaccacaaataatgataatgagaatcaatagatagataggtacctagatagatagatagatagatagatagatagatagatagatagatagatagattgattaggtaaggacagatagatacatagatagctacatacataaatacatagatagatagatagatagatagatagatagatagatagataggacagacagacagatgtggaaagatagagatattgagtgatttttccaaagcaatctgggaagaggagaagggaagaagatgtgcactgagagaagaaatgcctcagatatatcctgagtctggagtaagacctggcttagaatcctggtttatatgtcagataagaaatgctgtttatagagaacgagtacatatatgtcttttactattgtagcttctgaaaacatcagtttcctcattgaacacgtatttatataatactgaacagtatttatataatactgatgaagatgcatactataaaatcaaattattaagataaaatttaaactgttccgaacttccctagaatataaactattatcctcaaggtattagtaagcatataattgaagaaagccacacttttaaacctgcatttaggatcacttgggagaagagctatggttgattaatgctgtctgccaggagcatcgttacaggaagtaggatgctggctacagtctcctgtgtgattgcctactgactaatgtagatattaagtcggtccaaaaataattgcaa

SEQ ID NO: 61194 - DNA, 1236 bp, Homo sapiens
aaaatattatacaaggccagaccactcttacaaataatttaatcaataaatatgatcaaaaccaactagttctgatttaaatgataacttcataacaattattttccaattaaaaaatttataattgaaatgaagaatcaaatctgctcaagtataacacgagtccttatgctaaataaaattaacttcataaaacaaatcccaagccatgacattttctaggatttatttaagaagtaatgctaaactcccacttgctcctgtatttttttattttgttattaatacggctcaattaaaacctgtagaaattttaaaattaaactctacatttgagtctgtacgtgtcacttattcattcctcacttgatagcaaatcattcaagtgaaaatacaccagcaaaatcctgagcaatttgaatgcaaattaaatcaatacaataacttagaagaatttgccattgtaaagcatgcaagttcaggcagctgctcaggatccttattttgtttagttaatctctattagtataactatatttaaggcattaattgcaaactccatttttaagtgtgataaagcccagagcaatcagaattataaccaaaaggtgactgtattcaggaagctaaagaatagatgcagttcccattctaaactaagtcaaaataacataccttgtcacatgaaaatcataaagttaactgcagaaatcaataaaaaaagttgctttctcttcccatcatttgttcatacaactaacaatgattaygattgtagttgaaaaagttatagtgtagatgtaaaatttttttcagaatattctgatgaataattccaaaagataaggtgttactccatgagtttctctttagtttctgaggtaagctttctctactatgaaaacgaacaccaacaaagaagcagcactgtagtatcaagttccaaacatgagacaggaattaaaatgtgttttgaagccaattttagtcacctccacattttaatataaaacatttttaaagaaaagcagtacaactaagtaagttacatgtttaccgtaaaagctttgggaaaatatacaaacccagatcactgttgtaaataatttaatcagtacatattattgagcacttgcatttcaccaggctattgggccaggcaggatttgggggtacagagatgaataaagcattctgtagtgtggtgggagtggggccccttatgtaaacaaagac

SEQ ID NO: 61195 - DNA, 1046 bp, Homo sapiens
atgcattctttggccatgccaatccagaacaaagggaaacctaccctaactgaggaccagaggtatgtggggtgtgggaaagcaaacagtcaatatatgagagaccctaaggaaggagaaccatcaggtgacagatggggttgaattaatccactaagatgaatgaaattgtagagaagagactgagaatataagggatcttgctgatgattgactagaagacccaaggaaagggaccgcagatgttcataagtactttacagagttagaaaaggcatgtacagagtcacgtgggtttgacaatgtggaagttatagatgacttggatttgtacagttttacttagttgtgagaatagaaacttagttggaggaaaatgaaaaacaytgggaaataagaaacagagataaaattactgtggtgagtactttgctatggaaaggcacagagaaatgaatcgttatctcagaacagacatgaagtattattttttttcacctggcagggtatatctgcagcctgataaaaattatcttgacaaagatcattatcttgagaaagataacacattatgtggaagacagaatcaatgataagagacagttttttgagtgtatgaggaaaactggactcttaaagctaaagtatatgaattagcctgtgattgaactggtggcactctattttaatggtttatatacagtttttatttaattccaacaaaaacctagtgatgtgggcacatttatgatccacatcttacagatgaggaaactgatctatggaaggattaagcaattattaagcagtttacttataaaaccactgaaacttatactttagaagaggacaatgaactgaagaaaaaacaaaaattcctaaactgaggtagagactgtggagtaaatgcatcagggatactgttaacttctttctggaaagagacagaagttgtggattgttagaatttttttctttcaaccaattcaaacttaaatatgctttactttgctattatagctaaaaatattcttataattctacag

SEQ ID NO: 61196 - DNA, 514 bp, Homo sapiens
tggtatttttaaaaaactaccaattattttatttattttgtacactgacttacatgatataataatttttatggctgtactaatttcatttgttgcttgctgaaatgtcttcatttttctagttttaggtctgctaaratgttctgtcagaatactacatacagtttgagtatcttttatccaaaatgcttgggaccatagtatttcagattttggattttttttcagatgttggaatatttgcaaatacatatcaatgataatgatattttgaaaatatgatttagtgttattcaagtgcaaagcttgaggatagccacctgggaaacacagtctccaaaagaatgagtgagtgttccatagtggggaagttttcacttatataggcagaaacagaagttaacagggttgcaacattttccatacaaggtcattacatagtttgtaatgatttgattgattacagcttgctacattccaaggaagattgctttgacattctgcaaggaagggc

SEQ ID NO: 61197 - DNA, 514 bp, Homo sapiens
tggtatttttaaaaaactaccaattattttatttattttgtacactgacttacatgatataataatttttatggctgtactaatttcatttgttgcttgctgaaatgtcttcatttttctagttttaggtctgctaagatgttctgtcaraatactacatacagtttgagtatcttttatccaaaatgcttgggaccatagtatttcagattttggattttttttcagatgttggaatatttgcaaatacatatcaatgataatgatattttgaaaatatgatttagtgttattcaagtgcaaagcttgaggatagccacctgggaaacacagtctccaaaagaatgagtgagtgttccatagtggggaagttttcacttatataggcagaaacagaagttaacagggttgcaacattttccatacaaggtcattacatagtttgtaatgatttgattgattacagcttgctacattccaaggaagattgctttgacattctgcaaggaagggc

SEQ ID NO: 61198 - DNA, 514 bp, Homo sapiens
tggtatttttaaaaaactaccaattattttatttattttgtacactgacttacatgatataataatttttatggctgtactaatttcatttgttgcttgctgaaatgtcttcatttttctagttttaggtctgctaagatgttctgtcagaatactacatacagtttgagtatcttttatccaaaatgcttgggaccatagtatttcagattttggattttttttcaratgttggaatatttgcaaatacatatcaatgataatgatattttgaaaatatgatttagtgttattcaagtgcaaagcttgaggatagccacctgggaaacacagtctccaaaagaatgagtgagtgttccatagtggggaagttttcacttatataggcagaaacagaagttaacagggttgcaacattttccatacaaggtcattacatagtttgtaatgatttgattgattacagcttgctacattccaaggaagattgctttgacattctgcaaggaagggc

SEQ ID NO: 61199 - DNA, 698 bp, Homo sapiens
cagtgcataatttacctacaataaaatgcataaatttaagtatacctgtgtttacttttaggcaaagaggatttttttttttggctcagatagctagaaggcacagacagtattctcagacatgactagatccagaaggatgatgtccttaggacctggtcactgcctctgtcttgtgagctgaattcattttttaaaaaggataaactttattttttagagcagttttaggtttatagcaaaattgagtggaaggtacagtgattttccatataccacctgcccccacccatataccacctgcccccagacatagcttcccctattatcagcatcccctaccagattgatacagttgtaaaaactgatgagtgtccatgacattaatrtcaccgaagtccatagtttacattagggttcacttttgatgttgtacgttctgtggaattcaacacatttatgacgtgtatccaacattatagtgtcatacagagtagtatcactgccctaaaaaccttttgtgctttgcgtattcatcccttcctccttcctacttttctaatattttatgttaaagtagtatcagttatgcacagtgattcctaagggactatgcacaaggatgtttattgcagtcataaaagtaacacaacaatacaagcaatctcactttttaaccaccagtgaatgtttatagt

SEQ ID NO: 61200 - DNA, 653 bp, Homo sapiens
gattgaggcacttaagagccacagtaccaacctccatccctttcatctcctattctggtaactttggaggccaaaggtttcaaatgtcatagctatgaggtgcagaagaagcaaccaatccacaccaggctttccatgagtgagaagcaagcattcagtgtgttcartctctgagattttgcgggcttagtctactgtgtagctactctcaaagtgtaaaaactaacaatgtcagcatcctttggaaatttgttagaaatgcagaatctattctcaatcccagagatactaaccagaatctacattttaacaatattcctggatgaataatgtgcatattaattatagaagctctgttttaaactatatttgcaattctggtaacttggaatgctagtagtgatattcagagaataccaaacctgatttgtatgaaagtcaatagcttagattttcaaaaacacagagatctgtgacctactgcagaagaatttctggaagtaagcctagaaatttctactaaaatttcctagtgattctgataattggctacatttaaatctttgtcagttccaactgggaatatagatagatacacatgatcacgttaaattttgctattttagaataattatgaattacataaataataa

SEQ ID NO: 61201 - DNA, 523 bp, Homo sapiens
gaatggagtatctatgtttcctcaacctctatttttctaaaataaaggtgtcttttagtttgytgtcttcttcatataaaagcaatacatacttgaaactatgcagtgaagcagtttcccatctcacttagagtaaaagccagaatccttctcatggtctataagaccttgtcacctttctgacccaatctttttctcttctccctattgctcactctgctctaggaatattgtttcctcacttaggctatgcatgttcatgcctcaaagactttacactgagagaaaactcctcttccagacagttccatgactatctcatttcttgcagatctctgctcaaatatcaccttatcaatgaggcctttctcaactgccacatattaaagaaccccctccccacagcaccatgccccctttacttccccttttaaaccatagcacccatcaccatctgatgcatcatatttttacttgtttatgatctttcttctctcactagaatgtaaactccttctactgc

SEQ ID NO: 61202 - DNA, 523 bp, Homo sapiens
gaatggagtatctatgtttcctcaacctctatttttctaaaataaaggtgtcttttagtttgctgtcttcttcatataaaagcaatacatacttgaaactatgcagtgaagcagtttcccatctcacttagagtaaaagccagaatccttctcatggtctataagaccttgtcacctttctgacccaatctttttctcttctccctattgctcactctgctctaggaatattgtttcctcacttaggctatgcatgttcatgcctcaaagactttacactgagagaaaactcctcttccagacagttccatgactatctcatttcttgcagatctctgctcaaatatcaccttatcaatgaggcctttctcaactgccacatattaaagaaccccctccccacagcaccatgccccctttacttccccttttaaaccatagcacccatcaccatctgatgcatcrtatttttacttgtttatgatctttcttctctcactagaatgtaaactccttctactgc

SEQ ID NO: 61203 - DNA, 1451 bp, Homo sapiens
ttttctgcaaaggtaccttctctgacatctctagacttctttggttttctttgctttcaaactccacaactattttcaatctctgagattatcaatattatcaatcatcaatttgtcaattcaattttctctggtataatttgttttgttcaatttacatatatatctattctctgcaaacagactataaaccaaagagacaatgtgttgcattaagggagtgtaggatttggacacaagcaaacttggtgtgagtcatattcagcttcttattacctgtgtgccttgagaaaattatttaaagtcactgagcatcagtttttgcctctatacaaaatgggttatttacactgaaaaatcttgcagaagaataaaagagatcatgtattgaaagtactcagtacacaatacattctcaataatattttggttttctttccatttttctttctttttgtctcccatagcttcttcttgtgcttaatattcctatgttctacttacatgtattcattccctctctttaattctaaagcaaattccttaaggagaaaatctatgcattttatatcaacatagttatcttcatatacagaagacctaaattatgtgacctgaagtctatatgtattatgaaattttttaaaaagcctggccaggcatggtggtccaggcctgtaatcccagcactttgggaggctgaggcgggcagatcatgaggtcaggagattgagaccatcctggctaacatggtgaaaccctgtctctaataaaaatacaaaaaaattagccgggtgtggtggcaagcgcctgtagtcccagctactgaggaggctgaggcaggagaacggcgtgaaccctggaggcagagcttgcagtgagctgagatcatgccactgcactccagcctgggcaatagagcgagactccgtctcaaaaaataaaaataaaaaataaaacaataataataataataataagcttccaaggtttctagaaaagtcttgcttgtattagtagagcccagtgaattgtgaaataactaaagtttctattgaatgtttccagttatcttgttttgtatgatttttcccccctgccctgttaaggaatcaagtcaccttcttcccataaaacatttcttaaagagtatctgatgttggtcattcctagctctgtgtaaattttagcctgagtatttcttcctccaagtgccttcctaacaatttattcattcattcattcattttgctattgatcaatggcttttcttggctgatagagattatgccagtatgggccacatcaaacatggatarttgggttcaaaaatgcccaacaccctcattctcttcaatccactgagacagagcaattcctgcctccccctcactcccagccactatcagcaatttaagaaaatgttattttccccatgacttgagtgaaag

SEQ ID NO: 61204 - DNA, 1451 bp, Homo sapiens
ttttctgcaaaggtaccttctctgacatctctagacttctttggttttctttgctttcaaactccacaactattttcaatctctgagattatcaatattatcaatcatcaatttgtcaattcaattttctctggtataatttgttttgttcaatttacatatatatctattctctgcaaacagactataaaccaaagagacaatgtgttgcattaagggagtgtaggatttggacacaagcaaacttggtgtgagtcatattcagcttcttattacctgtgtgccttgagaaaattatttaaagtcactgagcatcagtttttgcctctatacaaaatgggttatttacactgaaaaatcttgcagaagaataaaagagatcatgtattgaaagtactcagtacacaatacattctcaataatattttggttttctttccatttttctttctttttgtctcccatagcttcttcttgtgcttaatattcctatgttctacttacatgtattcattccctctctttaattctaaagcaaattccttaaggagaaaatctatgcattttatatcaacatagttatcttcatatacagaagacctaaattatgtgacctgaagtctatatgtattatgaaattttttaaaaagcctggccaggcatggtggtccaggcctgtaatcccagcactttgggaggctgaggcgggcagatcatgaggtcaggagattgagaccatcctggctaacatggtgaaaccctgtctctaataaaaatacaaaaaaattagccgggtgtggtggcaagcgcctgtagtcccagctactgaggaggctgaggcaggagaacggcgtgaaccctggaggcagagcttgcagtgagctgagatcatgccactgcactccagcctgggcaatagagcgagactccgtctcaaaaaataaaaataaaaaataaaacaataataataataataataagcttccaaggtttctagaaaagtcttgcttgtattagtagagcccagtgaattgtgaaataactaaagtttctattgaatgtttccagttatcttgttttgtatgatttttcccccctgccctgttaaggaatcaagtcaccttcttcccataaaacatttcttaaagagtatctgatgttggtcattcctagctctgtgtaaattttagcctgagtatttcttcctccaagtgccttcctaacaatttattcattcattcattcattttgctattgatcaatggcttttcttggctgatagagattatgccagtatgggccacatcaaacatggataattgggttcaaaaatgcccaacaccctcattctcttcaatccactgagacagagcaattcctgcctccccctcactcccrgccactatcagcaatttaagaaaatgttattttccccatgacttgagtgaaag

SEQ ID NO: 61205 - DNA, 985 bp, Homo sapiens
ctaattagcaacagctccaatcatcatgctaactcaagacaatatctgaaggctgggggtgctgcttttgttcacatttttttttttaaataggaagaaaacttggaagcttgcagtaatcttcctgtaacattttattggctggattataccacatgcttatttctataccaatcactaggaaagcaaatgtaattactgtgattagcttagaataatgatttttcttttaagattggatgggggtaacggaatagtaaatatctaaatgaacttgtgtttctacagcaataaagaataaataatgactatgcataggaagccagcaatgttttctgcaggaacacagtggaaaagtttgagcaggggaatcacaagattagatttgagtatcagggcattctggtcatggtataaagcagagattggcaaacttttcctgtaaagtgccagatagcgaatatgwtgggccatgtggtctctattacagctattcaactctgccattgtagggtgacaggagtcatagataatggatgggcaaagaggcatgattgtactccaataaaagtttgtataaaaaaccatttagaaagctgaatttggcctgtggcctatagtttctggcccttcatatagaagatagatggaggataatcacataaaaagatttaaagatgaagtttttgtagtagttcatgcgatggtctttttttttttgtaacaaatctgtggcctagtatcaatctattatgaaagtttgatccatcaagggtaaaatgaatcaagttcagaagctcaatttacacatttaaacatgtaggtccttctttggcattattttattttgattaatttttttaacttaaaaaataagaacagtaatttgtagggtttcttttttccctgtgaaagccatcagttaaggggccacgtttaactaggaaatataaatataaaataaataagtatgtatttccagtgg

SEQ ID NO: 61206 - DNA, 985 bp, Homo sapiens
ctaattagcaacagctccaatcatcatgctaactcaagacaatatctgaaggctgggggtgctgcttttgttcacatttttttttttaaataggaagaaaacttggaagcttgcagtaatcttcctgtaacattttattggctggattataccacatgcttatttctataccaatcactaggaaagcaaatgtaattactgtgattagcttagaataatgatttttcttttaagattggatgggggtaacggaatagtaaatatctaaatgaacttgtgtttctacagcaataaagaataaataatgactatgcataggaagccagcaatgttttctgcaggaacacagtggaaaagtttgagcaggggaatcacaagattagatttgagtatcagggcattctggtcatggtataaagcagagattggcaaacttttcctgtaaagtgccagatagcgaatatgatgggycatgtggtctctattacagctattcaactctgccattgtagggtgacaggagtcatagataatggatgggcaaagaggcatgattgtactccaataaaagtttgtataaaaaaccatttagaaagctgaatttggcctgtggcctatagtttctggcccttcatatagaagatagatggaggataatcacataaaaagatttaaagatgaagtttttgtagtagttcatgcgatggtctttttttttttgtaacaaatctgtggcctagtatcaatctattatgaaagtttgatccatcaagggtaaaatgaatcaagttcagaagctcaatttacacatttaaacatgtaggtccttctttggcattattttattttgattaatttttttaacttaaaaaataagaacagtaatttgtagggtttcttttttccctgtgaaagccatcagttaaggggccacgtttaactaggaaatataaatataaaataaataagtatgtatttccagtgg

SEQ ID NO: 61207 - DNA, 3332 bp, Homo sapiens
tatcttgatctataagtctaaaaacatcttaaaataccagatgattaaaaaaatagtaactttaattgttaaaaatgatcatttatttttcctcaggtggtggctcagtgttcactccgaaaaatgaaaaattgcccatttttgtgaaaaagttctactgatatgtgaaggtaccacattattcattgaattctcttcctgagtgaatgacatagaaccccgacagataaattaatatgttaaaattaaaagattatctaataaacaacttttccgttttaataaaattgtattttgatatatttgaaagatttttattgtagtgaaaaatatatataaaataaaaaataatgatgttggataatatcataaatgatttctaaggtagaaggttctattgtttagaaaaacatctttgagagtcttttttcatgaggcactaaattccttggtataatagggtaccctagacaaagtagctttttttttttttttttgagagtcttgctctgtcacccaggctggagtgacaaatctcggttcgttgtgacctttgcctcccaggttcaagtgattatcttgcctcagcctcttgagcagctgggattacagacatgtgccatcatgcccagctaatttttgtatttgtagtagagacagggtttcaccatgttggtcaggaggttttgaactcctgacttcgtgatctgcccgctttggtctcccaaagtgctgagrttacaggcatgaatcactgcgcccgaccacttttagaatatttaatgcttcataaatatgacgtaaaaaagggtgagctgtaatgttaagcagtaactaagaggagtgccaagttaccaccaggcagttagcaagagggggcaaggcagccccaggtgtagaattaataatgtgagagagactagaagttccaagaaaatggtagggtggggtggagaaattccttctgatgggaataaatgaggagattcaggatagtggtggcaatatatgtatgtatatatgtgtgtgtgtatatatgtgtatacgtgtatatatgtgtgtatgtatatatgcatatatatgtatctgtgtgtatgtgtgcatatacatgcatatatgtgtatatatatgcatgtttatgcattttgctgctcttcatgggatgtaattctcccttatctcctccacatggtggtcttgaattaatggtgcttggtgctaaggtgggggtgaaagtgggatgagtctcctcactagagggaactgagtagagaaaacatgatctgctctggagcacagagaagagggcaggcaccaacagtaagtgaggagaggccaagcccaactaaccaagaaactcccagaaaatatggaagactctgaatgctatgaagcacaggggataaatgaatcaagattttttttttttttgagatgaagtctcactctgttgcccaagatgagtgcagtgatgtgaccttggctcactgcaacctccgcctcctgggttcaagctattctccttccttagcctcctgagtagcttggattacaggcacctgccaccatgcctggctaatttttttgtgtctgcgataatattttgtcttcagcaaaattctattattgaccttaatacatagaaccttatttgtctgcatgtctggtttgtgagcagatattattttgagtcctcaaaacctagagcagtgcagttgtaaaaggctttgactgaagtcttaacaaatatttgctaaactgaattttgtagaaatgttccagactttagcatggaatttacaactcacacattcttgttatattcaaataataaactttactgagtcagcagcatttaatatcaacaagaaaacagtgaaataatgtatggattaattctgaattgcaaatttaactttaacgttaaaagtttccataagttatccccaagcctggaaataaatccaaaattggtcttagttatatatgtgtaaaatgcatattcatatgaagaatgaaacgcatcatcctatatcttcccttttttttttttctgattttgtgacttggatttgtttttaccaaaattcagggattcccccctaatcccaatgagaataatgtcttaaataaatggaattaaggagcttcaaaattcttttttttttttttttttttgagatggagtctaactctgtcacccaggctggagtgcagtggtgcaatctcagctcatgcaatttccacctccccagatcaagcgattttcttgcctcagcctcccgagtagctgggactacaggtgcaggccaccatgctcggctaattttttgtatttttagtggagacagggtttcactgtgttggccaggatggacttgatctcctgacctcgtgatccatgtgcctcagcctcccaaagtgctgggattacaggcgtgagccaccgcacctggcccaaaactctttaaagtactcaacctatcataagactagtaggtgtttctcaactctccttctcaaaacatgagatcatgaggtcttaatgctgaagattatggattattttatgtagagaacatggaacaaagctggactgtgctctggctcaatcagctccacttccacacctcgcagcaattctcaattatcaccaccagagagaagaaggcagtccctacctgaccatcgcctggcctggctaccttatctgtctaaacagtgcattgcaggaggccctttcctttctgtgctgttttattttttctcccccagcactagttttctaattagaataattgaggagaaatacaagattttcacagaatgaaagcaaaagtcttccaagtatgagaaaaatagaacaaaggctgtttatatccatattgattatagtgggaaggtattattgtaataaatgtgatggttattaaagcaagtcttgattttaaggaaatgttttgtcttgggactgtgacaggagattatgtgatgttcatgagatgatcatactgtctctgtccaggtctctgtaacatgtagaacacaaccaacgtagagtttcagtcccatttgatttacagaaacagcttgttcctcagtagtattctatatataaaaagtaaacacacacactatagttcatagagaatacattcacatggattactaggaaaactaaagtagcctttcaaaataattaaaaaagagccaggtgcagtagctcatgcctgtaatcccagtactttaggaggctgaggaggatggatcacttgaggtcacgagttcaagaccagcctagccaacatggtaaaactccatgtttactaaaa

SEQ ID NO: 61208 - DNA, 3332 bp, Homo sapiens
tatcttgatctataagtctaaaaacatcttaaaataccagatgattaaaaaaatagtaactttaattgttaaaaatgatcatttatttttcctcaggtggtggctcagtgttcactccgaaaaatgaaaaattgcccatttttgtgaaaaagttctactgatatgtgaaggtaccacattattcattgaattctcttcctgagtgaatgacatagaaccccgacagataaattaatatgttaaaattaaaagattatctaataaacaacttttccgttttaataaaattgtattttgatatatttgaaagatttttattgtagtgaaaaatatatataaaataaaaaataatgatgttggataatatcataaatgatttctaaggtagaaggttctattgtttagaaaaacatctttgagagtcttttttcatgaggcactaaattccttggtataatagggtaccctagacaaagtagctttttttttttttttttgagagtcttgctctgtcacccaggctggagtgacaaatctcggttcgttgtgacctttgcctcccaggttcaagtgattatcttgcctcagcctcttgagcagctgggattacagacatgtgccatcatgcccagctaatttttgtatttgtagtagagacagggtttcaccatgttggtcaggaggttttgaactcctgacttcgtgatctgcccgctttggtctcccaaagtgctgagattacaggcatgaatcactgcgcccgacmacttttagaatatttaatgcttcataaatatgacgtaaaaaagggtgagctgtaatgttaagcagtaactaagaggagtgccaagttaccaccaggcagttagcaagagggggcaaggcagccccaggtgtagaattaataatgtgagagagactagaagttccaagaaaatggtagggtggggtggagaaattccttctgatgggaataaatgaggagattcaggatagtggtggcaatatatgtatgtatatatgtgtgtgtgtatatatgtgtatacgtgtatatatgtgtgtatgtatatatgcatatatatgtatctgtgtgtatgtgtgcatatacatgcatatatgtgtatatatatgcatgtttatgcattttgctgctcttcatgggatgtaattctcccttatctcctccacatggtggtcttgaattaatggtgcttggtgctaaggtgggggtgaaagtgggatgagtctcctcactagagggaactgagtagagaaaacatgatctgctctggagcacagagaagagggcaggcaccaacagtaagtgaggagaggccaagcccaactaaccaagaaactcccagaaaatatggaagactctgaatgctatgaagcacaggggataaatgaatcaagattttttttttttttgagatgaagtctcactctgttgcccaagatgagtgcagtgatgtgaccttggctcactgcaacctccgcctcctgggttcaagctattctccttccttagcctcctgagtagcttggattacaggcacctgccaccatgcctggctaatttttttgtgtctgcgataatattttgtcttcagcaaaattctattattgaccttaatacatagaaccttatttgtctgcatgtctggtttgtgagcagatattattttgagtcctcaaaacctagagcagtgcagttgtaaaaggctttgactgaagtcttaacaaatatttgctaaactgaattttgtagaaatgttccagactttagcatggaatttacaactcacacattcttgttatattcaaataataaactttactgagtcagcagcatttaatatcaacaagaaaacagtgaaataatgtatggattaattctgaattgcaaatttaactttaacgttaaaagtttccataagttatccccaagcctggaaataaatccaaaattggtcttagttatatatgtgtaaaatgcatattcatatgaagaatgaaacgcatcatcctatatcttcccttttttttttttctgattttgtgacttggatttgtttttaccaaaattcagggattcccccctaatcccaatgagaataatgtcttaaataaatggaattaaggagcttcaaaattcttttttttttttttttttttgagatggagtctaactctgtcacccaggctggagtgcagtggtgcaatctcagctcatgcaatttccacctccccagatcaagcgattttcttgcctcagcctcccgagtagctgggactacaggtgcaggccaccatgctcggctaattttttgtatttttagtggagacagggtttcactgtgttggccaggatggacttgatctcctgacctcgtgatccatgtgcctcagcctcccaaagtgctgggattacaggcgtgagccaccgcacctggcccaaaactctttaaagtactcaacctatcataagactagtaggtgtttctcaactctccttctcaaaacatgagatcatgaggtcttaatgctgaagattatggattattttatgtagagaacatggaacaaagctggactgtgctctggctcaatcagctccacttccacacctcgcagcaattctcaattatcaccaccagagagaagaaggcagtccctacctgaccatcgcctggcctggctaccttatctgtctaaacagtgcattgcaggaggccctttcctttctgtgctgttttattttttctcccccagcactagttttctaattagaataattgaggagaaatacaagattttcacagaatgaaagcaaaagtcttccaagtatgagaaaaatagaacaaaggctgtttatatccatattgattatagtgggaaggtattattgtaataaatgtgatggttattaaagcaagtcttgattttaaggaaatgttttgtcttgggactgtgacaggagattatgtgatgttcatgagatgatcatactgtctctgtccaggtctctgtaacatgtagaacacaaccaacgtagagtttcagtcccatttgatttacagaaacagcttgttcctcagtagtattctatatataaaaagtaaacacacacactatagttcatagagaatacattcacatggattactaggaaaactaaagtagcctttcaaaataattaaaaaagagccaggtgcagtagctcatgcctgtaatcccagtactttaggaggctgaggaggatggatcacttgaggtcacgagttcaagaccagcctagccaacatggtaaaactccatgtttactaaaa

SEQ ID NO: 61209 - DNA, 3332 bp, Homo sapiens
tatcttgatctataagtctaaaaacatcttaaaataccagatgattaaaaaaatagtaactttaattgttaaaaatgatcatttatttttcctcaggtggtggctcagtgttcactccgaaaaatgaaaaattgcccatttttgtgaaaaagttctactgatatgtgaaggtaccacattattcattgaattctcttcctgagtgaatgacatagaaccccgacagataaattaatatgttaaaattaaaagattatctaataaacaacttttccgttttaataaaattgtattttgatatatttgaaagatttttattgtagtgaaaaatatatataaaataaaaaataatgatgttggataatatcataaatgatttctaaggtagaaggttctattgtttagaaaaacatctttgagagtcttttttcatgaggcactaaattccttggtataatagggtaccctagacaaagtagctttttttttttttttttgagagtcttgctctgtcacccaggctggagtgacaaatctcggttcgttgtgacctttgcctcccaggttcaagtgattatcttgcctcagcctcttgagcagctgggattacagacatgtgccatcatgcccagctaatttttgtatttgtagtagagacagggtttcaccatgttggtcaggaggttttgaactcctgacttcgtgatctgcccgctttggtctcccaaagtgctgagattacaggcatgaatcactgcgcccgaccacttttagaatatttaatgcttcataaatatgacgtaaaaaagggtgagctgtaatgttaagcagtaactaagaggagtgccaagttaccaccaggcagttagcaagagggggcaaggcagccccaggtgtagaattaataatgtgagagagactagaagttccaagaaaatggtagggtggggtggagaaattccttctgatgggaataaatgaggagattcaggatagtggtggcaatatatgtatgtatatatgtgtgtgtgtatatatgtgtatacgtgtatatatgtgtgtatgtatatatgcatatatatgtatctgtgtgtatgtgtgcatatacatgcatatatgtgtatatatatgcatgtttatgcattttgctgctcttcatgggatgtaattctcccttatctcctccacatggtggtcttgaattaatggtgcttggtgctaaggtgggggtgaaagtgggatgagtctcctcactagagggaactgagtagagaaaacatgatctgctctggagcacagagaagagggcaggcaccaacagtaagtgaggagaggccaagcccaactaaccaagaaactcccagaaaatatggaagactctgaatgctatgaagcacaggggataaatgaatcaagattttttttttttttgagatgaagtctcactctgttgcccaagatgagtgcagtgatgtgaccttggctcactgcaacctccgcctcctgggttcaagctattctccttccttagcctcctgagtagcttggattacaggcacctgccaccatgcctggctaatttttttgtgtctgcgataatattttgtcttcagcaaaattctattattgaccttaatacatagaaccttatttgtctgcatgtctggtttgtgagcagatattattttgagtcctcaaaacctagagcagtgcagttgtaaaaggctttgactgaagtcttaacaaatatttgctaaactgaattttgtagaaatgttccagactttagcatggaatttacaactcacacattcttgttatattcaaataataaactttactgagtcagcagcatttaatatcaacaagaaaacagtgaaataatgtatggattaattctgaattgcaaatttaactttaacgttaaaagtttccataagttatccccaagcctggaaataaatccaaaattggtcttagttatatatgtgtaaaatgcatattcatatgaagaatgaaacgcatcatcctatatcttcccttttttttttttctgattttgtgacttggatttgtttttaccaaaattcagggattcccccctaatcccaatgagaataatgtcttaaataaatggaattaagragcttcaaaattcttttttttttttttttttttgagatggagtctaactctgtcacccaggctggagtgcagtggtgcaatctcagctcatgcaatttccacctccccagatcaagcgattttcttgcctcagcctcccgagtagctgggactacaggtgcaggccaccatgctcggctaattttttgtatttttagtggagacagggtttcactgtgttggccaggatggacttgatctcctgacctcgtgatccatgtgcctcagcctcccaaagtgctgggattacaggcgtgagccaccgcacctggcccaaaactctttaaagtactcaacctatcataagactagtaggtgtttctcaactctccttctcaaaacatgagatcatgaggtcttaatgctgaagattatggattattttatgtagagaacatggaacaaagctggactgtgctctggctcaatcagctccacttccacacctcgcagcaattctcaattatcaccaccagagagaagaaggcagtccctacctgaccatcgcctggcctggctaccttatctgtctaaacagtgcattgcaggaggccctttcctttctgtgctgttttattttttctcccccagcactagttttctaattagaataattgaggagaaatacaagattttcacagaatgaaagcaaaagtcttccaagtatgagaaaaatagaacaaaggctgtttatatccatattgattatagtgggaaggtattattgtaataaatgtgatggttattaaagcaagtcttgattttaaggaaatgttttgtcttgggactgtgacaggagattatgtgatgttcatgagatgatcatactgtctctgtccaggtctctgtaacatgtagaacacaaccaacgtagagtttcagtcccatttgatttacagaaacagcttgttcctcagtagtattctatatataaaaagtaaacacacacactatagttcatagagaatacattcacatggattactaggaaaactaaagtagcctttcaaaataattaaaaaagagccaggtgcagtagctcatgcctgtaatcccagtactttaggaggctgaggaggatggatcacttgaggtcacgagttcaagaccagcctagccaacatggtaaaactccatgtttactaaaa

SEQ ID NO: 61210 - DNA, 1213 bp, Homo sapiens
gcacaaacctacacattgatgtaagatcaaactgttctcaagctagaaagctcagaagcatccttaaggctagtcgtggtggctcatgcctgtaatcgcagcactttgggaggccgaggcaggtggatcacgaggtcaggagatcgagaccatcctggctaacacggtgaaaccccgtctttactaaaaatacaaaaaaattagccaggcgtggtggcgggcgcctgttgtccaagctactcgggaggctgaggcaggagaatggcgtgaacctgggaggcagagctttcagtgagctgagattgtgccactgcactccagcctgggcgacagagcaagactccatctcaaaaaaaaaaaaagaagaatccttaaagcattgcatcttcctgaatctctaattctatatcttaaatgtccctgttatttagcctcttcttttgatgacccttgatagtgtcttttttatctcaccttaattctgatgatattctactaacttgaagatatgtcactaatctccctatctaatccaacttccagactcttacccaatatcctcctgaagacatatactaatcatatgactattctacttagaaactactatcagctgcctattatctacagcataatttcaagtatctgaacttgccatataggatgctgcatttttaaatactgtgaaatgaaatgagaacatagcacagagactctttcctttctcatctcttcttgctccyctactatttcactgttatataataaagaatctgttttattttattcctggtttctaaagagacccttttaaaaccttataatgtcctaagtgatacaagtgtctttgatattccaaagcaggccctgcagcatccctgagtttgtgccaacaagatgacttggaatgggggctggtcacaacggaaagatgaaccatatgattaaatggttaatgatttaagccaaattatgttagtccaacctcttgacctttcgggaagggagtgaggctggagatttcgataatatgactaatgattcaattaatcatgcctatgtaatgaaactctactaaaactctggacaccgagggttgggtaagattcctggttgatgaactcaatattggtttgaagggtgggtgatacgtcctgactctatgggtaacaggcatggatgcctccatgtctgtgaccctttcacatcttgc

SEQ ID NO: 61211 - DNA, 1841 bp, Homo sapiens
tttttaatctaacacagatcttttcactcctcttttgaaatgcccccagttactccctacctcactgagaagataattcaaaccccataaaatctcctgtaatttccaattgattgcggatctctctctacaaattttctcacctcatctcctgtagctcccactctcttcctctgctttgtyttactaccatgcttgcttttcctagaacaggcaaaataaaattcaggtttggcttttgttacttttgcctggattccttacccttcaaggagccagtcatttttctctttctcctacttcagaaaactgctccaatcttacctactcaaggaagccatcatggccactttctgtaaatagcacactcatgggcactcccaatatctcttccccacatatggttccccatgaacttttggtatcgataataattatctatgtgtgtgtgttcatgtgtatctacttgcacacacctatttattatcatctttacctcccaactagaaataatactgcatgagcaaacattgtctcaggttttttcattgttatatgcatagtgcctagagcagtgcctgtcacatagatggttcttaagcatttgttaaatgaattaatgattgattgaataaataaataaataaaccagtagcagtatgtcttggttccagagttgtctctaaaattatacacaaagtaccccaggaatttcagaaaaattcagtgagtcataactatctaattatattttttaagttaaaaaaaaagttattttctgttaatatttgaaagataggatctgtgttgctacattcttggtctgaatttcagaagaaaacaaacaatatattatatatggagagtcctaaaaaatgtgggaggtgtatgtttttagtagcaactgattctttaaaaacagttgtgatatattggagagtaaattgacttaaagattatttagcatactgcaaactaaaatatttctcataaaattgactagttgttaaaaactcctgtaataaaagcttcaattaaacataatagaagatgatactaataatgcaaatataagtgacaataaacaaaatgccagaactaggattttaccaggctgggtgcggtggctcatgcctgtaatcccaacacttcgggaggctgaggggggtggatcacgaggtcaggagctcaagaccatcctggtcaacatggtgaaaccccatctctactaaaaatacaaaaattagctgggcgtggtggtgtgcacttgtaattccagctacttgggaggctgagtcaggagaatcgcttgaacctgggaggcggaggttgcagcagagattgcaccactgcactccagcctggcaacagagcgagactccgaaaaaaaaaaaaaaaatccccaaatgagataggtaaagaaaaatcaaaattgccaaaaaagttattagaagtatgccttaacattgacttgcttattgtgaatcttaccatatatggatattttccttgaacatttattattggtaaagtaaataaacttaccttgtaaataaataggaagcagaacaagtttttacttagaatctgatgatcagaacaatttagttaccactccttaaaaagaagccttctgctacagtaaccaaaacagcatggtactggtaccaaaacagagatatagatcaatggaacagaacagagccctcagaaataacgccacatacctacaactatctgatctttgacaaacctgagaaaaacaagcaatggggaaaggattccctatttaataaatggtgctgggaaaattggctagccatatgtagaaagctgaaact

SEQ ID NO: 61212 - DNA, 1841 bp, Homo sapiens
tttttaatctaacacagatcttttcactcctcttttgaaatgcccccagttactccctacctcactgagaagataattcaaaccccataaaatctcctgtaatttccaattgattgcggatctctctctacaaattttctcacctcatctcctgtagctcccactctcttcctctgctttgtcttactaccatgcttgcttttcctagaacaggcaaaataaaattcaggtttggcttttgttacttttgcctggattccttacccttcaaggagccagtcatttttctctttctcctacttcagaaaactgctccaatcttacctactcaaggaagccatcatggccactttctgtaaatagcacactcatgggcactcccaatatctcttccccacatatggttccccatgaacttttggtatcgataataattatctatgtgtgtgtgttcatgtgtatctacttgcacacacctatttattatcatctttacctcccaactagaaataatactscatgagcaaacattgtctcaggttttttcattgttatatgcatagtgcctagagcagtgcctgtcacatagatggttcttaagcatttgttaaatgaattaatgattgattgaataaataaataaataaaccagtagcagtatgtcttggttccagagttgtctctaaaattatacacaaagtaccccaggaatttcagaaaaattcagtgagtcataactatctaattatattttttaagttaaaaaaaaagttattttctgttaatatttgaaagataggatctgtgttgctacattcttggtctgaatttcagaagaaaacaaacaatatattatatatggagagtcctaaaaaatgtgggaggtgtatgtttttagtagcaactgattctttaaaaacagttgtgatatattggagagtaaattgacttaaagattatttagcatactgcaaactaaaatatttctcataaaattgactagttgttaaaaactcctgtaataaaagcttcaattaaacataatagaagatgatactaataatgcaaatataagtgacaataaacaaaatgccagaactaggattttaccaggctgggtgcggtggctcatgcctgtaatcccaacacttcgggaggctgaggggggtggatcacgaggtcaggagctcaagaccatcctggtcaacatggtgaaaccccatctctactaaaaatacaaaaattagctgggcgtggtggtgtgcacttgtaattccagctacttgggaggctgagtcaggagaatcgcttgaacctgggaggcggaggttgcagcagagattgcaccactgcactccagcctggcaacagagcgagactccgaaaaaaaaaaaaaaaatccccaaatgagataggtaaagaaaaatcaaaattgccaaaaaagttattagaagtatgccttaacattgacttgcttattgtgaatcttaccatatatggatattttccttgaacatttattattggtaaagtaaataaacttaccttgtaaataaataggaagcagaacaagtttttacttagaatctgatgatcagaacaatttagttaccactccttaaaaagaagccttctgctacagtaaccaaaacagcatggtactggtaccaaaacagagatatagatcaatggaacagaacagagccctcagaaataacgccacatacctacaactatctgatctttgacaaacctgagaaaaacaagcaatggggaaaggattccctatttaataaatggtgctgggaaaattggctagccatatgtagaaagctgaaact

SEQ ID NO: 61213 - DNA, 1841 bp, Homo sapiens
tttttaatctaacacagatcttttcactcctcttttgaaatgcccccagttactccctacctcactgagaagataattcaaaccccataaaatctcctgtaatttccaattgattgcggatctctctctacaaattttctcacctcatctcctgtagctcccactctcttcctctgctttgtcttactaccatgcttgcttttcctagaacaggcaaaataaaattcaggtttggcttttgttacttttgcctggattccttacccttcaaggagccagtcatttttctctttctcctacttcagaaaactgctccaatcttacctactcaaggaagccatcatggccactttctgtaaatagcacactcatgggcactcccaatatctcttccccacatatggttccccatgaacttttggtatcgataataattatctatgtgtgtgtgttcatgtgtatctacttgcacacacctatttattatcatctttacctcccaactagaaataatactgcatgagcaaacattgtctcaggttttttcattgttatatgcatagtgcctagagcagtgcctgtcacatagatggttcttaagcatttgttaaatgaattaatgattgattgaataaataaataaataaaccagtagcagtatgtcttggttccagagttgtctctaaaattatacacaaagtaccccaggaatttcagaaaaattcagtgagtcatarctatctaattatattttttaagttaaaaaaaaagttattttctgttaatatttgaaagataggatctgtgttgctacattcttggtctgaatttcagaagaaaacaaacaatatattatatatggagagtcctaaaaaatgtgggaggtgtatgtttttagtagcaactgattctttaaaaacagttgtgatatattggagagtaaattgacttaaagattatttagcatactgcaaactaaaatatttctcataaaattgactagttgttaaaaactcctgtaataaaagcttcaattaaacataatagaagatgatactaataatgcaaatataagtgacaataaacaaaatgccagaactaggattttaccaggctgggtgcggtggctcatgcctgtaatcccaacacttcgggaggctgaggggggtggatcacgaggtcaggagctcaagaccatcctggtcaacatggtgaaaccccatctctactaaaaatacaaaaattagctgggcgtggtggtgtgcacttgtaattccagctacttgggaggctgagtcaggagaatcgcttgaacctgggaggcggaggttgcagcagagattgcaccactgcactccagcctggcaacagagcgagactccgaaaaaaaaaaaaaaaatccccaaatgagataggtaaagaaaaatcaaaattgccaaaaaagttattagaagtatgccttaacattgacttgcttattgtgaatcttaccatatatggatattttccttgaacatttattattggtaaagtaaataaacttaccttgtaaataaataggaagcagaacaagtttttacttagaatctgatgatcagaacaatttagttaccactccttaaaaagaagccttctgctacagtaaccaaaacagcatggtactggtaccaaaacagagatatagatcaatggaacagaacagagccctcagaaataacgccacatacctacaactatctgatctttgacaaacctgagaaaaacaagcaatggggaaaggattccctatttaataaatggtgctgggaaaattggctagccatatgtagaaagctgaaact

SEQ ID NO: 61214 - DNA, 1841 bp, Homo sapiens
tttttaatctaacacagatcttttcactcctcttttgaaatgcccccagttactccctacctcactgagaagataattcaaaccccataaaatctcctgtaatttccaattgattgcggatctctctctacaaattttctcacctcatctcctgtagctcccactctcttcctctgctttgtcttactaccatgcttgcttttcctagaacaggcaaaataaaattcaggtttggcttttgttacttttgcctggattccttacccttcaaggagccagtcatttttctctttctcctacttcagaaaactgctccaatcttacctactcaaggaagccatcatggccactttctgtaaatagcacactcatgggcactcccaatatctcttccccacatatggttccccatgaacttttggtatcgataataattatctatgtgtgtgtgttcatgtgtatctacttgcacacacctatttattatcatctttacctcccaactagaaataatactgcatgagcaaacattgtctcaggttttttcattgttatatgcatagtgcctagagcagtgcctgtcacatagatggttcttaagcatttgttaaatgaattaatgattgattgaataaataaataaataaaccagtagcagtatgtcttggttccagagttgtctctaaaattatacacaaagtaccccaggaatttcagaaaaattcagtgagtcataactatctaattatattttttaagttaaaaaaaaagttattttctgttaatatttgaaagataggatctgtgttgctacattcttggtctgaatttcagaagaaaacaaacaatatattatatatggagagtcctaaaaaatgtgggaggtgtatgtttttagtagcaactgattctttaaaaacagttgtgatatattggagagtaaattgacttaaagattatttagcatactgcaaactaaaatatttctcataaaattgactagttgttaaaaactyctgtaataaaagcttcaattaaacataatagaagatgatactaataatgcaaatataagtgacaataaacaaaatgccagaactaggattttaccaggctgggtgcggtggctcatgcctgtaatcccaacacttcgggaggctgaggggggtggatcacgaggtcaggagctcaagaccatcctggtcaacatggtgaaaccccatctctactaaaaatacaaaaattagctgggcgtggtggtgtgcacttgtaattccagctacttgggaggctgagtcaggagaatcgcttgaacctgggaggcggaggttgcagcagagattgcaccactgcactccagcctggcaacagagcgagactccgaaaaaaaaaaaaaaaatccccaaatgagataggtaaagaaaaatcaaaattgccaaaaaagttattagaagtatgccttaacattgacttgcttattgtgaatcttaccatatatggatattttccttgaacatttattattggtaaagtaaataaacttaccttgtaaataaataggaagcagaacaagtttttacttagaatctgatgatcagaacaatttagttaccactccttaaaaagaagccttctgctacagtaaccaaaacagcatggtactggtaccaaaacagagatatagatcaatggaacagaacagagccctcagaaataacgccacatacctacaactatctgatctttgacaaacctgagaaaaacaagcaatggggaaaggattccctatttaataaatggtgctgggaaaattggctagccatatgtagaaagctgaaact

SEQ ID NO: 61215 - DNA, 545 bp, Homo sapiens
taagcctgaaggatattaggctaaatgaaataagccagacactgtaagataaatactgcataatctcatttatatatgtaatctgaaagttgaaattcacagaaaaagaacataggatgacatagaatggttgttgccagaggctgggggttgaggaatatggaaaaatattggtcaaaactgatcacagaggactatatcaagtaatgaaagaggaaagctttatataaaatgattagctacatcacaatagtagatagtctgaaattattgaccagagaagcgattaaagtagttatgaggtatgcaaatgtgaagtgtcaggagaaagytggtgtaagaaatgctagtgctatgggaatgggagttagatgacctgtgtgatagtagttcagaagcatggtcatgagaaaacttgaattgtgtggcaaggaaggagagagaacgggttttgcatgtacactcaagactttaagtcattttctgttggtttgtatctttttacttcataccttgtttttacaactccttatggttataactgc

SEQ ID NO: 61216 - DNA, 1118 bp, Homo sapiens
cattcctagctatttctgagcatacacattaacttttattaatcatgaattcttttttattgtatctccttaatatctcttgaagccactcacttctcttatcctcacagaaaaaatccttctaactggtattgattaattttggctttattccttagcaaatatgcaaataggatcacatcattgctcctcaaaattgttcctgttaccttcaagataaattgcaaattatttagtatagcattcaaattattgttgagtatccagaccccagtactctctttcttacttagaatcattccccaaattatgttccaacctttcgccattgctcctggaggctgttttctatctctctctttttttttatctctcccatgataccatcttgcacattgtttcttgttctcctgtttgtctcctaaacaaaacttgtcagatccttgagaacaactgcagggttttatttgtgttttcatcaccagttcttaatatatttccaggagcactattgacactcaatactgttcgctgaattattaaatgggacaagtactagatactaactactctccacctcccctccttcagtaccccaagtactgcagggagcagtggacatctctccaatgcagggatcattgtaagcatcttaaaaatgcactgggtgcactggtgccttaaggcatgtatttcagaaccaagttttaagcatctcagaacctcaaggatattttgaagtatacattgatgctaatacttgaaaatatctatatyggtgtgtgacaaatagatcctgaaataagaactttgtggaagaatagcagcagcaaagagaaactttagttttccttattcctactgaagaagagggaagggggattagaggcttccagtacctgaaaagaacaaaggtttctctaccttcctttttttcttttctctctaaaaattatgagtgcacctttagaggttagtgagcatgtgggagatgtagctgtgggaaatacaaatactaggcctgagcatacaacttatatttctagaagagatgtattaaaaaagaaacaaaatacacacctccccgtctttttcctgttttacacagagaattttgc

SEQ ID NO: 61217 - DNA, 628 bp, Homo sapiens
tttttattatattctaattggcttatttctattgcatattaaagttcttgatattgttatataaatcttttatctgactatcctactgaattctcctgtttttggcatttttaattgattttctaggttttagcagggcaaatagtttccactctttctaattcatgtatctcatatttctttcttcttgtcttactgtgttgcttaggatctcaaatacaatattgaatattaacagttataatggacatgcttgacttgcttgtcatatttctaattttaatgaaatttkttctgtttccagagtatggttttattattattattttttctagtagatattctttatcaagttaaggactttttttctatttctgatctgctgaaaactttttcacacatgcctttgaattttacgatgtattggcatttatcagctatgctagttattctgcatatatatgtatacatatatgtgtatatatacatactaagggcatatgtgtatatatgtgtgtgtgccattaattacattgaaatagttactaatgtttatctttacattcatggaattaaatctactaaatcacgatgtatttttgcatctacgttcatatgctttttaaaa

SEQ ID NO: 61218 - DNA, 628 bp, Homo sapiens
tttttattatattctaattggcttatttctattgcatattaaagttcttgatattgttatataaatcttttatctgactatcctactgaattctcctgtttttggcatttttaattgattttctaggttttagcagggcaaatagtttccactctttctaattcatgtatctcatatttctttcttcttgtcttactgtgttgcttaggatctcaaatacaatattgaatattaacagttataatggacatgcttgacttgcttgtcatatttctaattttaatgaaatttgttctgtttccagagtatggttttattattattattttttctagtagatattctttatcaagttaaggactttttttctatttctgatctgctgaaaactttttcacacatgcctttgaattttacgatgtattggcatttatcagctatgctagttattctgcatatatatgtatacatatatgtgtatatatacatactaagggcatatgtgtatatatgtgtgtgtgccattaattacattgaaatakttactaatgtttatctttacattcatggaattaaatctactaaatcacgatgtatttttgcatctacgttcatatgctttttaaaa

SEQ ID NO: 61219 - DNA, 879 bp, Homo sapiens
ctttgattatagattttttttcaccattaaactgcaagtattctgagcaatgtaacatcaaaacactgtgagatatttatgcctcaggcagaataaatattaaatcttgttttacttagcatgtgtttccccaaataccaaaactgagaaaaaggctgacacagaggtaatttatttgggaagtgatgccttggagagaaaataagttacagagggagtaaaagagagagagagagaggaaaagccaatacaacaaattaatttggccataggtatgggtaactgggattcaatctcatgggactttctgaagggttttatgaagtgagtcacaaagctgtacactttgggtatggttgggagacaaattcacccattgtctcttgccccttgccaagactggcctcaggggcatatatgtcaagtcagcttcagcargtgtcccagattgtagcatcagcaaaaccttaagaaaggaatcaagaggtattcagtgtagtcccaactagaagggttgtcaggcttcaccagtgtaaagctagtcaaagattatatggaacatgctgccacagcaaaggctaaaatgacagatggaactaagagggtttgaacagcacacaaaaggtgtccaatacagtccactccttttattacttcgatctttattaagtccaaacttttagtcctatttagggttgtgaatggccacaatctctgcatgtaattaatgcaagagagttagtggaacaggtcttaaagtaaaaattgacgttcattatctcccaccagcatgaccaatcccatattttcctcaccatcagatggcacttcagctgatctaggttgcttgcctactagggtaaaccagaccttcatctg

SEQ ID NO: 61220 - DNA, 712 bp, Homo sapiens
agtgccctgatttatgtcacttggcttgtatggggcataatcatgaccagaacccacactttactgcaaatttttctaattcatagcagagtgcacaataggagtctctgctttagctcctaggctctgggcaagaccacaaccaactccatccaacatgggtgttatctcatcaatctcattacagaaattttcggggaaacgactcagaatcttgttaactttttgtttttctttttttgatctttggtgcaaaagtactttccaatatttaacagctttctttctttctttctttytttctgctgcaatttaaaatcaatttctcttgttctatcttgatacgtgaagccagtttcggtcacccttggttttgcttcctaaaagatagttaatattttaaatattactcttaattcttgaattatctggctgttctaccctgtgtctgcccccaagtcctctacaggtttcattatcatattgatcttacgatgatcaaacaagttcactgtagccagtatcagcataacatactgttacatgccacttaaaactattggactgattttgagtcaggacttggagttgcggggcagggagctttttccttctttgagcaagttattgaaacacttttaccttcccttacctcatctcagaaataaagataatcatgcctatgctgagttatgaataacaaataaggtcg

SEQ ID NO: 61221 - DNA, 626 bp, Homo sapiens
tttgggcagctagaaataggtgaaaaaaaaagttacctatcctatctatcatctcctcttcttgtactaaactaccactaactgtaatcacaaatataatattgcattattaatatgaatattttgatatgacacaatggtcatgaataaaatgttgatttcccacttttattgtgtaatatttgaaaaaatatataaatattttacccttcaccaaaatgtgtttattaacctagagctatgaactataatactttctagtaaattttctgatgaaataaaatcgaagtgggagaaataactaaacaatgataccaaatacccattttgagtctgtcattattttttgtgtgtctaatggagctatacattgaacttacttctatggagctgcttcctcacttccactgctctgraaaagagtagggagtggatgttcattgacatataaaacttccatgatttaatctgcacacactgcaaccccagagcattccttaagtcttgacacaaaactgtgcacacaattgggaatgcctagtagaaactgtgaattggaaacataagctttttttttttttttttaaaggatatttgaagacaatagtggaatggcatggtttggc

SEQ ID NO: 61222 - DNA, 754 bp, Homo sapiens
gataggccactaattagttttaatttaatgatttgatttttggaagtagaggagacaaaacaaatcaaagatactactgaatacacacacgcgcgcacacacacacacacacacacacacacacacacacaccccccatagattttccgagacggttggctaaatgctatggaaatgggtgctatgattcytgactttagaggagcttactctctggtcggggaaacaattctatcaataattggaaaaaggaaaaagtctgggagagtgtggaaatagtttaagttgagtctggaactaaccagtgtccagattctacttggtttgtgctaaatttaaactgtgttttagtataagaacaatggtagataatctgtttgagagtaggagtaaactaaaaggttaataatttaaaggattatttaaaatacaacctgaaatcattgtatttatcaatattggaaaatttataatatgctaagggaggagagcagcaagtggttaatttatttgtcctagggcatttaaaaaaatgtgctaggccagtactgcgaaaatatttgttaagcggggattcataggtagcctcatgacaagtgtatcaggtaagagaaaaaaagttggtatatccaaattacaaaaatatcagtctttcagtgaatttatccagatacatgatgacaataaactttgcatgtgtttcctcctccctgttctggctttaatgctgtattttgtgtacttactggacatt

SEQ ID NO: 61223 - DNA, 754 bp, Homo sapiens
gataggccactaattagttttaatttaatgatttgatttttggaagtagaggagacaaaacaaatcaaagatactactgaatacacacacgcgcgcacacacacacacacacacacacacacacacacacaccccccatagattttccgagacggttggctaaatgctatggaaatgggtgctatgattcttgactttagaggagcttactctctggtcggggaaacaattctatcaataattggaaaaaggaaaaagtctgggagagtgtggaaatagtttaagttgagtctggaactaaccagtgtccagattctacttggwttgtgctaaatttaaactgtgttttagtataagaacaatggtagataatctgtttgagagtaggagtaaactaaaaggttaataatttaaaggattatttaaaatacaacctgaaatcattgtatttatcaatattggaaaatttataatatgctaagggaggagagcagcaagtggttaatttatttgtcctagggcatttaaaaaaatgtgctaggccagtactgcgaaaatatttgttaagcggggattcataggtagcctcatgacaagtgtatcaggtaagagaaaaaaagttggtatatccaaattacaaaaatatcagtctttcagtgaatttatccagatacatgatgacaataaactttgcatgtgtttcctcctccctgttctggctttaatgctgtattttgtgtacttactggacatt

SEQ ID NO: 61224 - DNA, 637 bp, Homo sapiens
tttttttttggagacggagtctcactcagtccaccaggctggagtgcagtggtgcaatcttggctcactgcaagctccgcctcccgggttcatgccattctcctgcctcagcctcctgagtagctgggactacaggtgtctgccactacgcccggctaatttttttgtatttttagtagagatggggtttcaccatgttagccaggatggtctcgatctcctgaactcgtgatctgcccgtcaaagtgctgggattacaggtgtgaaccaccgcgcccagctgagaaatgtaagtttgttattttcattgactctcacaatttagaactcagttctgtgaggacccactgctgagtgcaatcatgacgagggaaatagcttgtgggacccaaccacttagggtttaagacayactgcttctaggactcactctcaggatctacagaaacaggagttacttaaaatcttgttaggaaacaattcctttcttcccttagacaagcctagatacttctgttgagtgcacatatgcatgcatccgcttcctctggtcttgtggacattcttgagtagacagcaattgatagggaaactgtcgaatgactagttgatgaaagataaccaaccaacctgatag

SEQ ID NO: 61225 - DNA, 904 bp, Homo sapiens
ttctaaactggagaaacctatcttggaaataattataagaaatatgcacttaagtttctggtggaccacaagtttagcatgagacaatggtgtgagcttagaaggctaagaacactagctgaatcctatgatgattttagggtgtttgtaaaatctttctggtaatggtcacgacagttctactgtttaataatatgtgttacctacaagtctgggaattatctacagcatttttataacaaactacagtcatcccaatttaaagaggaagaaactaaggctcagagcagtcaagtatcttgcctaaggtcatgcaaatatgataataagaaacagagatccagtccagcaataactggatcatatcagagtcttaatcactccactgtgctgcatttgcttctgggccatgtacacagactcacagttgcatcccacctgaaggtatggccaatccaactgaaggggacccctttattggagatatgagacaaaataacagtcacatatattatcgttgcagacaactagaacataataatgtcccgatgagagctgatactgttaaaaactcatggtcaagggatgtgtttttctcagggcacctctccaagaagtccctctccgctgaacaggaggccacatgtgagctagaaaggtcaggtgtaagttacagctctcccactcctagtctgtgtgtttcagggcaaggcatcaagattctcagttgttgttttgtcatctatgtggcatctatatcaatagttgtttcaggatgagaccgaaagcacttgcacagcatctaccatagagcaaaggctggataaatcrtagtgatgatggtgatgctgcttctgcaaggtgtgctcttaggaagcaaatgcctggctttttcaaagccacc

SEQ ID NO: 61226 - DNA, 523 bp, Homo sapiens
tgacgtctgcctctctccaacacctgtatcatggcctttccagccctttctactccctgccatccccatagcctaccctcaagtcacatctcctctacctgtattcccagatcaagccttactctttcaggtctttgtatacaggttcattcttcctgcaacaagcttctcatgctatccagaaggggttccctcaagactcagattaccaatcactttctgcctgggagccttctagatcttttgccttctccctagcctcaccccatcagcttactttgctctcagtgttttcctgggatatttacccatctctcttctaggacttaacacagtttgctaaatatacaacatacaagcctgtttttaccatgccaccctcagctccattaaagatctgattttgtcttacttatcttcaagttcccagagtcctccaacatatttctctgcacacaacagatactcataagatgtcagcagaatgagtacaatttttaatctacaaatatttgattycata

SEQ ID NO: 61227 - DNA, 1253 bp, Homo sapiens
tgcattccagtgggagagaggacagaataaacgtgattaaattatcggacagaaacacatgactataaataattgactctcccatgtttcatgagccttaacctcacacttcagaatgtttatttcctttatttcaaaatgtttgtttacttttctccatggactttaattaattttgcctttggcttataaacgggtgaaactaaaaacttttttatttgcatttttatcttgaagcaagctaactaattaaactttgcaatttggtttcactgtgctgtaccagagccataggaaaatggctgacagattcgcagatttgtgaccgtttttctaatgaaggagattttggaaattttgatggtttcatgtaaatgctaaargtaaaacctgtattaagagtcacttgatcacaggaagaaaaataaccaaatgactcaactgcataaggaggtgaaaggaaggatctagaaactacataccagtaaacgtcccctgagtaccacaaaaagtgtagaatggagtatgagcattgtagttttcaatagtgttactcaactggtagaaaagaggaatgcccaaggcataattcacatagatttcagtctgatatgcaacaggttcttccatgagatgtgagggcttaaaagaaaaggtagagattgaagacgttatcttttaaaagatactcacagcacatttaattgataggggatcagtaacaagattatataaagaacttttaaactcaataagatagcaaaaaaaagtaaaaaataactaagagataaaaacagtcatttcacagaataagaaaaatgactaatgtataaaaaactgttcacactcattggccattgctaaaattccagtaacaattagatgtatttatataattttatgtcttcctgattggtaaatattaagcctagaaatgccaagctttggcaataacaggaaaacagagaccctcgctgactgctgttcagagagtaaatttgtacaacaactttgaagaacagtttgtcattatctaccaaagtggaagatgtgtaacctatccctaagataatctctgcaaggaattctcatttatgcccctgggcacagagacaagaacactcctagaagcatttctagcaatagcaaaataggaaatggcctacatgctcattgatggaagcatagctccgtacccggcagtgtgtacgtctgatgaactgcagcaaggatggtggatctccaggacatgc

SEQ ID NO: 61228 - DNA, 2743 bp, Homo sapiens
tgcatttagagttacatacagacatatggtggaaaggggtcttgagttgatttggggcaaaaggcaaccgtccccatgcactagagatgaatcatgcctacctccctttgtcatgggaagtggcggccactgccacatctgctatgaggctcttcgccatcgttggctgctggaaatttggatacaggtaaatggtatataaggcttctttttgcttgtgcaccagaagtctttgtcccagcctccagatcagcagtcagtactcccctctcccaacctgtaggaagtacttgtgaaaagttatctatccctggtctgagtgggaggttcttaacctcattgatgttttagtgtgacttgtctacatttgtgtgctcccttcgtcatctgcagaggatatgagaaaagaaacaaatgaacaaaaagtggagatagcgccttcctattcattcttcatttggtatggttatagttaagagaggtgagccaggctgggcgtggtggctcatgcctgtaatcctatcactttgggaggccagagtgggagaattgcttgagtccaggagttcaagaccagcctgggccacatagtagaccctgtcttaattaaaaaattagccaggcttggtgatatgtgcctgtagttccagctagtctggaggctgaggtggaaggattgcttgagcctgggagaccgaggctgcaatgagccatgatcgcgccactacactccagcttgggtgacaaaggagatcttgtcttaacaaaaaaaaaaaaagagagagagagagagagaaatagattggtgaaccattttaggccttgcttcttggagaagtgagcaagaagcccacaagtgttgaaaaggttctgcacaaatgtgctcccatttcctgtgcaaaccaataatttgcttgttttccaaaaggatagaagtaattcataattttcagaaattatttattatcattataacatttccccacaggcagcagatagcccattattcagaattataatgtattttgatttagacaaggccagaataatgaaattggaagaaatgcagaaaatatgggcattaatgttaactaaacatacttcattcaacagaaggagggaagctttctcagccaaagaattattttcccaaaaatgcgtatataaaaatttttttattcagggcctctggtttttaactttataacaccggttgagtaatttttaactgcaggatgcatctctttcccgatattctccccacccaccgcaacatatttcagtttaaatggcctgttatttttcttcatagagctgtgtctctgcatgggtgagaactacaaaaccagtcaggaggaatttgatacgccaagtgggccagctcattataacttctaggaaaccacaagataattgtagggttactgctggtaggctcctcagcattgtgttaggcgtttatactcttctctgttcaacttgcaatagccacttctcttttcagtacattttgtaggacatctgaataaaggtggttgacaagcattttcaagcagaattttcaaggcagcatccaggaatacttggtaactaacctcagaggtttaaaaaagtaaaaaataaaaatatgtggttgaattcttacagtgagtaggaaattaatcttagactgcctgcatcaaattgagcctctttattgatatgaagtgagttttccctaaatgataacctattgagagatctgctcactatgaaatggacagattctgcttactgaattaccttctgctatttatccttgtgcttctttttttccttcctttttttccttatctttatcatccaaaaacattttgtaagaatttatttatgcaaattaacacaaacttttaatatggatatcaagatttcaaagatgttgtgtaaatatrtatatatacataatatagacatatacatacatgtaactaataggaagcacttatttggcatttactacaggtatatgctttgttctattctcaacatgtttcaggcagtttatttaaccttttgaaagaagtagatatggtaggtatattattatctctcttttacagttaagaagaacctgagtcctagagaggttaggcaacttgctgaaggtcacacagcttataagtggcatatttaatcaacctaggcaggcagtctgactcaaaagtctgtgcttttgatcagtacactgtactgcttctcagtataagtataataagcaaaagacagataataaaaatcattataacaataattaatataataagtaaatattactgaatatttcctctgcatcaggcactgtggcaagcattgtacattcgttgtctcatttaatcttcccaataatttgatgatgttgattccattttatcccacttcaaatatttagaaacagacttagtttctaaacctgccccagtgttatatagctggtaaacagcagagccatttattgttggggtaaaccctggagggcttcaggatatctgaaggccaccataaatcactgtgagagtagcagaaggcaatggaagttagggatggcaggtggatcagctggttagagcatggagttagtgaatccacttcttgtcaattagttctgccctattccaagaatacagccatcaacagttagtcccagagttggtggcattgttggggaaagagattgcaatagactggtgcagatcagttacctgaa

SEQ ID NO: 61229 - DNA, 2743 bp, Homo sapiens
tgcatttagagttacatacagacatatggtggaaaggggtcttgagttgatttggggcaaaaggcaaccgtccccatgcactagagatgaatcatgcctacctccctttgtcatgggaagtggcggccactgccacatctgctatgaggctcttcgccatcgttggctgctggaaatttggatacaggtaaatggtatataaggcttctttttgcttgtgcaccagaagtctttgtcccagcctccagatcagcagtcagtactcccctctcccaacctgtaggaagtacttgtgaaaagttatctatccctggtctgagtgggaggttcttaacctcattgatgttttagtgtgacttgtctacatttgtgtgctcccttcgtcatctgcagaggatatgagaaaagaaacaaatgaacaaaaagtggagatagcgccttcctattcattcttcatttggtatggttatagttaagagaggtgagccaggctgggcgtggtggctcatgcctgtaatcctatcactttgggaggccagagtgggagaattgcttgagtccaggagttcaagaccagcctgggccacatagtagaccctgtcttaattaaaaaattagccaggcttggtgatatgtgcctgtagttccagctagtctggaggctgaggtggaaggattgcttgagcctgggagaccgaggctgcaatgagccatgatcgcgccactacactccagcttgggtgacaaaggagatcttgtcttaacaaaaaaaaaaaaagagagagagagagagagaaatagattggtgaaccattttaggccttgcttcttggagaagtgagcaagaagcccacaagtgttgaaaaggttctgcacaaatgtgctcccatttcctgtgcaaaccaataatttgcttgttttccaaaaggatagaagtaattcataattttcagaaattatttattatcattataacatttccccacaggcagcagatagcccattattcagaattataatgtattttgatttagacaaggccagaataatgaaattggaagaaatgcagaaaatatgggcattaatgttaactaaacatacttcattcaacagaaggagggaagctttctcagccaaagaattattttcccaaaaatgcgtatataaaaatttttttattcagggcctctggtttttaactttataacaccggttgagtaatttttaactgcaggatgcatctctttcccgatattctccccacccaccgcaacatatttcagtttaaatggcctgttatttttcttcatagagctgtgtctctgcatgggtgagaactacaaaaccagtcaggaggaatttgatacgccaagtgggccagctcattataacttctaggaaaccacaagataattgtagggttactgctggtaggctcctcagcattgtgttaggcgtttatactcttctctgttcaacttgcaatagccacttctcttttcagtacattttgtaggacatctgaataaaggtggttgacaagcattttcaagcagaattttcaaggcagcatccaggaatacttggtaactaacctcagaggtttaaaaaagtaaaaaataaaaatatgtggttgaattcttacagtgagtaggaaattaatcttagactgcctgcatcaaattgagcctctttattgatatgaagtgagttttccctaaatgataacctattgagagatctgctcactatgaaatggacagattctgcttactgaattaccttctgctatttatccttgtgcttctttttttccttcctttttttccttatctttatcatccaaaaacattttgtaagaatttatttatgcaaattaacacaaacttttaatatggatatcaagatttcaaagatgttgtgtaaatatgtatatatacataatatagacatatacatacatgtaactaataggaagcacttatttggcatttactacaggtatatgctttgttctattctcaacatgtttcaggcagtttatttaaccttttgaaagaagtagatatggtaggtatattattatctctcttttacagttaagaagaacctgagtcctagagaggttaggcaacttgctgaaggtcacacagcttataagtggcatatttaatcaacctaggcaggcagtctgactcaaaagtctgtgcttttgatcagtacactgtactgcttctcagtataagtataataagcaaaagrcagataataaaaatcattataacaataattaatataataagtaaatattactgaatatttcctctgcatcaggcactgtggcaagcattgtacattcgttgtctcatttaatcttcccaataatttgatgatgttgattccattttatcccacttcaaatatttagaaacagacttagtttctaaacctgccccagtgttatatagctggtaaacagcagagccatttattgttggggtaaaccctggagggcttcaggatatctgaaggccaccataaatcactgtgagagtagcagaaggcaatggaagttagggatggcaggtggatcagctggttagagcatggagttagtgaatccacttcttgtcaattagttctgccctattccaagaatacagccatcaacagttagtcccagagttggtggcattgttggggaaagagattgcaatagactggtgcagatcagttacctgaa

SEQ ID NO: 61230 - DNA, 1076 bp, Homo sapiens
aggggaaaagagctgggagaggcaggtgtcccccgggcaaaggtctttgccacaaagattagttcctagagagcaccatggttgtcgctaggggaagagcctagggcatgtgtggtatcttgggcatatcataacagagtctcaaataggtctccactgcagggcacagctggggagagttagcaagatctgaaaacatgaaaccaataaagagaaagaacaacccacctggttcttatcaaagttatttcttctttaagtgagtgctaagtccagtttctgcatatataagttcttcggaaagaactcagaactaagtgccagaagccaatgctggttatgttactaactgtatggctggtccacctcrtattgccaataagacatcaaatactcttaaaaccttgcgtatgtttttggcttcattcagatgtgcaacgaaaatccctgtagccacataagctgggctgatacatagtcaacaccagtacaagtggaccagaagctagacactaaactatttcctttttttttttttttttttttttagacaaggtctcactttatcacccagctggagtgcagtggtgcaatcatgacttgctacagcctcgacccccaagggctcaggtggatcctcccatctcagcctccccagtagctgggaccataggcgtgccccaccacacctggctaatttttgtattttttgtagagacagggtttcaccatgttgcccagaccggtcttgaactcctagactcaagcaatcctcctggctcagcctcccaaagtgctgggattagaggtgtgagccacgtgtctggcctgaaatacttagataccagttgataaacagttgtgccttacactacctctccacctccaaatgccaacccctttttgttccagcctctcttccttatgttccaaggatctaagagttaaagtgttaatactctgcatacaaaaggtagtcttgaggaccatgctccagaactatggctgttgtccaccctgacttgctggtgcccatgccaccatgattgttattaagtagcttgagttctactttt

SEQ ID NO: 61231 - DNA, 1076 bp, Homo sapiens
aggggaaaagagctgggagaggcaggtgtcccccgggcaaaggtctttgccacaaagattagttcctagagagcaccatggttgtcgctaggggaagagcctagggcatgtgtggtatcttgggcatatcataacagagtctcaaataggtctccactgcagggcacagctggggagagttagcaagatctgaaaacatgaaaccaataaagagaaagaacaacccacctggttcttatcaaagttatttcttctttaagtgagtgctaagtccagtttctgcatatataagttcttcggaaagaactcagaactaagtgccagaagccaatgctggttatgttactaactgtatggctggtccacctcgtattgccaataagacatcaaatactcttaaaaccttgcgtatgtttttggcttcattcagatgtgcaaygaaaatccctgtagccacataagctgggctgatacatagtcaacaccagtacaagtggaccagaagctagacactaaactatttcctttttttttttttttttttttttagacaaggtctcactttatcacccagctggagtgcagtggtgcaatcatgacttgctacagcctcgacccccaagggctcaggtggatcctcccatctcagcctccccagtagctgggaccataggcgtgccccaccacacctggctaatttttgtattttttgtagagacagggtttcaccatgttgcccagaccggtcttgaactcctagactcaagcaatcctcctggctcagcctcccaaagtgctgggattagaggtgtgagccacgtgtctggcctgaaatacttagataccagttgataaacagttgtgccttacactacctctccacctccaaatgccaacccctttttgttccagcctctcttccttatgttccaaggatctaagagttaaagtgttaatactctgcatacaaaaggtagtcttgaggaccatgctccagaactatggctgttgtccaccctgacttgctggtgcccatgccaccatgattgttattaagtagcttgagttctactttt

SEQ ID NO: 61232 - DNA, 1076 bp, Homo sapiens
aggggaaaagagctgggagaggcaggtgtcccccgggcaaaggtctttgccacaaagattagttcctagagagcaccatggttgtcgctaggggaagagcctagggcatgtgtggtatcttgggcatatcataacagagtctcaaataggtctccactgcagggcacagctggggagagttagcaagatctgaaaacatgaaaccaataaagagaaagaacaacccacctggttcttatcaaagttatttcttctttaagtgagtgctaagtccagtttctgcatatataagttcttcggaaagaactcagaactaagtgccagaagccaatgctggttatgttactaactgtatggctggtccacctcgtattgccaataagacatcaaatactcttaaaaccttgcgtatgtttttggcttcattcagatgtgcaacgaraatccctgtagccacataagctgggctgatacatagtcaacaccagtacaagtggaccagaagctagacactaaactatttcctttttttttttttttttttttttagacaaggtctcactttatcacccagctggagtgcagtggtgcaatcatgacttgctacagcctcgacccccaagggctcaggtggatcctcccatctcagcctccccagtagctgggaccataggcgtgccccaccacacctggctaatttttgtattttttgtagagacagggtttcaccatgttgcccagaccggtcttgaactcctagactcaagcaatcctcctggctcagcctcccaaagtgctgggattagaggtgtgagccacgtgtctggcctgaaatacttagataccagttgataaacagttgtgccttacactacctctccacctccaaatgccaacccctttttgttccagcctctcttccttatgttccaaggatctaagagttaaagtgttaatactctgcatacaaaaggtagtcttgaggaccatgctccagaactatggctgttgtccaccctgacttgctggtgcccatgccaccatgattgttattaagtagcttgagttctactttt

SEQ ID NO: 61233 - DNA, 1342 bp, Homo sapiens
ttctgttggatgtctgaagaaactcccccagacctccacaccttagctggagacaagataacagtaatcacctccagcaccaggaccccatctagattaggcaaacttactgaggctccggaggaaggtctccaggacccagaacttagttatagattaggtggaatcagtcacttttgtccttaggaaaatgcacacttacacacagacatacagcttagaagatatataagctctggaaaaacttggtaactttgagtttgtctggtgatgttttccccagccttctccctatacctggttacagaaataaaatctcttctttccaagtttgtctgcatctcattactggaccatgagaacaagcagccagaatcttgatttggtccaggaacacaaccagctaaagaaaatctgaattgggattagaaatatggaggtatgtaaacagatcagtttgaatattgggctccaaatcctttcrtagatattaaacatatacctgaaattacaaatgaggtaaccattcaaaagcttattcatgattgaagaggggctgggatacccgtttcttctttggggacatgcttttcattagccctaatctcataatccacataggagttcctttcttctaaagatttttctttttttaccactttattcactgctgcttgaagggcaacaccagatgcaggttgagccaatagtgccagccagtaagaactggagtgcacagtaagaactggggtgcactgtaagaactggggtgcactcccaccaccattaccagtgctttcacaccctcccatgggatgcagtacccacggcagaggagcactctgaacatagctgtgggttacgaggctgcatctgcagtccacactcttaccaaaccacgagatcaatgctaactccctaaagcaggctgggaacacagatcttcctccttcacacagctctgggaagctctaacttctttttgcacttaagataaattttcatgcagcaatcccactaccaggaacttatcaaaaggaaatatttggaatgcacacagatgcatgcagttattgatctgtaattatctggatgtctatcagtaagaaattagttatttaaatttattcacatgcattcaaatgacaactccacaacctttaggagaataaaaatggatttcaaggatcttctctctcagagaggcagtgtagagtgatggctaagagttccagctggcagcaagctcacctggactcacatctgagctctatacttactgtctctgtggccttgggtaaattatcaagggctatgagccccacatcccccatctgtaaaa

SEQ ID NO: 61234 - DNA, 555 bp, Homo sapiens
attttctatgcatttagcatgtcagagttcaaataatctaagaaaaatacataggagaaacaagacctgaggagatgttcctgtgatggaacactgaaacaggatactgatggagacagggttctctaaaattatttgaaaataaaccaggtttaatatcctgcatagaaaaaagagccataaaatatggcttctatcactgtactacactgtgtttyttaattttttagaagagttatttaaattgctaatttaagactttaaaatttataaaattttaaattttatttgtgaggtgtttagtttgctttctgaagaatttcttaattagcatgtcatgctatgtaggacactttagtatccctgagactgaagcagattttcacatttggattcttatctagccataattttttggattgttttcatattaagctttacattttcgaatatttgttgctgcatatgtcaaataattagagtcttttactacctttgagactctaatacaaatgaagaatctaaacaagcaattaaacaatagcaggatattca

SEQ ID NO: 61235 - DNA, 555 bp, Homo sapiens
attttctatgcatttagcatgtcagagttcaaataatctaagaaaaatacataggagaaacaagacctgaggagatgttcctgtgatggaacactgaaacaggatactgatggagacagggttctctaaaattatttgaaaataaaccaggtttaatatcctgcatagaaaaaagagccataaaatatggcttctatcactgtactacactgtgttttttaattttttagaagagttatttaaattgctaatttaagactttaaaatttataaaattttaaattttatttgtraggtgtttagtttgctttctgaagaatttcttaattagcatgtcatgctatgtaggacactttagtatccctgagactgaagcagattttcacatttggattcttatctagccataattttttggattgttttcatattaagctttacattttcgaatatttgttgctgcatatgtcaaataattagagtcttttactacctttgagactctaatacaaatgaagaatctaaacaagcaattaaacaatagcaggatattca

SEQ ID NO: 61236 - DNA, 517 bp, Homo sapiens
tttataatttcacatctttctaaaaggactgtcatctcatcataactattctgtttattagccatatggccttgggaaaattacttaacctctctaatcctgttcacctctcaagactccagtaagtttccaatgaaatggcagacatagacatacttcataaattataaagtaccagataatatacataatgtcttaggaaatacaactatcaattttgtaaacaaatatcttccttagggttgacctatttgctaaaacatgtcattgtactcctttttyagtcagttatatcctgtaattgagacaaataagtgcataattttacatagtataagcagccctagccttcttacaactcacacttacaccgcttgacaaactgctcccaagactgatatttaaccagaaaccatttgtaggccctaacagttatttgtggttggtatttattatgactagtgatttatttctgtcttaatgggcagctgcatattttctgattatagacagacat

SEQ ID NO: 61237 - DNA, 517 bp, Homo sapiens
tttataatttcacatctttctaaaaggactgtcatctcatcataactattctgtttattagccatatggccttgggaaaattacttaacctctctaatcctgttcacctctcaagactccagtaagtttccaatgaaatggcagacatagacatacttcataaattataaagtaccagataatatacataatgtcttaggaaatacaactatcaattttgtaaacaaatatcttccttagggttgacctatttgctaaaacatgtcattgtactcctttttcagtcagttatatcctgtaattgagacaaataagtgcataattttacatagtataagcagccctagccttcttacaactcacacttacacygcttgacaaactgctcccaagactgatatttaaccagaaaccatttgtaggccctaacagttatttgtggttggtatttattatgactagtgatttatttctgtcttaatgggcagctgcatattttctgattatagacagacat

SEQ ID NO: 61238 - DNA, 503 bp, Homo sapiens
taaattaaaaatggaaaaaaacagattttttaagatttaggaagtatcataaatgcatttacttgcaaaaagtaaaacaagtttatggtagaagaaattaattttctttttttcttttttgagatggagcctcggcatgttgcccaggctggagtgcagtggcacgatctcggctcaccacaacctctgcctcccgggttcaagcaattctcctgcctcaacctcccaagtagctgggactacaggcgggtgccaccacacctggctaatttttgtatttttagtaaagacagggttttaccatattggccaggctggtatcaaactcctgagctcaagcaatccacctgtctcagcctcccaaagtgctgggattacaggcgtgagccaccacgcccagccagaaattaattttctatatgaaaaatgtctgcttcatttgatgmctactaaaaataatggggacaatattaagaaaagagaaaggaaataatagaaaggaa

SEQ ID NO: 61239 - DNA, 1088 bp, Homo sapiens
ttatttctagtctaagacttatctagtctgtaatatctggtagattacatattaaattagcttgtaatgctgctttcaagagycatttgcccattttaatgtatcacggaatttaaaggcacttttttgtgatgacagtttatttttactcatgacaaagctcctgaaaatatttgacagttgggcaataagtattagcacacttataactaacatcatgtttttagcaatgtagaacgccacaagatttttaaacatgaagaatctctctaaggtgaatagtttcatgacatttatcttacttttgtaatatcttacttacattgtatatttatcacataatttcttattttatagctctgtgctatcatctccattttaatatatttatttataatctatcattaaatatataaagtaaccaaataaatctacctgaacataatgtcagtcctaacaatgattttttcctgaacttaagcaaataaacatctattccgtatataaacataagtattcatctagttaggataaaaccagcattttctatttcaaagtttctgaacaatattacttgataatccttatattctgcattgctaacacctttgtttcacatgttttagatgaatcactgcatagacataagacttagtcttaccactgataaatctgttttaattaaccatgttcacattataataatcgattgcctttctaatgtagtgaaattaatgacgataacattgttaaaccatgtactaatactaatactatgcctagaaaaaaaatcaccaattacagaactgttaaagtgctacatgatttacatcagatttatgtggatattgaggattttcaaaagtacaaaatttttctcatctaaatgcacatttatatttttacattttatgaacattttgattaatgtttcaccaaaaaaggaagttcattatatgttgtagttcctttgacaacttagtgagttattcttttaactgctttattattattttcccttagggtattaaagattataatattcttacaaggatcactcaactaggaataattatttcactgatttg

SEQ ID NO: 61240 - DNA, 1088 bp, Homo sapiens
ttatttctagtctaagacttatctagtctgtaatatctggtagattacatattaaattagcttgtaatgctgctttcaagagccatttgcccattttaatgtatcacggaatttaaaggcacttttttgtgatgacagtttatttttactcatgacaaagctcctgaaaatatttgacagttgggcaataagtattagcacacttataactaacatcatgtttttagcaatgtagaacgccacaagatttttaaacatgaagaatctctctaaggtgaatagtttcatgacatttatcttacttttgtaatatcttacttacattgtatatttatcacataatttcttattttatagctctgtgctatcatctccattttaatatatttatttataatctatcattaaatatataaagtaaccaaataaatctacctgaacataatgtcagtcctaacaatgattttttcctgaacttaagcaaataaacatctattccgtatataaacataagtattcatctagttaggataaaaccagcattttctatttcaaagtttctgaacaatattacttgataatccttatattctgcattgctaacacctttgtttcacatgttttagatgaatcactgcatagacataagacttagtcttaccactgataaatctgttttaattaaccatgttcacattataataatcgattgcctttctaatgtagtgaaattaatgacgataacattgttaaaccatgtactaatactaatactatgcctagaaaaaaaaycaccaattacagaactgttaaagtgctacatgatttacatcagatttatgtggatattgaggattttcaaaagtacaaaatttttctcatctaaatgcacatttatatttttacattttatgaacattttgattaatgtttcaccaaaaaaggaagttcattatatgttgtagttcctttgacaacttagtgagttattcttttaactgctttattattattttcccttagggtattaaagattataatattcttacaaggatcactcaactaggaataattatttcactgatttg

SEQ ID NO: 61241 - DNA, 1096 bp, Homo sapiens
ttgtgtgccaagtaatgcaaattttttctgtggaacagtggatgaaataaatagtacatgataacaacatgtcaatttgtaatttctgatttttcatttttaatttatgttgtgcttttgatggattatgaagagtaccataaattcaaagtgagcttatatttgttgacatggttataattaaattatatgtaaaaatttgaaagatattgccatatagatttaatagttatatctagtgcttttaaagtaagagatactattttgctttgcaactacaaagaagatctcttattataaacaagaataaggaagtgtggaatatggattctttagcactaaggtttgtagatataaacatcacataccttaaactatctaacagtcaatattccaaaatactgatggaaaatagtcaaaatttatgtcaattatataaaaataatcttttaaattcatatgccaacagatgataatgaatgtggaaatttaactcagtcctgtggcgaaaatgctaattgcactaacacagaaggaagttattattgtatgtgtgtacctggcttcagatccagcagtaaccaagacaggtttatcactaatgatggaaccgtctgtataggtaagttcggttatctaagttagaatttgtatatatctcttattgtttgttacctccagaggttaaacatrttcaaaccaaattctgccagaccttgatcgtaccctacgtgttaagtactttcagaaatgtaattaatgtccttatttctccagtgttttaaagtctgtgggatagttatccaaggatacaggaagaaggtttaatttttgagagaataagtttgcaaaaataaataaataaaagaaagtgagagaaatgttcatggagtcatgagatctagtatagtggcaaacaacagaataaatgtttacactttagaataataaaatactccaagaaaattgtcatttgcattaaaagatactgaggcctttgtaaatatgcactctgtgatgggttctacatatttttcagacaatcatcatttataaaataattgttctagtggttttacctctgctttaataaaag

SEQ ID NO: 61242 - DNA, 755 bp, Homo sapiens
aaaatcagttgaatatatttatgtgggtctatttgtggagtctagccaactatatagtgagaagacacagttctcacaaaacttctctcatttaagtcaccagccacaagtttcaggtgtcccctagaccaccttcactttagaccatttggctaccatgattgttttatgtttcaagtttgctaggctgtaatacccagatatttaatcaaacactaatatggatgctgatttgaggatatttagtaaatttgattaacatctacaatcaaattaattcaagaaaaatgagattaccctcaatgatgtagatgggactcatccaatacactgaaggtctcaagagtaaacactggtttctcagagaagaaaaatattttgctttaagactgcccatgctgagttttcagccagctgacctgccctacagattttggactcaagactgtggcattaacccctgcctaatttcctagcctgctgatgtgatctataaattttggacttggcagctaccacattgcatgagcactggttttgagtaaatgtcatatatatatayacacacacacacacacacacacacacactcatatacacatgattatgtgtacatataaatatatattagacaacatatgtgatctgtttatagtctatataaactataattatatatatataatatatgtcatatcatacatataaaaatctgtttttcttgagatttctgacatatatagctacaaattctg

SEQ ID NO: 61243 - DNA, 755 bp, Homo sapiens
aaaatcagttgaatatatttatgtgggtctatttgtggagtctagccaactatatagtgagaagacacagttctcacaaaacttctctcatttaagtcaccagccacaagtttcaggtgtcccctagaccaccttcactttagaccatttggctaccatgattgttttatgtttcaagtttgctaggctgtaatacccagatatttaatcaaacactaatatggatgctgatttgaggatatttagtaaatttgattaacatctacaatcaaattaattcaagaaaaatgagattaccctcaatgatgtagatgggactcatccaatacactgaaggtctcaagagtaaacactggtttctcagagaagaaaaatattttgctttaagactgcccatgctgagttttcagccagctgacctgccctacagattttggactcaagactgtggcattaacccctgcctaatttcctagcctgctgatgtgatctataaattttggacttggcagctaccacattgcatgagcactggttttgagtaaatgtcatatatatatacayacacacacacacacacacacacacactcatatacacatgattatgtgtacatataaatatatattagacaacatatgtgatctgtttatagtctatataaactataattatatatatataatatatgtcatatcatacatataaaaatctgtttttcttgagatttctgacatatatagctacaaattctg

SEQ ID NO: 61244 - DNA, 833 bp, Homo sapiens
aaaataatttgtttgccattttataagaagaaaatgtgttcctttaaagtttagatttatagtttttttggagaactaaatattcatgttctatacttgaaactatttttaaagttattaagtgaatgaaagaaaaacatctgtaggttttaacactgactagatttacaaccttgaatataatagtaagatcagtttatttgtaaaagttcatcaagcttgatgtttgtctgtatattgagtagggcaagattttaactgaatttttcccactatgctacatataaggaatagaactctgggctctcaatcacacaatcatttgttatgttctttggttaaggattcttcaaagagctactaagtcatcctttgccagcattacaaaagagctatattccttgattaattgaatgcaaaggaatattatttcacatccagatgatacttggctttcagtttattctcaagtcaaatactactcactatttctcaacaacccatcttttggcatgtcttagtccattcttggttcttgtattgctataaaagaatacctgagactggataatttataaggaaaagtggtttattttggcacatgtttcttctggctgtacaggaattgtgatgctggtatctgcttttgttgaggcctcaggaagcttccagtcatgacagaagaagaaggagcaggcatatcacataatgagagcaggagyaagagatggaggtgtggggaggttccatactcttttcaacaactagatatcacatgagttaactgagaaagaactcacttatcaccaaggggatgttaagctgtttatgaa

SEQ ID NO: 61245 - DNA, 833 bp, Homo sapiens
aaaataatttgtttgccattttataagaagaaaatgtgttcctttaaagtttagatttatagtttttttggagaactaaatattcatgttctatacttgaaactatttttaaagttattaagtgaatgaaagaaaaacatctgtaggttttaacactgactagatttacaaccttgaatataatagtaagatcagtttatttgtaaaagttcatcaagcttgatgtttgtctgtatattgagtagggcaagattttaactgaatttttcccactatgctacatataaggaatagaactctgggctctcaatcacacaatcatttgttatgttctttggttaaggattcttcaaagagctactaagtcatcctttgccagcattacaaaagagctatattccttgattaattgaatgcaaaggaatattatttcacatccagatgatacttggctttcagtttattctcaagtcaaatactactcactatttctcaacaacccatcttttggcatgtcttagtccattcttggttcttgtattgctataaaagaatacctgagactggataatttataaggaaaagtggtttattttggcacatgtttcttctggctgtacaggaattgtgatgctggtatctgcttttgttgaggcctcaggaagcttccagtcatgacagaagaagaaggagcaggcatatcacataatgagagcaggagtaagagatggaggtgtggggaggttccatactcttttcaacaactagatatcacaygagttaactgagaaagaactcacttatcaccaaggggatgttaagctgtttatgaa

SEQ ID NO: 61246 - DNA, 833 bp, Homo sapiens
aaaataatttgtttgccattttataagaagaaaatgtgttcctttaaagtttagatttatagtttttttggagaactaaatattcatgttctatacttgaaactatttttaaagttattaagtgaatgaaagaaaaacatctgtaggttttaacactgactagatttacaaccttgaatataatagtaagatcagtttatttgtaaaagttcatcaagcttgatgtttgtctgtatattgagtagggcaagattttaactgaatttttcccactatgctacatataaggaatagaactctgggctctcaatcacacaatcatttgttatgttctttggttaaggattcttcaaagagctactaagtcatcctttgccagcattacaaaagagctatattccttgattaattgaatgcaaaggaatattatttcacatccagatgatacttggctttcagtttattctcaagtcaaatactactcactatttctcaacaacccatcttttggcatgtcttagtccattcttggttcttgtattgctataaaagaatacctgagactggataatttataaggaaaagtggtttattttggcacatgtttcttctggctgtacaggaattgtgatgctggtatctgcttttgttgaggcctcaggaagcttccagtcatgacagaagaagaaggagcaggcatatcacataatgagagcaggagtaagagatggaggtgtggggaggttccatactcttttcaacaactagatatcacatgagttaactgagaaagaactcacttaycaccaaggggatgttaagctgtttatgaa

SEQ ID NO: 61247 - DNA, 833 bp, Homo sapiens
aaaataatttgtttgccattttataagaagaaaatgtgttcctttaaagtttagatttatagtttttttggagaactaaatattcatgttctatacttgaaactatttttaaagttattaagtgaatgaaagaaaaacatctgtaggttttaacactgactagatttacaaccttgaatataatagtaagatcagtttatttgtaaaagttcatcaagcttgatgtttgtctgtatattgagtagggcaagattttaactgaatttttcccactatgctacatataaggaatagaactctgggctctcaatcacacaatcatttgttatgttctttggttaaggattcttcaaagagctactaagtcatcctttgccagcattacaaaagagctatattccttgattaattgaatgcaaaggaatattatttcacatccagatgatacttggctttcagtttattctcaagtcaaatactactcactatttctcaacaacccatcttttggcatgtcttagtccattcttggttcttgtattgctataaaagaatacctgagactggataatttataaggaaaagtggtttattttggcacatgtttcttctggctgtacaggaattgtgatgctggtatctgcttttgttgaggcctcaggaagcttccagtcatgacagaagaagaaggagcaggcatatcacataatgagagcaggagtaagagatggaggtgtggggaggttccatactcttttcaacaactagatatcacatgagttaactgagaaagaactcacttatcaccaaggggatgttaagcygtttatgaa

SEQ ID NO: 61248 - DNA, 823 bp, Homo sapiens
cttttccttctgttacagaataatccagggaaagctgggtggtctggatgttctgcagagcatcatgctgaccaagtgtattcatggaccacgttaattggatctgatgagcaggaagtggcaagaattttgagtgacctggaatacatgctccagagggtgagagacgacctctgcagaatgttcgaatcctgccrcgttggtaaaatgatgagtggtctaaggcacgtctacgctgttgaaactttccctacaaggtacagtacaagttgctccttgtacctcccaacactgagaaagaggaacactgcttggcatgtcgcctctggtttcagaggcagcctagctttcttggccacgctttcttggccgtatattgagagactcaacaggttgctagcttttagtgggactcagagtgaaaacaaaaatgtcttcatcaagtccaggctgcagatgaatgggcttgtcacttgggccatttgagctggcagagcccatggccgtagaggtcttgctgttagactaggtgccctatgtggtttctggaaatgtccaaaacaagaagcccagtggagagcccagggttctggagcacagccacctgtctctaacagagaagtagacaccgttattcaaatagtagctgcgagcaatggtgagagtgagcatcaatagtgggttgaatggtgcctcccctcatcaaggacacatccacagaatgtgatcttatttgggttaagagcctttgccaatgtctttaaggaaaggatctcgagatgagataatcttagattggggaggtgctaaatccagtgaggat

SEQ ID NO: 61249 - DNA, 823 bp, Homo sapiens
cttttccttctgttacagaataatccagggaaagctgggtggtctggatgttctgcagagcatcatgctgaccaagtgtattcatggaccacgttaattggatctgatgagcaggaagtggcaagaattttgagtgacctggaatacatgctccagagggtgagagacgacctctgcagaatgttcgaatcctgccacgttggtaaaatgatgagtggtctaaggcacgtctacgctgttgaaactttccctacaaggtacagtacaagttgctccttgtacctcccaacactgagaaagaggaacactgcttggcatrtcgcctctggtttcagaggcagcctagctttcttggccacgctttcttggccgtatattgagagactcaacaggttgctagcttttagtgggactcagagtgaaaacaaaaatgtcttcatcaagtccaggctgcagatgaatgggcttgtcacttgggccatttgagctggcagagcccatggccgtagaggtcttgctgttagactaggtgccctatgtggtttctggaaatgtccaaaacaagaagcccagtggagagcccagggttctggagcacagccacctgtctctaacagagaagtagacaccgttattcaaatagtagctgcgagcaatggtgagagtgagcatcaatagtgggttgaatggtgcctcccctcatcaaggacacatccacagaatgtgatcttatttgggttaagagcctttgccaatgtctttaaggaaaggatctcgagatgagataatcttagattggggaggtgctaaatccagtgaggat

SEQ ID NO: 61250 - DNA, 823 bp, Homo sapiens
cttttccttctgttacagaataatccagggaaagctgggtggtctggatgttctgcagagcatcatgctgaccaagtgtattcatggaccacgttaattggatctgatgagcaggaagtggcaagaattttgagtgacctggaatacatgctccagagggtgagagacgacctctgcagaatgttcgaatcctgccacgttggtaaaatgatgagtggtctaaggcacgtctacgctgttgaaactttccctacaaggtacagtacaagttgctccttgtacctcccaacactgagaaagaggaacactgcttggcatgtcgcctctggtttcagaggcagcctagctttcttggccacgctttcttggccgtatattgagagactcaacaggttgctagcttttagtgggactcagagtgaaaacaaaaatgtcttcatcaagtccaggctgcagatgaatgggcttgtcacttgggccatttgagctggcagagcccatggccrtagaggtcttgctgttagactaggtgccctatgtggtttctggaaatgtccaaaacaagaagcccagtggagagcccagggttctggagcacagccacctgtctctaacagagaagtagacaccgttattcaaatagtagctgcgagcaatggtgagagtgagcatcaatagtgggttgaatggtgcctcccctcatcaaggacacatccacagaatgtgatcttatttgggttaagagcctttgccaatgtctttaaggaaaggatctcgagatgagataatcttagattggggaggtgctaaatccagtgaggat

SEQ ID NO: 61251 - DNA, 623 bp, Homo sapiens
aaagagaagtttttaagtctcacggaccttgcagctggtctctgcattgatgaaaagtttctggtcaggttcatgaagcacgggatacagtccagtttgagacccaggtgtctggttagcctcggggaagatgtagctctggaaatcagttcttctattcttgttttttctcctgccagatcctatcattcctgtcccactttgacccctctgcctcctgagtagctgggattacaggcatgaatcccatgcccagctaattctttgcatttttagtaaagatgggtttcaccatgttggccaggctggtctcaaactcctgacctcaagtgatctgcmcaccttggcctcccaaagtgctgggattacaggtgtgagccaccgcacccggcctgtttttcatttttataagttttttatgtttctcctcttgtcctccttcctgagaggctggtggaaagagtggcaccgatgggtctgggctggtgaagatatccagtaaaattaccccttatatctgagaggatgattttggttaacagacccaaaccgagttaagggggaaaacatctaggggttcctatatctgaactgtaagagatttcctggcttctgggatggct

SEQ ID NO: 61252 - DNA, 623 bp, Homo sapiens
aaagagaagtttttaagtctcacggaccttgcagctggtctctgcattgatgaaaagtttctggtcaggttcatgaagcacgggatacagtccagtttgagacccaggtgtctggttagcctcggggaagatgtagctctggaaatcagttcttctattcttgttttttctcctgccagatcctatcattcctgtcccactttgacccctctgcctcctgagtagctgggattacaggcatgaatcccatgcccagctaattctttgcatttttagtaaagatgggtttcaccatgttggccaggctggtctcaaactcctgacctcaagtgatctgcacaccttggcctcccaaagtgctgggattacaggtgtgagccaccgcaccyggcctgtttttcatttttataagttttttatgtttctcctcttgtcctccttcctgagaggctggtggaaagagtggcaccgatgggtctgggctggtgaagatatccagtaaaattaccccttatatctgagaggatgattttggttaacagacccaaaccgagttaagggggaaaacatctaggggttcctatatctgaactgtaagagatttcctggcttctgggatggct

SEQ ID NO: 61253 - DNA, 669 bp, Homo sapiens
ttatttggggttattgggatagtctaactggttgacggtatcttcctggatcactccccccaacaccccacccatctcttctctgccccactgccctccctcgctctccatcctcccattggctgggcttgcaagtactagcacaccatcttgaatcatatcaacaagggcagcctctagtgccaggagaaaagagactgggcttctgatggcattgcagagcagaggcaccaaaccactttggatctctatggaacagaaaaaatwacgtttttgaaattcataccactttaaacaaagtctcttttgcaagcaattggcccatatcctaagtcatacacttctttatgtgggttccttaacactgcacacctcttctttatagcatttgccatagttgcaactgaatactttttggcatgcatcttttctaaccaacaatgacgtccacacggtcatcgtccagacctaatgaaccctaatatgcccactgcttagaaggcacttaataattatttgactgatgaatataaatacagaagttcaggtgcttcctctaagaccttccaatcaggctgctgtagtcagaggtccctaactgggagggtttaacaggcatgcagaaggcagcgtgtgaagactcttccgttttcaagcttttaggggaac

SEQ ID NO: 61254 - DNA, 652 bp, Homo sapiens
tgacaagagtacagacattagtaatcacttcactttaccttaaaggcattatgaaaacacaaccaccacaagaataacaatacatccatccaaggaagacctgtgctcccttgaaaaggaccattataatatctcacactcttaagatggcttttccttttcaaagtatttgaatgtcttatccttctgaaataggtcgaaactgaacacttgtaatccagagctgatgctggtgtgtgctctaggacacaggtctgcaaattttctctctaaagggccagatagtaaatatttcagagtttatgagccaacaggcagaactgagcatatgaagwagctagacaggaccatttaaaaatgtagatatttaaaaatgttaaaaccattcttagcttgcatggtgtacaaaaccgggcagcagattggatgtggcccatggcttgttgtttgttgacccctgttctaggacataaaaagtcaaaaggaatcattctctgacttccaagtgtttacagatctttatggtagatgataccttctggggtgcacatctgctattttgtctgaccagcatctgttccctgtttcagtgaaagccaaatttttccatgatgcacaggctcttagtctcattccacacttgccccacctg

SEQ ID NO: 61255 - DNA, 652 bp, Homo sapiens
tgacaagagtacagacattagtaatcacttcactttaccttaaaggcattatgaaaacacaaccaccacaagaataacaatacatccatccaaggaagacctgtgctcccttgaaaaggaccattataatatctcacactcttaagatggcttttccttttcaaagtatttgaatgtcttatccttctgaaataggtcgaaactgaacacttgtaatccagagctgatgctggtgtgtgctctaggacacaggtctgcaaattttctctctaaagggccagatagtaaatatttcagagtttatgagccaacaggcagaactgagcatatgaagaagctagacaggaccatttaaaaatgtagatatttaaaaatgttaaaaccattcttagcttgcatggtgtacaaaaccgggcagcagattggatgtggcccatggcttgttgtttgttgacccctgttctaggacataaaaagtcaaaaggaatcattctctgacttccaagtgtttacagatctttatggtagatgwtaccttctggggtgcacatctgctattttgtctgaccagcatctgttccctgtttcagtgaaagccaaatttttccatgatgcacaggctcttagtctcattccacacttgccccacctg

SEQ ID NO: 61256 - DNA, 643 bp, Homo sapiens
tgcagaaagatggcaaagctgaccatccttttagctcaggggtttccaaccctggctgcacactgaaatcacctggtgagcttcttaaaatcacaggtgctcacttccacctccagcaatgattgtgacttgctggactaaacttcatgactaaagttgagaaaggccaggctcatgaaaagtaacaacttccagggtgaggaaagacgagaaactttgaaagtaaacactccataaaatcaytgtagcaaacatcccatgacagataggaaggacacaggatgcagtcaggtggctgaatgcaggagcatccaaggtaactcaggactcaccatagccaagggaacgatgcccaccaggtccttctggctgacaaagatctcggacacggcgatgtctgtggtccccttccgtgggtactccacctgccacgtgatgggctgagtccctgaaaggctgctgaaactggctatttcaaagttcatctgcacaacctcattgaataaactgctgctcctggaagagagaaaagaaactggctttaagccaactttgttcaaaggacccttctctcctcataatagtacgcagaagataaagacaaagaaacacatctcagggatggctccagggttttggtggg

SEQ ID NO: 61257 - DNA, 651 bp, Homo sapiens
ttaaaatgtctattttaagtgtcaaaaaagttaaacaatgaccatagccaaacatactttatcattatatattattataaatacataatatatgcttgtatgtgacttatagtataggcatctattaatatattgtgtttttataaatatataatatatattataaagatctatttagccgtatatatttagcaatctgtgacctactttgcaagactagaattctcctctgttatggttagaaggattattaactacagggggaaatgggatttgggcttgtatttttccactattacataagcaaataaaactgccaagctgctgcctttatttaaatattccttaatgatgtgtgagacttttcctctgyatcttccttgttttgttctctctctctctgtctctcaaaacaactgtgccttttgtggaaagaaaattgtggcaaatattaaacaggaagctaagccagcacgggaaggaagatgtttgtcttacataaagccgatttaaactactctcatccttgcctcatccctgaagccacgtctggctcatgctgtggggagcactgtgctcagactcagcaaaagccctccctgctgcctgggacaattcctgcctccctgagagccttcctgggcagcacct

SEQ ID NO: 61258 - DNA, 639 bp, Homo sapiens
gtatgcattgtgtccagtaatattgagagttgtaccttccatgatcctttgccattgcatgatgaaacgctctatttatattaaaatgaaggtagtcctaggggagacatagagcagaatgaaacaacaaacagagctttagagactgaatatgtgaagtgacagtgatggcagaatggtagctctagttactgagtggcccagaggactttagaaagacttatagctccagccgcagtgccttgaacgtggcagctcccacaggtttaagtactcacagtacagcagctaatcaaataatttctcctcttgcgcatctcgacttggtatgtcattgtaataatatgtagctggctgagggtcaggggatttttttttcctcttctgttaaccaaatgaagcattttatcaaatgatcaaatttcttcatagcaatattgtgattacaatgatctgtttactccaggtaatgagaggataagccacgaaaatcacattaactttaatgtgatattacaccagccttgaaaakaaagaggagcaaattaattgagatactaaagttctttcctttaagtctaatttttatggtaatggaatggaggagactaagaggaacttaacacagtgtttccttgg

SEQ ID NO: 61259 - DNA, 896 bp, Homo sapiens
aaaattagccaggcatggcggtgcactcttgtagtcccagctactcaggaggctgaggctgaagaaacgctcgagcccaggaagttgaggctgtagtgaacygtaattatgccactgcactccagcttgggcaacagagcaagaccctgtctcaaaaaaaattaattgataaaatgagggtagaaattatacctcacatggtttcagcagaatcaagtgtaagaagctcataaaagtgctctgtgatatgcaaagctctctatacaattttgacatttgttatttttttaatcctcttaatcacaaaatattttatgctgtacctatcagatagaatcaggtaataataaactttccaagttgaaaataagtgtattactgactttgtatcaattttcagggaaaaaaatgtaaaaaaaaaaaaaacccagagatgaggacaaaaatactgcacccatctctgaaaatctgacatcacttttatataataagagaaaatattaatagtaaaactattttaatcattaaaaatagtaaacatattgatagtaaaaaagtaatatcatcttattcaaaattgcagtttttaaaatgtgaatgttatctgtgtcactatatttgtaccacatcagtgatccagaataaaaatttataaatagctataaataaacactttggagaataaattagattaggaatacaaagaaatatatttcatcactacctttgaggttagttttgataacatttaatttttctctaccaaattattcaactaaaatatgagataatcatctatggtcaaatgatctcagacccattaaatctttaaaattctgtgatttttagaatttgtttctacaatctagataatcacgaggctaatatatttgaca

SEQ ID NO: 61260 - DNA, 794 bp, Homo sapiens
tgtttcacaagattttgtcagaattaaataaaatattatatataaaacacttatcaatattctagggatatgagaagaggtatattgtagatatataagtgctataacatacattaatacatggaaaatcaaggagaccataatcagagctgatattccagcttagccatcctcatccaccttcatagctgatactcttctgtgacctttctgtgacctaggattcttgcctttccttttcttttttttcttctttaatgaaaatattacttaataataaaatacttcagaaatcatgtattacaataattcattatacaaaatgtatgtataaaatttcaactatatatagatattatatattgatrtataattatacatcaatatataatttttatatatagatatataattatacatcaatatataatttatatatagagatatataattatatcaatataattatatataatatctatataatcatatatattatatatataattgatatataattatatattgatatagatattatatatatagccaagttttcccaagaagttagaaaaatccaaaattaacaatctaactttgtacctaaaggagctagaaaaataaagaacaaagggatagatatatatctatatataccaagtttctttatccagtccaccattgataggcacctgagctgattccatgtctatattttatatatatagatatataatcagaattatatatatagttgagatatgtaatgtaattatatatctcattatacaaaa

SEQ ID NO: 61261 - DNA, 1017 bp, Homo sapiens
tgaaatggaagcaaaaccacttatatatgtgccctgtataccactgaagtgaatggaaaaatgggttaatagaaactatacatcctggaaattctgatttacaggaaacatattatttactctagtttcttatgtttatgacatgctgatttttttaaattgaggccttcaaaatgcttattttggcttcttcgtcatatgtagtatattaagcagttcttgaattgctgtaaagaaatgcctgagactgagtaatttataagaggtttaattggctcatcgttctgctggctggacaggcagtatagtggcatctgcttctggagaggcctctggaaggttacagtcatggtgggaggcaaagcagaagcttgcatgtcacatggcaaaagcaggagagagagaggtagagaggggggtaccatacacttttcagtgaccacatctcgagacaactcaccgttgcaaagatacagcaccaggagggtggtactaaaccattcatgagaactctgcccctgtgatctgatcatctcctacaagrcctcacctccaacattgaggatgacatttcaccatgggatttgggctgtgacaatatctgaaatataccataaaggttttggctccacgttttttgtttgtttgtttgtttttactggaaagacaagtgaaagttataaccagtgtattagggaacattccataatgtaatcttaaacagtcactgaagtatatttaagagctagaaaatgagtctctaacatatttctaaattaccataaagaggagtgaatcctttttggatacaagctctcccagagcaagatagaaatcattaggaaaacaatcaattttcaagaaacatctgccatggatatgttgtctattaggggtctagtactttacgtttattttctttattcctaacaaaaacccttggatgtaagtgttcatggtgtgagccatttgatatagtaggaaattgaaactctgagaagcgacatgaattaagtg

SEQ ID NO: 61262 - DNA, 1030 bp, Homo sapiens
  misc_feature (1)...(1030): n = A,T,C or G
taagnnnnnnnnnnnnnnnnnnnnnnnnnnnnnnnnnnnnnnnnnnnnnnnnnnnnnnnnnnnnnnnnnnnnnnnnnnnnnnnnnnnnnnnnnnnnnnnnnnnnacaggaaataaataatatccctgtgttttgaaacaacatctggctcaaactcctccttttccatggaggaaccacaattctgctttttatgaatgttggtcacttcttttggtcacttgccattctttggtgttttgccaattatgtgtgtattcctaaacaatagtttagttttgcttatttttgaacttcatataaatggaattagyatgtatgcttttgtgtcttgcatttttgcatgatattaactttaagattcatttatattatcgtgcgtatctctagtctgtttacttttattgctgtgtgtatttcattgtgtgaacatctcacaatttatccattccaatgtttttcctgcacgggctattgcaaacaatgttgagtatataagaccatcaggatacatgtacgatgtcaaatgtttttgtgagagaaaggtccaaaggcagccagtgttcccaagaagaagaagaacgctgtgcttggtacaggaggtgctgaccagctcactaagcaaattgcatgcaagagctcagagcgcaccggactgtacctgttccctctttactgagcacaagtaaacctttctcaaaactgcttaacaggctgggcgtggtggctcatctctgtcatcccagcacttccggaggcagaggagggtggatcacctgagatcaggagttggagaccagcctggccgacatggtgaaaccctatctctactaaaaatacaaaaattagctgggcatggtggtgggtgcctgtaatcccagctactcaggaagcagagtcaggagaattgctcgaacctgggaggcagaggttgcagtgagccaagatcatgccattgcactccagcctgggcgacaggaacaaaactccatctcaaaaacaaacaaacaaacaaaacaaataaaaaacag

SEQ ID NO: 61263 - DNA, 1030 bp, Homo sapiens
  misc_feature (1)...(1030): n = A,T,C or G
taagnnnnnnnnnnnnnnnnnnnnnnnnnnnnnnnnnnnnnnnnnnnnnnnnnnnnnnnnnnnnnnnnnnnnnnnnnnnnnnnnnnnnnnnnnnnnnnnnnnnnacaggaaataaataatatccctgtgttttgaaacaacatctggctcaaactcctccttttccatggaggaaccacaattctgctttttatgaatgttggtcacttcttttggtcacttgccattctttggtgttttgccaattatgtgtgtattcctaaacaatagtttagttttgcttatttttgaacttcatataaatggaattagcatgtatgcttttgtgtcttgcatttttgcatgatattaactttaagattcatttatattatcgtgcgtatctctagtctgtttacttttattgctgtgtgtatttcattgtgtgaacatctcacaatttatccattccaatgtttttcctgcacgggctattgcaaacaatgttgagtatataagaccatcaggatacatgtacgatgtcaaatgtttttgtgagagaaaggtccaaaggcagccagtgttcccaagaagaagaagaacgctgtgcttggtacaggaggtgctgaccagctcactaagcaaattgcatgcaagagctcagagcgcaccggactgtacctgttccctctttactgagcacaagtaaacctttctcaaaactgcttaacaggctgggcgtggtggctcatcyctgtcatcccagcacttccggaggcagaggagggtggatcacctgagatcaggagttggagaccagcctggccgacatggtgaaaccctatctctactaaaaatacaaaaattagctgggcatggtggtgggtgcctgtaatcccagctactcaggaagcagagtcaggagaattgctcgaacctgggaggcagaggttgcagtgagccaagatcatgccattgcactccagcctgggcgacaggaacaaaactccatctcaaaaacaaacaaacaaacaaaacaaataaaaaacag

SEQ ID NO: 61264 - DNA, 1030 bp, Homo sapiens
  misc_feature (1)...(1030): n = A,T,C or G
taagnnnnnnnnnnnnnnnnnnnnnnnnnnnnnnnnnnnnnnnnnnnnnnnnnnnnnnnnnnnnnnnnnnnnnnnnnnnnnnnnnnnnnnnnnnnnnnnnnnnnacaggaaataaataatatccctgtgttttgaaacaacatctggctcaaactcctccttttccatggaggaaccacaattctgctttttatgaatgttggtcacttcttttggtcacttgccattctttggtgttttgccaattatgtgtgtattcctaaacaatagtttagttttgcttatttttgaacttcatataaatggaattagcatgtatgcttttgtgtcttgcatttttgcatgatattaactttaagattcatttatattatcgtgcgtatctctagtctgtttacttttattgctgtgtgtatttcattgtgtgaacatctcacaatttatccattccaatgtttttcctgcacgggctattgcaaacaatgttgagtatataagaccatcaggatacatgtacgatgtcaaatgtttttgtgagagaaaggtccaaaggcagccagtgttcccaagaagaagaagaacgctgtgcttggtacaggaggtgctgaccagctcactaagcaaattgcatgcaagagctcagagcgcaccggactgtacctgttccctctttactgagcacaagtaaacctttctcaaaactgcttaacaggctgggcgtggtggctcatctctgtcatcccagcacttccggaggcagaggagggtggatcacctgagrtcaggagttggagaccagcctggccgacatggtgaaaccctatctctactaaaaatacaaaaattagctgggcatggtggtgggtgcctgtaatcccagctactcaggaagcagagtcaggagaattgctcgaacctgggaggcagaggttgcagtgagccaagatcatgccattgcactccagcctgggcgacaggaacaaaactccatctcaaaaacaaacaaacaaacaaaacaaataaaaaacag

SEQ ID NO: 61265 - DNA, 873 bp, Homo sapiens
aaaattcaaaactgaagctcccttcttaagactgcatgttaaggaaatcatacctttatctttaaccttctttattattattattttttttgagacagaggcttgctctatcgcccaggctggagtgcagtggcatgatcttggctcactgcaacatctgcctcccaggttcaaatgattctcctgcctcagcctcccgagtagctcgtattacaggtgtgtgccaccatgcctggccaatttttgtatttttagtagagatggggttttgccatgttggccaggctgctctcatactcctgatctcatgtaatctgcctgtcttggcctcccaaagttctgggattacagacatgagccaccacgcccggcctctctctttaaataatgtggaaggagaagaatgatttcagtgcaggaaaagagaaactgaagttagtttggcacagattctcagttctgcaagttaaattgcctctatttcagatttttctgcactgaggtatttacacgtttattaattgaaaggtaaagtaatctgacataaagacagcctctagtgggatggcctgtgtaagtggtctgctctgttacagcatctccactgctttctcagggccatcctcattgttgtggggaagttgtgttaggacgtggtgctgcctctggccatatttgcttggtttagaggtggatgagtggctcttcctgggccagggatgtctccatgctgctcctggccatagtaagtccttggttcaggaataaccaccagacccaaattaggatacagctgttttctgcgaattttgcaagtggaatgaagagacraaaccatctcttaagtgttaggattgtgagaggaaaagttgg

SEQ ID NO: 61266 - DNA, 1064 bp, Homo sapiens
aagtagaggtctactacattattttaatgtttgcatagtgttccgtgggaagaaacaacataattttaactactgccttcttactaaatatgttccccacatttcactgttataaacaatgctgccatggcatctttgccctaacacccttgtgtgcttagtcgggcaggtattttgtaaatctcccccagaatcaygtggtcccagtctcgcttgtggggcagcacaccagagcacaaaacgccgtaactgcctactcccatcccagcatcttctcccattccccaatttctccccgcttttcttctctcctctccccttttccctttcttctttatcttctatgtctgtctctcaaagagaagctttaagaataaggaaatcccttcgcttccctctttcctctatgccaaactctggaatagaacgcaaagatgaaaacaattgtattttaaaactctagtttctgatctgtcttcccatattttctcttctcctgaggaaaaattctgcctgcccctgtgggaaagttgccagtgaattgtcctatcctggctgagccccgaggcaggtcttgtgtctattctattcaggatctgtgagcgcaacttaggcaggtgcacaaatgcctacttcttctttcagggtaaggcaagaaaacaggaggcaaaagaatggagaggggaatcaaagagagtggaaggagaagagaatgacagggaggtggaaagtgggggtttctcgcagagatcaaaataaagccgcagcctccacccctccccaccgggagtgccaatcacattcgacacccctttacagagacatccacgcaattgtgcatcccgaaatcctcaggccttttttttctttacgatttcaagtaaaattccatttctgctacaatgcctgcaggccacaataaataatatctccggcaatttcagctttcaatgtcgccacaatcctcgtgccaaatttaatcagaaaagctgaagttgcaaccccctcagctatgaatgtataaatgtgttttccctttcaccatataattgggataataaatg

SEQ ID NO: 61267 - DNA, 600 bp, Homo sapiens
aacccaaccctagcaacacattataaccaccactaaaagaagcgtttgaaatgtagtaaaatgtaatgaatttgttatggtacttcaatacctaacagtaataacactaaccaaaattcatataagttgcgagaattcattgatcttgatttgaagttgaatatcctgaattcacagtcgtgtttaatattaatttcctctggatccaccaaatgggtacttattcagtccacacctcagttaacccgagtctaaaataaagataggatgtgaacatcatcttcctttttattagctatctgtgtagtggagtttgctgaagaaaaagaaaagaaaaactactgcataaatttaagatgtatcattgttctaagtgccccatacctatttataaaactaagactactagaagtgaaaaccctcatctaaatayccagcaactatttaattataggatagtccgtaagttatacatctatgcacataatgtgttctttaaaaacgtgtcccacataactctaaggtaattctccaaagaggcgattagtctgttgtgtcacaggatattatgttattaataatacacagatgaaagaaaat

SEQ ID NO: 61268 - DNA, 2343 bp, Homo sapiens
tggtatttgaagaacagaaaaataatgattaaactggtgcaagtcatcattaaaatttcaggaattgttaagtagtttttgtgtactctattgcctttttgcttcatgcctttttagaacagaaattatgaggcagtttctactgttgccaggactattcagtgtggagtttctgtatgaatacaaactgcctccatttctttatctaacctgagtttaaaattatcccaaagaatttgttttaggaaataaaaaatgataataaaacatttcagagccaaagtgacatgacataggagatataaattgtaatgcttttctactccttagtttccatacagacaagtaaatggtatacaggttgtacctatataaaaaggtacaatatatgtataatataggcagtattctatattaaaagggtacaagaaaattgaagaatcactgcatagaagacataataaaatgaacaaagatatgtaaataaacctgaaacttagtaacagaaaggactgtagagatcatagaatctaatctttttttcagaagagaaatttcaaatccggagaggttacctgagttttccaaaagatggttagtggtcatggatcataaatatcataaagatagtgacaaaaacaggattagaacaagacttttctactaaacattctaaaggaatgtttaagatgatatgtaagtctcaataacagtttctattcatagttgattgtggatttcaaatatagtctttccccaagcctttctctataatttttccttctgttgccttctgcatatcacccattccctgagttatctactttttttcctctgaagcgcctgcattcctcatggagaagagacaattccctaggcaagaaaattggtggtcagatgggaagcacaactgcttatgaaatgaataaagaagaagataggagtttgggggagtgggcataggagagaagtcacaggagtgtaatttgacaatgttggactcaaatgttcaagcttctccctaaagagtcagcagtcacccagttcctagaggaggtatctcaaaaatcctttgtactttaacatcttattaatctcatacacatgcatatgtgtgtatgggtgtgggtgatttgtttcttccctcaacctgcaaaattataaattccctagagttgtaaaggaacttggaatcttcagcatggtattggacacatagcagagattctataaattacatgttgattggttgggttataattttatgtgcatgtctgatgttctcagatctggagttatagatctatcctaattgtctgaattaaaaacattctattcactatttcacttattcattattaagtgcttattrtgtgccaggcaagtgctgcgctaaaaccttgaagctgcaaagattttactgcctctactatatcctccaccaccacaactaatgaaactgttgctgctgctgttgctaagaaaaatgataataaagatgaaggcaatgattactaacattcgttgagtgcttactttctctcaggcattgtgctaagtgctttactcatataatccttcgagcaaatataggaagtaactactattattatttttgttccattgttgagaaaactgaagcttgttgtccagcatcacattgctcatagctaacacatctagggttaggtatcacagctggggttaagcaagtcatctgggaggactgcaagcagtccagctccagagctacttatgatagagggagcatctctgccctctaggagctcacaatatggagcaggagaacagtacatgactggatgtgatgtgtcaattataatttttaaattaagtgcagtgaatgcacaaagactgacatgctgagtggtcttctagagaagttatggagtcttcatagagcaggtaaattatgacataagtctaataggagttcttagcttattttttatatagtaccttttgtagtctgataaacttttcacagacaatatttttaaatgcatgaaataaaatacacagaaaactatatggaaatatagatatttataaaataaaatttttatgtagaaataattgtttcttcattaatgcattaaataacaagatctcgtgatgactctaataattttcctaactcaaaaaagtaatgaacctaaatgtttttgctatatctacaaaaactgtgacctgttatgaaaatacctaatttctgttggtgacaaagtcatagcttctgctgatgatacagaggcttgcagcctcacaacataatttttaaataaccctaaatattcagttagagggtagcaaaagtaaaca

SEQ ID NO: 61269 - DNA, 482 bp, Homo sapiens
aagcaagactgtctcaaaaaaaaagagagagagagagagtagactgaaagaggcaagcatggaaacaaggaaaccagttaggagactatggagataatccaggtgagagaygatggcagatggttccagggtggcagcagtgaggagtgaaggacagactcggatatattctgaagttgaatcaaccagacactggaggacaggatgatcttggaaaatcttgggactactgcagaatcgaatgaagctaaatggcactaaattccaaaatccactgtgaaatcctgggatcagggatttgttcatctctgtcacctattgtccccacccagtacttggcatataatgcggatgtaaaatgtcttcaattcttgaatgaataaatgtggaactgaatatattaaaaagccaaaaacgctgtagtttgataggtcattaggagaccaaaaagcatgtggtactagatatgttttactaataat

SEQ ID NO: 61270 - DNA, 413 bp, Homo sapiens
tcaatgacattctggaaaatgtttaagaatcagcactctgaaaaatgattcctgatttgtagtgtttgccaatttccatggtgtaaatactcccaccatggccaatttcaagttaccaatgtgacattactgaatgtggagttgcaaaaagatgtgcataattagtcctcatgagctagtgagcrccagctccaggacaccatactcaaagtaatcatttcgtgactaatattgcactcaataaatagcaatgcttgttgcagagttgttatgtaagttaaactttaaaataaatcttaagccagtaataactgatggaatatagggatttttgtacttactgaccataaattgaagtctttgtcttgtaacctgaattcctacttcggcctgttgctgttgttttatgtttg

SEQ ID NO: 61271 - DNA, 686 bp, Homo sapiens
atcaaatagaacttccagccaaatctgactctgggtcctctaaattccacctgattttatagtcagttaacagcaagggtgtctcccttattagtgaagcataggggccctttacagcctttgtgtccctgagtccttggcttctagcacagtgcctgtaggcaggacgttacaaaattataatccaaatccagttttttttttaattaaatgatttctatttacaaaacaagacttttttttctgggttttctattgaccactccaccctgattttaaaatctaaggagaaaatgacccgtgactctgtgattacccctctcactggagctctgttaggtttgcagagtctctgccaactcctaacatctggcacctgacctcactcttccaggattcagtttcctcatctgtgatagtccctttctggtcttgcaaaatgtgtttctgtgccttttacaagaacatgttggactaaagtttccagggacataaactgtcagacctggatgggstgggggacctcatgagcatctggctcaagtttcctaacgtcccttgagtctcagttctctttgagaatttgatgaaagcggtgactgctgaacctagaaaaaggcaccagaaggcacaacggtggatgcaatctcaggggtttcgtgactctcctaaagcccctctgagga

SEQ ID NO: 61272 - DNA, 2109 bp, Homo sapiens
tttttcaaacctaacctctccatccatttttttttcccataccaccactaccatcaccactttgctcataaaagtaatggtttttattggtttctggcttattttttccagtgtttcttttgcaaaataatcaaatacatgtaactatacttacattttatcgtttcttatataaaatgtagcatcttgtatacccttttctatacaagaagatagtttttaatattcagtcttcctaggaaaagatttatttaaataactttaagaaatctgtgactgtggtatattacttcattgaactctctgtgttttttgggactaaccatgtttaatttaaatataagaaaagtacatagttaaggttatggtaaatattaaaacaaataattgcatatagaagcataattctaaactatgaaatactattgaaatatacaatagtcagtgacataagaataactgactttttaaaagaatgcacatttaaaatgaaaaaagtaattatctgttttgaactagtttaaggaataaaagggcatttatctactcatgtaattgtctgataggtcaatgctagaatctttctccaggataacaggagctggagacttaaatagtctccccatacatcatattaataaatttaggacctgtccctagtacagataataggttggagagaaaagttaaggtygagtgttcatgaagaatttggttgtagtgaaaaatttacagcattttaaggtgctgtttgttcttcttgatttctaacttggtagatcagtaatttaaaattcaacctttgatatatagaccaataacacattcttgatttaaggacaataatcactgcagttgtgaaaataaacaccactacttatactgcctggcagggtctgcattgtaaaacaagcctgagttgtgtttatattgcatttggattgatggggaatgtggcattcatctgccaggggtcacttcaggcttccatggcaggaggccatataatttaaaaaattaaaaaattaaattaaattaaaaagcccctgcagatatttgctagtactgcttgatactcaggaattcaggaattgaatattatagggtaaggtgtgctttaaacacaatcttaggattctgcaggcacaatgacagaggaagagacacgggccatggaatattcagatgtggagcagaatcttaattcatcgacttatcactatgcatctttgacaagtaactcacaactctgaaatctcatatttctcatctgtaaaatcagtataatgatatctacctcatagggtggtttcgaggtttaattaaggtgctatgtagagtgtctaacatacaaagaaagccagataaatgatagctactattcagactcagtcatccgataattgcatagtctatgttaatatatctttatttgactgtgcatttcaacatggccagtgcctgacaagtgatattcatattgatgactctgaggctagcctgttaagtccctaagggattcttaatccacaaataataaatggtgatgaaaagggttttagcgctaatgtatttaatcagtttttattagcatcacattgataaattcaatgggaatatctcacagtcttattttactggccttctctgcagcttttgacactgttcaaactctttcttgaatattagggttttaaaattttagtatgaataacacattttccccaacctccctaactggtctttccaaatatttttgtgggcaacaccttttttttttacttcttaaatattggttttccttaggcatctttcagaagacatcccttctcacctcactaatctttttagacaatgtatttcattcctatgacttcacttgtcatttaagtcatggccgctgagtaaggctgtgcagtctgtacactgcccgaaagtgctaggccaagagagagagagtgctggcagagattcagtctgtgttctgcttgccaggatgtgtactccagggccagtatttacctagaggagggctttttctaatttatacaaaattattccatatgtgagcaactgcccttttctaaatgacacttacaaattcatgca

SEQ ID NO: 61273 - DNA, 1005 bp, Homo sapiens
gatgatttcataacccagaatattcaccaataattagataatattcattcaacatttgttttttgagcacctgagtaaatacaatccctctcggcacccccgtgttatatgcttccttgtagaagatgtagaacatttcatacagtgaccagtcctgcacacatttaaatatacaatccacgttaagaattcaaaatggaaaaaaatagaataatgactaatataagcaataatttgaatgacaaattaaattttgggtaaaataaaaccaaggcagtccagagacaagagtttcttgtagtttaatgtattcaaggaaggttctgtggaggaggcaggatgtaaaggaaagatgggccttggtgaagagcggtagaaactcttttctaccgctcttgttttgaggagattggcttcagccagagtatgaagacagagggtttattgctggcaccattactaaaatggggcagtggaaatatgtatgttgcgtgttggaatagaaagattaaggaaagaagaggcaagaaggcagatctatagttgagacaggtttattgacagtaaatctgagaagggcttctggctggcagggtcaggagcaaacttttcttacagcctgaggcttttttaaagggccaggtggagaagtgtgctttgaagcaagattctgttagggaggggttgggaaagtgctggctgttctgttacagttagggcccttatgttctgttgaagctatggtcagcgttgacatttgcagtttggccaagtgtcaacagacagttctgagaaatggaaacttgatactttaagatggtgcagtctcgytaagatggtgatattcttgttctatcattgagaatattataaaaataatgatgatgctgttgtgtttgggaagtgcactatggtaaagctaaagggctctggtattggattaatttggcttctaatccaagcccagtacttattaactgtgtgactgaaaaacctccctaaact

SEQ ID NO: 61274 - DNA, 659 bp, Homo sapiens
actatgctatttcatactacaagttcattgatggaaaataatcatgtgtgcacctagcatgaaaatacctgtgtcggccgggcgcagtggctcacrcctgtaaacccagcactttgggaggctgaggtgggcagatcacgaggtcaagagatggagacagcctggctaacatggtgaaaccccatctctactaaaaatacaaaaaattagccaggcgtggtggtggacacctggagtcccagctacttgggaggctgaggcaggagaatggtgtgaacctgggaggcggagcttgcagtgagctgagatcgtgcccctgccctccagcctgggcgacagagactccgtctcaaaaaaaaaaaaaaaaaaaaaaaaaaaaaaaaaaaaaacagatcaggcattagattatcataagaagcatgcaacctagatcccttgcatgtgcaggtcaaaaaaggattcctgctcctatgataatctaatgccgccactgatcttacaagaggtggagctcaggcagtaatgcagtaatgctcacttgccctctgctcacctcctgctgtgcgacctgattcctaacaggtcatgaaacagtcgaagtctgtggccctgaggttggggacccttcctataaaggaatatctgaatatataaaggaa

SEQ ID NO: 61275 - DNA, 1214 bp, Homo sapiens
atacaaaaattattattgatatattttttattctttcttttgtcatactaaatctggtatatattttacccttacaagacacctcaaatgctcaatagcccacatgtacctactggctactctattagcatagcttagagagatatagagactaccaytgactttttaaaaacagtttattttgaactaattataggttcacaagatgacgagaaaagaggagtaaggccctggatacccttcattctgtttccagtaatactgatatcttacataactgtagtacaataagaaaaccagaaaatttattctggtctgtcattgccttttaaacacagccttttctaccctatatacctagatttctctgagctcacaagttgaataaggtctttcttctcctatggaaataaatgaataataagagagataggctaaagctatttcattccagtttgctttctcctagagtgtatagcagatgtcaccttccacttataaaataaagatcttttccatctacccactgcagtgtattatactcttccttattttagatagttttgcttttgctaatgtggtaacaagatcctgggatatagaaaaagtcactcttttctatagctctcacacatacattggtttgcacagagaagatgctcagtgagtatttattgagctagattcttgacataatccaactgttatgtgaaaggcatttgttattcacattttcaagctactcaactgttgcatgcctgaaaggaaaatgacataacctttgaataagtttgatggattgcttttctcaggcaagaaagattgtactttgatttacagggcacacgtaaattagccagtacggaatattttatcaatctaaagatacaagttctttgcttaactttgttttaattagaattaagtctttgaatacttgttatccattccatggatagttttattgactttaacatctctacacttcaaaaagagaaaagcagagatgcaaagacctcctaggcaaactagcctatatgattattccgctaataattggtgcatagatacaaaccattgctttatcatcccaattcctgcagcctagatatgtttaaacagctccaaaagctacacatagattaaaacccaagtacctcagctctgtgattagctgtatgtctagattctgggcaaggccttgactacaggag

SEQ ID NO: 61276 - DNA, 1214 bp, Homo sapiens
atacaaaaattattattgatatattttttattctttcttttgtcatactaaatctggtatatattttacccttacaagacacctcaaatgctcaatagcccacatgtacctactggctactctattagcatagcttagagagatatagagactaccactgactttttaaaaacagtttattttgaactaattataggttcacaagatgacgagaaaagaggagtaaggccctggatacccttcattctgtttccagtaatactgatatcttacataactgtagtacaataagaaaaccagaaaatttattctggtctgtcattgccttttaaacacagccttttctaccctatatacctagatttctctgagctcacaagttgaataaggtctttcttctcctatggaaataaatgaataataagagagataggctaaagctatttcattccagtttgctttctcctagagtgtatarcagatgtcaccttccacttataaaataaagatcttttccatctacccactgcagtgtattatactcttccttattttagatagttttgcttttgctaatgtggtaacaagatcctgggatatagaaaaagtcactcttttctatagctctcacacatacattggtttgcacagagaagatgctcagtgagtatttattgagctagattcttgacataatccaactgttatgtgaaaggcatttgttattcacattttcaagctactcaactgttgcatgcctgaaaggaaaatgacataacctttgaataagtttgatggattgcttttctcaggcaagaaagattgtactttgatttacagggcacacgtaaattagccagtacggaatattttatcaatctaaagatacaagttctttgcttaactttgttttaattagaattaagtctttgaatacttgttatccattccatggatagttttattgactttaacatctctacacttcaaaaagagaaaagcagagatgcaaagacctcctaggcaaactagcctatatgattattccgctaataattggtgcatagatacaaaccattgctttatcatcccaattcctgcagcctagatatgtttaaacagctccaaaagctacacatagattaaaacccaagtacctcagctctgtgattagctgtatgtctagattctgggcaaggccttgactacaggag

SEQ ID NO: 61277 - DNA, 1214 bp, Homo sapiens
atacaaaaattattattgatatattttttattctttcttttgtcatactaaatctggtatatattttacccttacaagacacctcaaatgctcaatagcccacatgtacctactggctactctattagcatagcttagagagatatagagactaccactgactttttaaaaacagtttattttgaactaattataggttcacaagatgacgagaaaagaggagtaaggccctggatacccttcattctgtttccagtaatactgatatcttacataactgtagtacaataagaaaaccagaaaatttattctggtctgtcattgccttttaaacacagccttttctaccctatatacctagatttctctgagctcacaagttgaataaggtctttcttctcctatggaaataaatgaataataagagagataggctaaagctatttcattccagtttgctttctcctagagtgtatagcagatgtcaccttccacttataaaataaagatcttttccatctacccactgcagtgtattatactcttccttattttagatagttttgcttttgctaatgtggtaacaagatcctgggatatagaaaaagtcactcttttctatagctctcacacatacattggtttgcacagagaagatgctcagtgagtatttattgagctagattcttgacataatccaactgttatgtgaaaggcatttgttattcacattttcaagctactcaactgttgcatgcctgaaaggaaaatgacataacctttgaataagtttgatggattgcttttctcaggmaagaaagattgtactttgatttacagggcacacgtaaattagccagtacggaatattttatcaatctaaagatacaagttctttgcttaactttgttttaattagaattaagtctttgaatacttgttatccattccatggatagttttattgactttaacatctctacacttcaaaaagagaaaagcagagatgcaaagacctcctaggcaaactagcctatatgattattccgctaataattggtgcatagatacaaaccattgctttatcatcccaattcctgcagcctagatatgtttaaacagctccaaaagctacacatagattaaaacccaagtacctcagctctgtgattagctgtatgtctagattctgggcaaggccttgactacaggag

SEQ ID NO: 61278 - DNA, 1214 bp, Homo sapiens
atacaaaaattattattgatatattttttattctttcttttgtcatactaaatctggtatatattttacccttacaagacacctcaaatgctcaatagcccacatgtacctactggctactctattagcatagcttagagagatatagagactaccactgactttttaaaaacagtttattttgaactaattataggttcacaagatgacgagaaaagaggagtaaggccctggatacccttcattctgtttccagtaatactgatatcttacataactgtagtacaataagaaaaccagaaaatttattctggtctgtcattgccttttaaacacagccttttctaccctatatacctagatttctctgagctcacaagttgaataaggtctttcttctcctatggaaataaatgaataataagagagataggctaaagctatttcattccagtttgctttctcctagagtgtatagcagatgtcaccttccacttataaaataaagatcttttccatctacccactgcagtgtattatactcttccttattttagatagttttgcttttgctaatgtggtaacaagatcctgggatatagaaaaagtcactcttttctatagctctcacacatacattggtttgcacagagaagatgctcagtgagtatttattgagctagattcttgacataatccaactgttatgtgaaaggcatttgttattcacattttcaagctactcaactgttgcatgcctgaaaggaaaatgacataacctttgaataagtttgatggattgcttttctcaggcaagaaagattgtactttgatttacagggcacacgtaaattagccagtacggaatattttatcaatctaaagatacaagttctttgcttaactttgtkttaattagaattaagtctttgaatacttgttatccattccatggatagttttattgactttaacatctctacacttcaaaaagagaaaagcagagatgcaaagacctcctaggcaaactagcctatatgattattccgctaataattggtgcatagatacaaaccattgctttatcatcccaattcctgcagcctagatatgtttaaacagctccaaaagctacacatagattaaaacccaagtacctcagctctgtgattagctgtatgtctagattctgggcaaggccttgactacaggag

SEQ ID NO: 61279 - DNA, 615 bp, Homo sapiens
cgatgggcggccaggcagagacactcctcacttcccagacggggtggcggccgggcagaggctgcaatctcggcactttgggaggccaaggcaggcggctgctccttgccctcgggccccgcggggcccgtccgctcctccagccgctgcctcccgggcggccgaggtgaaatatttctacaaggaaaactacaaaatattgatgaaagaaattgtagacgacacaagcaaatggaaaactatcttatttaatggatcagaagaattagtatcattaaaatgaccataatgcccaaaacaatctacagatttaatgcaatttccatcaaaatgccaacatcgagtttcacagaattggggaaaaaaatcttaaaatttatatggaaccaaaaaaaatcccaaatagtgaaagcaatcctaarcaaaaagaacgaagctggaggcatcacattaactgacttcaagctacacaacaaagctacaaaaacaccatggtactgatacaaaaatagacacatagacaagtggaacagaatagagaaggcagaaataaagcagcatacctataaccaattgatcttcaacaaagtcaacaaaaacaagctaatggaaaaa

SEQ ID NO: 61280 - DNA, 693 bp, Homo sapiens
aaaaaaaggctgccatctccaaacatacgtctttatgtccaggcagataacagaaagagaacttagcctcttagtttctcagtgaagtttgaactacatatttaaattggcaatacattttgggacacttagttgcagcattcattaaacaattatgaagaaaataccaccacgttgggaggccaaggcaggtggatcacttgagttcaggagatcaagaccagcctgggaaacatggtgaaacgctgtctctacaaaaacatacaaaaattagccgggtgtagtggtgcgtgcctgtagtctcagctacttaggaggctgaggtgggaggatcacttgaacctgggaagttgaggcagtgwgtcgtgattatgccactccaacctgggtgacaaaacacgactttgtctccaaaaaaaaaaaaaaaaaaaaaaacagaaaaagaaaaagaaaaaaaataccagcatcatcttggtcagtgatttaaaatgctatgtacctgatgtttccatgatttattgctgtgtaatagatcaattcaaatgttagcagcttaaagcgggacttgttttattatatcttaagatcttgtgtatcaggaattcaggcaggactcacctgggtgatttttccactccatgcggcattgattgaggttgctcaggtatttggctggcagatatgttgtgcgga

SEQ ID NO: 61281 - DNA, 693 bp, Homo sapiens
aaaaaaaggctgccatctccaaacatacgtctttatgtccaggcagataacagaaagagaacttagcctcttagtttctcagtgaagtttgaactacatatttaaattggcaatacattttgggacacttagttgcagcattcattaaacaattatgaagaaaataccaccacgttgggaggccaaggcaggtggatcacttgagttcaggagatcaagaccagcctgggaaacatggtgaaacgctgtctctacaaaaacatacaaaaattagccgggtgtagtggtgcgtgcctgtagtctcagctacttaggaggctgaggtgggaggatcacttgaacctgggaagttgaggcagtgagtcgtgattatgccactccaacctgggtgacaaaacacgactttgtctccaaaaaaaaaaaaaaaaaaaaaaacagaaaaagaaaaagaaaaaaaataccagcatcatcttggtcagtgatttaaaatgctatgtacctgatgtttccatgatttattgctgtgtaatagatcaattcaaatgttagcagcttaaagcgggacttgttttattatatcttaagatcttgtgtatcaggaattcaggcaggactcacctgggtgatttttccactccatgcggcattgattgaggttgctcaggtatttggctggcagatatgttgygcgga

SEQ ID NO: 61282 - DNA, 638 bp, Homo sapiens
ttaagcaaagggaaatcataaaagatccagttgacattctttttgtctttatcaaatttagttctcaataacaatagcataattggcaaacatttaatgactataaccttcagttttgttttacttaacacagtactgatttgtcaggattttgattttatgatattccagctctgtgaagaaaaggtcatctggtgtgtgcctctcatttggtacacacagataatgtgtgttcactcaatggatatgataccttgacattttagaaaacaaaatgaatgtgcgctctggaggacaatgccttttaattgatacgttactgtcttggtgcgtttatactgctataaaggaatacctgaggctgggtaatttgtaaagaggtttatttggctcatagttctgcaggctatacaagaaagcacacatacacacacacacaaaaggcatggcaccagcatctgtttctgatggcctgcttccactcatgcatagtggaaggtgaaggggagcctgtgtgagaagagatcacatgatgaaagaggagaagagaggggccagactcttgaacaactagctcgtacaggaactaagagtgagaattcattcattacagcagaagtcmccaagccattcatgag

SEQ ID NO: 61283 - DNA, 697 bp, Homo sapiens
aaagaaaagaattaatgtaggcatttcagataccgttgtaagggttccgtgtggaaaaaactgtgaggcaggaaccaaggattctcaaaacctgcttgacrtatgctaaaggctagctttaaatatattttatttagtatagtagttttatttgaaaggtgcaaaggaggcttcctgtaaattatcaagcagttttcctacctcagcctctcaaagtgatgggattataggcatgagacactgcacttaatcccagtgtacagatcttttattacctccttggttaaattcttttctaagtattttattctttttgatactataataaattgaattatttttaaatttttttcttggatagtttattgttaatgtatacaaatcctaccaaacgtttaaatgttcatgttgtattctgcaactttactgaattcatttattagttctaacagtttcttgatgtagtttttagagttttctatatgtaagatcatatcatctgcaaacaaagacaattttacttcgtcccttccaatttgtatgtcttagatttcattttgttgcctagttattctgactaggacttccagtattatatattgaaaataattggtgagagtgggtgtattagtcggtttacgtgctgctgataaagacatacctgagactgggaagaaaaagaagtttaattggactt

SEQ ID NO: 61284 - DNA, 1057 bp, Homo sapiens
acgaatagatgctatgctcttattagtaaataataataataataataacggctaatgctcttctggggccttctacaytctaactcattttattagtctcatatcacctcctgagatcggtcagtggtcatctgcattagaaggattcacccagatcttgaggttgaggggtgatgaaggaaggcacgattctgcagtactatctcatgagctaactcagatacattgagtttgaatgtgttgacctgcaaagctaacaattttattttaaaaattctaaggtaaatctatttttgtaaaactaaagttttaagcagcattttttaactttacttatcctattttccaaaataacagcttacctgcccaatagatgaaaaagtagaagagaaattcaatttttgtctgaataatttccatgtccctgagttgagtttaaccagagataaagaacagtgctcttaatttattttttacttttaattacaaataattttctaattttcattctcttttcaaagtttcttttaaaactttaattttcaatctacagataaggcttatactactttttaaataaaaaataaccttaaagttttatagttgtaaattacaaatgctttcaattaaaaggaaattttattcacaagctttaaaacaaagaactagagagttataaagttgcataagattgtacaatatcaggaaaattggattttaatccaaaaatcacttaatgtttcttggtaaattaaactcctctggaagaaattgaatttttaatggttttagtttaaacatgactatatattttattcattttgcaatagtgcacttaatacagagcaaaatgggcaataagcaagacatttaattcacacagacaattgaatttaccacaaatgctaaaatgggtgactctttctaaagaccatatatttactttgtaacccaggtaagttgttatctacactagtatttggaagacagttagatttatttttaaattcttatagttaaaataagtagtttcttcaaataagtttttgtaaaacac

SEQ ID NO: 61285 - DNA, 1057 bp, Homo sapiens
acgaatagatgctatgctcttattagtaaataataataataataataacggctaatgctcttctggggccttctacattctaactsattttattagtctcatatcacctcctgagatcggtcagtggtcatctgcattagaaggattcacccagatcttgaggttgaggggtgatgaaggaaggcacgattctgcagtactatctcatgagctaactcagatacattgagtttgaatgtgttgacctgcaaagctaacaattttattttaaaaattctaaggtaaatctatttttgtaaaactaaagttttaagcagcattttttaactttacttatcctattttccaaaataacagcttacctgcccaatagatgaaaaagtagaagagaaattcaatttttgtctgaataatttccatgtccctgagttgagtttaaccagagataaagaacagtgctcttaatttattttttacttttaattacaaataattttctaattttcattctcttttcaaagtttcttttaaaactttaattttcaatctacagataaggcttatactactttttaaataaaaaataaccttaaagttttatagttgtaaattacaaatgctttcaattaaaaggaaattttattcacaagctttaaaacaaagaactagagagttataaagttgcataagattgtacaatatcaggaaaattggattttaatccaaaaatcacttaatgtttcttggtaaattaaactcctctggaagaaattgaatttttaatggttttagtttaaacatgactatatattttattcattttgcaatagtgcacttaatacagagcaaaatgggcaataagcaagacatttaattcacacagacaattgaatttaccacaaatgctaaaatgggtgactctttctaaagaccatatatttactttgtaacccaggtaagttgttatctacactagtatttggaagacagttagatttatttttaaattcttatagttaaaataagtagtttcttcaaataagtttttgtaaaacac

SEQ ID NO: 61286 - DNA, 713 bp, Homo sapiens
taattgattgatgattatatcagaagcaactaccagggtcatctgatctttaattaccatctgtgattcttattatttaagaggtataacaacagccacttcgtaggattatcataagagcttcaagctatgttgtaaagttccaagagtatttggcattctagagcaagtgctcaacaaatggtaattatcattactattttgttgttttttgagtgctccttgtgccagataagtgctttacatgtattatctgatttaattctcacatcaccctcatgagataagtaccattatcatgctgattttatagatgtgggaactgaggctcagaaaagtaacttgccccaaattacacaactggttagtggatagggctgcacaattagttgtctgatggagtagcatggtactagcactctttattacttagaaagttctggtaaagagatcagacagtccaattatcactgggtgtattgacctcttcttgggttctgttagtttctggttttttgagtggttccttagccacatgagtctcagctttgtagataaaaaattggagcctttgtagtcacaactttacatagacaaactctggggaacagcagctgctgaagggagaatgaaaatggacagtattcagagcacaaagggctgaacacatgaasttatcccatttgaaacctctttccacctggccagctgaa

SEQ ID NO: 61287 - DNA, 1548 bp, Homo sapiens
tttaatactctacattatgagagaaaaatatttttaattttagttaaaatttaatagtgtattattttactaattgtacttttatgtgatacaatccagtacattttaaaactttgaaattatgtgtagacttaactttttaatttaacgtttttaacacgttaaatactattgtgcattcaatgaagcattattttgccrctaaccttaacccattccaccttagagtgtaggtaaaagatggtaacaatatattatttgttaacataataaagtagtatttgtagtaatcttttttgctagtggctttaaactgcaaagaagttaaagaatgttgttcctgtatgttaagtttttattttttctttctcatttaaatttacttaatatttttgggtacatagtatgtgtatatatttaaaccacatatggcatattttgatacatacatacaatatataataatcacctcatggtaaattaggtatctatcacctctagcatttatcctttgtattacagaaaatttaattttacactttttgttactttaaaatgtacgactaaactgttactgactgcctcacctctagcatttatcctttgtattacagaaaatttaattttacactttttgttagtttaaaatgtacaactaaactgttactgacggccggacaccgtggctcatgtcagtaatcctagcactttgggaggctgagacaggtggatcacctgaggtcaggagttcaagaccagcgttgccaacatgttgaaacagtgtctgtactataaatagaaaagttagccaggcacggtggtgagtgcctgtaatcccagttactcaggagtctgaggcaggagaatctcttgaacttgggaggtggaggttgtggtgagctgagatcgtgccactgcactccagcctgggtggcagagcgagactttgtctcaaaatgaataaataaatagacattgactacagggtaatttctatgattatattatttagaagtatgaataaaatgcatacatttgtgagtcttgaatacgtattttaataaatttcttatatatttttatttgaacatgtggcctctctgcctgcaaacacacagacttttaattttgatttacataaagttaaaaatatgcatgtattactctaaaccttaggaaagaaaattatggagtgagtgtgtttgtatgagcatgagtttgtacctattttcagaagaatagagcaatatcggaacaaatcattttaataaggtgattaatttgctagctagtaaaaacctcaaaaatgctgaaagcaaatttatgctctcagctttgtattaaattcattactgtaaaaccttatggcttaaggttcagaatctcgccatacaaactctttgcctggcactcatgccagacctataattttcttgttataattttttgttttatagtttatgaagtatccattacatgagttggtcgtgattataagaatgttttttataaaattcagtagtgcacataatttttagaagtaattcc

SEQ ID NO: 61288 - DNA, 660 bp, Homo sapiens
aagatggtactcacttgacctctgaagtacctctaacttcattataatctaattcccatactaaatgacactcccacagcaccatgacagttgacaatcaccatgacaatgaccagaagaaaccataaaaggacataaaggaaggcagtactccttttttgaggagttttccgcctgttcccagaaaagacatgaatattcctcccctggcttctaatgcccaaaactttcattaaatataccctgtatcggccgggcgcggtggctcatgcctgtaatcccagcactttgggaggtcgaggcaggtagatcatgaggtcaggagatcgagaccaccctggctaatgcagtgaaaccctgtctctactaaaaaaaatatataaaaaaaattagctgggcttgctggcgggcacctgtagtcccagctacttgggaggttgaggcaggagaatggcatgaacctgggaggcggagcttgcggtgagccgagattgcaccactgcactccagcctgggagacagagcgagactctgtctcaagaaaaaaaaaaaaaaaaaaaatttatatmtatatatatatatatataacctgtatctgtgactttccagctctcacaaactgataaattgttttatgagtcaaactcccacttcttaaat

SEQ ID NO: 61289 - DNA, 683 bp, Homo sapiens
tgcatatgaaatctaaacctaagtgtctaattactaatgtgtagttgagtctacacagaatttccagtgactattgtatttatagtttttcctcaagtccacccttttcaagttgctaaagacccccaatcaatctgcaggttctttagtgagcatggaagaaaagggaagtgggtcgttttgagccacagttcatctaggtattgtaagttgaatcgagcttatgctgccccgcaacagagcacacacctcttcagtgactgagtattagtggtccattaaagctggtgatgcacaaggtaaacagcaaaattctttctctctggtctctattgttatagtactgtattttattagagcataggcagcttggcttaactgctctgagatacgactattcagtctttaaatggaatagtatttttttttttttttttttttgcttcaataaggkggggcaggacagatgattctaaatctttttacatcaaaaaaatctttaaatgttcagattgcaagtctcagccataaaaattatgtaagatttgtatattcaggtaatcttactttgtcactgagaatgttttcttggcttatgtatttaactagacggcaatcttcttggttaaggactgtctctctccatatatattgtagtatgttgttggaaacacaagcacatt

SEQ ID NO: 61290 - DNA, 683 bp, Homo sapiens
tgcatatgaaatctaaacctaagtgtctaattactaatgtgtagttgagtctacacagaatttccagtgactattgtatttatagtttttcctcaagtccacccttttcaagttgctaaagacccccaatcaatctgcaggttctttagtgagcatggaagaaaagggaagtgggtcgttttgagccacagttcatctaggtattgtaagttgaatcgagcttatgctgccccgcaacagagcacacacctcttcagtgactgagtattagtggtccattaaagctggtgatgcacaaggtaaacagcaaaattctttctctctggtctctattgttatagtactgtattttattagagcataggcagcttggcttaactgctctgagatacgactattcagtctttaaatggaatagtatttttttttttttttttttttgcttcaataagggggggcaggacagatgattctaaatctttttacatcaaaaaaatctttaratgttcagattgcaagtctcagccataaaaattatgtaagatttgtatattcaggtaatcttactttgtcactgagaatgttttcttggcttatgtatttaactagacggcaatcttcttggttaaggactgtctctctccatatatattgtagtatgttgttggaaacacaagcacatt

SEQ ID NO: 61291 - DNA, 725 bp, Homo sapiens
atattttctgtgtacacagtggttgagagtcaggaaaaagatatcaggagaaaactaagttgttgggaaagatctgactacagaaaaaatgtttgccccaggcatttagaagcaataatatatggaagatattcttataattcccttaaaataggagtttgagactgaattagagaagtaatgacaaaataaatctttgacgtcacgttatccatcatctccataatttttcttaagaaactgctgattgcaatygtctctgttgactcaaggattaaaagttctaacatttttcttgtgaagttatgttcgctatataaaattattaacttaattgtaaagctatcttcacactctttacgttaatcagtagagtcctatttatctcacaatcacctaatgcaaaaagaacaagttcttgtggggaaatattatttttcaactctaaataggatggaattaacttcaggagttatttgatattctaaatgaggagtgaagttgattgttttaaggtactatctttccatagctgaaataggggcttataatagtattttaacaattttaataaaagttcaatttatatttccttagtatgaattttttccttaccctgctggtaaaatatgggattatcattcaacatttgttatctcttagtaatactggttagactagctctaaataggacaaccacatttaaccacatataatgggatgtt

SEQ ID NO: 61292 - DNA, 725 bp, Homo sapiens
atattttctgtgtacacagtggttgagagtcaggaaaaagatatcaggagaaaactaagttgttgggaaagatctgactacagaaaaaatgtttgccccaggcatttagaagcaataatatatggaagatattcttataattcccttaaaataggagtttgagactgaattagagaagtaatgacaaaataaatctttgacgtcacgttatccatcatctccataatttttcttaagaaactgctgattgcaattgtctctgttsactcaaggattaaaagttctaacatttttcttgtgaagttatgttcgctatataaaattattaacttaattgtaaagctatcttcacactctttacgttaatcagtagagtcctatttatctcacaatcacctaatgcaaaaagaacaagttcttgtggggaaatattatttttcaactctaaataggatggaattaacttcaggagttatttgatattctaaatgaggagtgaagttgattgttttaaggtactatctttccatagctgaaataggggcttataatagtattttaacaattttaataaaagttcaatttatatttccttagtatgaattttttccttaccctgctggtaaaatatgggattatcattcaacatttgttatctcttagtaatactggttagactagctctaaataggacaaccacatttaaccacatataatgggatgtt

SEQ ID NO: 61293 - DNA, 725 bp, Homo sapiens
atattttctgtgtacacagtggttgagagtcaggaaaaagatatcaggagaaaactaagttgttgggaaagatctgactacagaaaaaatgtttgccccaggcatttagaagcaataatatatggaagatattcttataattcccttaaaataggagtttgagactgaattagagaagtaatgacaaaataaatctttgacgtcacgttatccatcatctccataatttttcttaagaaactgctgattgcaattgtctctgttgactcaaggattaaaagttctaacatttttcttgtgaagttatgttcgctatataaaattattaacttaattgtaaagctatcttcacactctttacgttaatcagtagagtcytatttatctcacaatcacctaatgcaaaaagaacaagttcttgtggggaaatattatttttcaactctaaataggatggaattaacttcaggagttatttgatattctaaatgaggagtgaagttgattgttttaaggtactatctttccatagctgaaataggggcttataatagtattttaacaattttaataaaagttcaatttatatttccttagtatgaattttttccttaccctgctggtaaaatatgggattatcattcaacatttgttatctcttagtaatactggttagactagctctaaataggacaaccacatttaaccacatataatgggatgtt

SEQ ID NO: 61294 - DNA, 916 bp, Homo sapiens
ggaccactggccaggggcaattccacagtgatcaatcgagcagcatgctgtttacctcttgtccttcaggctgaaaaaggtgcccttttgtcagagtagactccctctggacagtccatagattaaagagaaaaataaaacccccaaatgactaaaaataaaaccttgcaatgactaaaagttagaaacaaccataataaaaagaaatatagtcgggagaagaatattgtggattttcttcttggaaattttgagaaaccttaagacgcaggtctagaatgatcttactgttggccacagtcaaaggacacatagctttaaatgaaagtttcagggtgggtatttgagaatgttggggctcctgaaatgattatctgtttgagcaggtggcgtccatgaactggtcctgaggacatactcccctggtcttttaagtctgaggtcaaacatttcacagactctgccacactaagtgattaacaaaactaagttgtagctggtaggcagctgggtgcttatagccttgtaagccccagtggtttaggcttctttgattataggagctgaccttggtctctacaagagttgggcaatctgggggactggacaaactgcaaatagattgctaggagtttcctgttttcattcagatgtgtacaaattacctcaacatgcccttttttycagaaaacactaaggtctgaaagaaactcttgttatattgttgccacttaggtttcactgagcctgcattatctactcacagctttaatgacttcctgctgagagaggttctgtagcagtcttggcagcagggctaagaatagcattaaatgcaaggttatctaggcattacactcactgtaacatgcaattaactctcctcttccattttcattacacaattattcattaa

SEQ ID NO: 61295 - DNA, 2757 bp, Homo sapiens
tgggcatccactcccaggggtgctactgaaatctgctgggggggtgccccgcatggtgctaactgctgcatactgcaggtgcaagcaggaaggaaggcacagtaggcgcaggaagagaagcccctttcaccttcagtgttcctccagctccctctattgacaaagctaaacattgctgtgggtggcaaaaaaatatttacaaggtccagctccaatatcacaaagcaaagcaataaagggaagggtacatttggagctaagagggaactcattgataatgggcacagtgatattctttggatgtaggaggcaatacatacctcaattagatgtgctgctcttttccacatacagaatagacctaaagactgacaactctkattgaagcccacagaagcaaaggctctccagctggtccaggctatagtgcaaacaactctgccacatggcccccatgacccagtgcatctaatggtgctcacactgactgtggaagatcaagatgcggtgtaaagcctagggcaagctccaataggagaatcataggggcatcccctaggttttttggagcaaacctatgttctctttaggcagtttttattatccttttgaaaaaaaattattgatagcctgacaatgtgtggtaaggcatggtcagactttctgcaccaattctttgattcagccccattatgcagtaatgcataagatgtgaaagtagccaaatcatacagtcgctatacaagaaatttctactatgctagtacattggatccttgagtgctatatggcaccactctgcaacctaaaatgctccaaaaggcagaaagcttgtggttctgggctcctttatctcactgaatgtcttactctgcattggcttctgagaccattgaacttcaggcacaaaggaaaaagagaggaagtaaggagcctgggaaagaaagtatctagtatttcataccaccatactcgaactggtgactatcatgtgctttgcttgtcttctggttctgtagtaaactaaaatgaaagtaaccttgatcaagtcctaatcatcattcctactaatccttgaagctggcctagattctgtggtttggtcagactcaccatggaatatcagagcaccatgtgatctgaactgccaatcataaacttaggtgttattttatccccttagccaaaaaatcagaagtgttcagcaatgccctatcataaaatagaagtggaagaaatgaggccaggccctacaaagcacaaataaattgtactttcaaggggctcacacttagagcacctactcctgccacagtgtcacctgtccttcaatcctcccctgcaacctcatggaaagttatttcctctttttgagaaggaaaataataaaaatttagtttactaatcactgaattttttcttgactttggagggaaaaattagagcctagtttgtagattattccacatgatatgctgacatcaaccagaagtggaggcagcatctctttggccccactatggtggcactgaaggatgatgggaaagagaaagccttcccagagcatgactttgagctgtacatctcatcatctactttttctgaaaaaagagatggcctcatgtaaatgcctgtgctaattcatggtcagtaactaatggttttatctgatgatcaggaattttgaccctccctgatgacaaggaggcttggggagaggtgtggagatggtcctctaagaacgtgcttcgagtgtgtgactgtgtatatcccataggaatgctgaccagaaggtctcctccatagagaaaggttttattaaacagatggacaagatgtgacctgctctgtggatattgttccacctccttatccatctcagtgagactgagatttgctgtttcataggtattgatatccaaaggatcctaccaaaagaagcagtttttcaatttaattggaaactgagactgtcattttcagatttcttgtgccactgggaaaacaggctttgtgcttgttactgtgttatttgagatgattaatcataaatatcctgaggaaattgggatgctgccacataatgagctgggaagagtacagctggatccaggagatccttggggcaattcctagtaccaccatgtccaatggccaaaattaaaaggtatagatatatagatagagtgtgtgtgtgagtgtatgtgtgtgtatgtgtgtatctacagagagagagagagagagagacagcatgccaaattcagttgtatgatccagaaaaggccactgatcaagctgcagaaaactgtatcttaaactgtttgttagggagatataccataacaaatagacaaatagcctctaaagatcttcatctggtcaactaaagaacccatatgtaaggatagtagtgttatatcacaatgtttatgtggaactgactgcatatttggtagcattaaaaattatataaagataaaaattttaaaatgaaagatatattggtagaattgccaaggacctagatcccccaggagtgaaggtttgggtaataccactgtgtgaagaatgtcagccaaggtaaaggttgaaggtaaggggatatgggatggggaatgaaggagggaaatctaaactacttactctggccttgtgatctgatgcagaagcatggaatatagcatctatcaatattttctttcttgttatatcatgtatgtatttacaaattttaactaattttctctttccccctct

SEQ ID NO: 61296 - DNA, 2757 bp, Homo sapiens
tgggcatccactcccaggggtgctactgaaatctgctgggggggtgccccgcatggtgctaactgctgcatactgcaggtgcaagcaggaaggaaggcacagtaggcgcaggaagagaagcccctttcaccttcagtgttcctccagctccctctattgacaaagctaaacattgctgtgggtggcaaaaaaatatttacaaggtccagctccaatatcacaaagcaaagcaataaagggaagggtacatttggagctaagagggaactcattgataatgggcacagtgatattctttggatgtaggaggcaatacatacctcaattagatgtgctgctcttttccacatacagaatagacctaaagactgacaactctgaytgaagcccacagaagcaaaggctctccagctggtccaggctatagtgcaaacaactctgccacatggcccccatgacccagtgcatctaatggtgctcacactgactgtggaagatcaagatgcggtgtaaagcctagggcaagctccaataggagaatcataggggcatcccctaggttttttggagcaaacctatgttctctttaggcagtttttattatccttttgaaaaaaaattattgatagcctgacaatgtgtggtaaggcatggtcagactttctgcaccaattctttgattcagccccattatgcagtaatgcataagatgtgaaagtagccaaatcatacagtcgctatacaagaaatttctactatgctagtacattggatccttgagtgctatatggcaccactctgcaacctaaaatgctccaaaaggcagaaagcttgtggttctgggctcctttatctcactgaatgtcttactctgcattggcttctgagaccattgaacttcaggcacaaaggaaaaagagaggaagtaaggagcctgggaaagaaagtatctagtatttcataccaccatactcgaactggtgactatcatgtgctttgcttgtcttctggttctgtagtaaactaaaatgaaagtaaccttgatcaagtcctaatcatcattcctactaatccttgaagctggcctagattctgtggtttggtcagactcaccatggaatatcagagcaccatgtgatctgaactgccaatcataaacttaggtgttattttatccccttagccaaaaaatcagaagtgttcagcaatgccctatcataaaatagaagtggaagaaatgaggccaggccctacaaagcacaaataaattgtactttcaaggggctcacacttagagcacctactcctgccacagtgtcacctgtccttcaatcctcccctgcaacctcatggaaagttatttcctctttttgagaaggaaaataataaaaatttagtttactaatcactgaattttttcttgactttggagggaaaaattagagcctagtttgtagattattccacatgatatgctgacatcaaccagaagtggaggcagcatctctttggccccactatggtggcactgaaggatgatgggaaagagaaagccttcccagagcatgactttgagctgtacatctcatcatctactttttctgaaaaaagagatggcctcatgtaaatgcctgtgctaattcatggtcagtaactaatggttttatctgatgatcaggaattttgaccctccctgatgacaaggaggcttggggagaggtgtggagatggtcctctaagaacgtgcttcgagtgtgtgactgtgtatatcccataggaatgctgaccagaaggtctcctccatagagaaaggttttattaaacagatggacaagatgtgacctgctctgtggatattgttccacctccttatccatctcagtgagactgagatttgctgtttcataggtattgatatccaaaggatcctaccaaaagaagcagtttttcaatttaattggaaactgagactgtcattttcagatttcttgtgccactgggaaaacaggctttgtgcttgttactgtgttatttgagatgattaatcataaatatcctgaggaaattgggatgctgccacataatgagctgggaagagtacagctggatccaggagatccttggggcaattcctagtaccaccatgtccaatggccaaaattaaaaggtatagatatatagatagagtgtgtgtgtgagtgtatgtgtgtgtatgtgtgtatctacagagagagagagagagagagacagcatgccaaattcagttgtatgatccagaaaaggccactgatcaagctgcagaaaactgtatcttaaactgtttgttagggagatataccataacaaatagacaaatagcctctaaagatcttcatctggtcaactaaagaacccatatgtaaggatagtagtgttatatcacaatgtttatgtggaactgactgcatatttggtagcattaaaaattatataaagataaaaattttaaaatgaaagatatattggtagaattgccaaggacctagatcccccaggagtgaaggtttgggtaataccactgtgtgaagaatgtcagccaaggtaaaggttgaaggtaaggggatatgggatggggaatgaaggagggaaatctaaactacttactctggccttgtgatctgatgcagaagcatggaatatagcatctatcaatattttctttcttgttatatcatgtatgtatttacaaattttaactaattttctctttccccctct

SEQ ID NO: 61297 - DNA, 1514 bp, Homo sapiens
atgtggcaaggcaaaggttaaaaagaaaggaagagcaagtttttctctgcctagcaagctcacttcaaagacaattataagataatgctcttcgagaagtcgaaaccaaaggaataggctccagacatcccccgtctggagcaagggtgaaggaaaaaaaaaaaaggacaaatgtctgtctgtatttagccagttcttgttttttctttccacgcagctacaaggccaccagctatgcaaagccacaagttatgccaagtcatcagttatgctatagattatgtgacctgtcattatatgattaactgcctgttttgcttctgtaagcctgcttataaaaatcctgctcagtctttgttcaatgctcagctttttggatgtgaatccactgagccaatgcctaccttaaaataaacatcgtcctgtttttccatatctgtctctctggtcctgagtttaccacaatagctgtagctggtaccctgtgcctgtggcttgcccaggcgtcccctggcacttggcatcccttcattccctgggtccatccttgatctggaaggatggacttgagaagacaggatagaaaagaaaaatcctaggaaggataggtgaactggagagaagtcagaggaaaggtgagtggggagcaagaggggatcctcaggcggccctgacagctggaagctggttccagcaaggtggccccaggaggaaagagctgtcctcctaagaagagtcagtagggccaggcgcggtggctcacgcctataatcccagcactttgggaggccaaggcgggtggatcacctgaggttgggagatcaagactagcctgaccaacatggagaaacctcatctctactaaaaatacagaattagccgggcatggtggcgcmtgcctgtaatcctagctacttgggaggctgaggcaggagaatcgtttgaagccaggaggcggatattgtggtgagctgagattgcgccattgcactccagcctgggcagcaagagtgaaactctgtctcagaaaatataaagagtcagtaggtggctgggtgcagtggctcatgcctgtaagtccagcactttgggaggctgaggtgggaggatcgcttgagcccaggagttcgagaccagcctggacaacatagtgagaccccgactctacaaaaaagaaaaaaaattagctgggtgtggtggtgtgtgcctgcggtcccagctactcaggaggctgaggcaggaggatcgctttagcccaggagtttgaggctatagtgagcccagattgtgccactgcactgcagcctaggtgacagagtgagaccctgtctcaattaaaagaagaaaaaaagttggtaggtgcacctgagaaaggaaattgctgtttcatgggctgagtgccacttgggagctgggttgtcacccagcgattttcccatggtgatcccagtggggtctgaatctcttgttgcctcctatgttggttgtttgacgatttttggttaaatcaactt

SEQ ID NO: 61298 - DNA, 773 bp, Homo sapiens
agctaatcaccatgggtaattgtggggtcattttaaggatatattttctctctagcgggcatgcccatctcttaggagctgccccttactggtttrgtccagatctagccaaccatggggctccttactcacttctgtatcttacttctggttttgctcaacttctgcttcttgtcttgcttctgcttttgctcacctgcctctttatctttcttctgctcctactcattccaccctttatccaacctccagttccctctgctatgctcctgcctcaattctttgttctaaatttcttcctgaggaacctggatggagtcacaaccacaaagcaaatctaacattttctgctgaccccaaattttaaacaaagcttgtctttcttaaccaattgcaaatcagaaaatatttgagtctacctatgaccctgtaagccatccccttcaagttatcctgccactttaggccaaaaccaatgtgtagccttcatgtattgatttatgatcttgcctgtgggaggccgaggctggcggatcacgaggtcaggagatcgagattatcctggctaacacggtgaaaccccatctctactaaaaatacaaaaattagccgggcttgatgcgggcgcctgtagtcccatctacttgggtggatgaggcaggagaatggcgtgaacgcaggaggcggagcttgaagtgagctgagatcgcgccactgcactacagcgtgggggacagagcgagactccgtctcaaaaaaaaataaataaataa

SEQ ID NO: 61299 - DNA, 1197 bp, Homo sapiens
agtccagtcttttaaagcgtaaagttgagagaaacaatggaattctttcaggattataatgtataaattagcactcaaagtgctgagaaagctggactaaaattttaacatcttaagtttctcatttttctggggactcaacaaatttaggaatccacatcaaaagcaaaaagaaagaatgtacttcttttaaacaattttcagcactttctatccctttactaaataaataccacccatcctaccaaaggatttaactaaaagcagttttgacagtagctatgttggctgattaggctgatgcctaagcattctttaaggaaaaattgatgtagttggttagattgaaggaggtttcttccaagttctttcttcctattgaattgcatctgaaacgttcctttgctgcccagttctttagtgggcaagttttagttggtgagaggtgagagagacagcctggatccagatccattgcttcaactcattttttctgaattcccttcagagatcaaatttaagaatgccttctgggttcaattttaaaaactccaaaatttctaaagcaaaaggaaggaaacctcaaacatattttaaataacagatgtttgtttttactgacaccctgccgtttattttctgggtgggctgtaagaaaactagggtatggacaagacacagaggagcaaagcaagtccgactcactctgcagaagtgtcctctttgaaactgcagccgggatctgggcataggtccaaagcaaacatttgagatttttcaggagcagacacttttctgaggaggactcctgcttgtctgctactcscaggacaaccaaaatacatcattatcaatttcttaacaattcatcgagcaggctctatgagggctggggcactggctattgggaccctgctcaaaaaacctgcaacctagtgaggaaagaaacagaaacacaaataactagaattcaggccaaatgctttaatagtattccattagctggtgaactcctcaaaggcaagcaccatggagagctttgtgtgtgtgtgcatgtgtgtatgtgtgtgtgaacaccctcatgcctaacaccatgtctgggacattcaaagtaggtgctcagggagggagaaccaaaaatggaaaattgaattcctcctaaggtaactaaatttgtggagtccagaattgttttcc

SEQ ID NO: 61300 - DNA, 514 bp, Homo sapiens
gttgtctgggttgatctaaaattcctgggctcaagtaatccacctgccttggcctcccaaactgctagcatcacaggcatgagccaccgtgcctctcctaatgtaattgaaagtattttttctaacagatcgataggtacatcagcatgatatctgtttagataatacacaactatattctgttaatcaatcatattacttttgataattgtggctatttttctttccctccagtttgtaaaaattttagatttccaaatcagcaaacaaaacttttaaatatgaaaaaatatttttaaaatattagaacagtctcattgtcaggtaaattgttcataagaaaggtgttaaaagtaagttaaaagtaaattttracgaactgaaaacttcaacactaaagttttctgaaatttcaaagaaacaaaaccaataaaaatatcaagagccatgttcaaataaatacattcattccacttagttaaaagtagaagtataattcaaacttactgtctct

SEQ ID NO: 61301 - DNA, 571 bp, Homo sapiens
aatctcagtactttggaaggctgaggcaggaggatcacttgagcccaggagtttgacaccakcctgggcgacagagcaagaccccatctcacaaaaagttaaaaaaaaaaagagctgaatgtggtggcatgctcctgtagtcctgaatgcttgggaggctgaggcaggaggatggcttgagcccaggaggtaaaagctgcagtgagccgtgattgcaccatgcactccagcctgggtgacagagtaagaccctgtctccaaaaaaataataaaaacctatatttaaaatatctcaagacatgacatcctataaatagtcattttctttgtgtttagactgggaatgatttattcattttaggacgctgagtaaaatattttatattcaaggctacctagtggatgaattttcgtgctcgtcagagtcaggatttgtttaatctgtgacagcaccctctaatggtttcagtcatgcctgaaaaatatctgagtgaacttcatggacttcttctctgattgttcccctcaagtctgaaattttattaatcatatttggaatcaagcagacaaa

SEQ ID NO: 61302 - DNA, 855 bp, Homo sapiens
gcatatatatcttatatgcttttgtatgtattgtgctacaagaggcaaccttaaaaatcaaattaatgttattaaaaaaaaaaaaaaaccgggaggcctaggagagtggattacaatgtcaggagatcaacaccatcctggccaacatggtgaaacccagtctctactaaaaatacaaaaattagccgggcatggtggtgtgcacctgtagttccagttactcgggaggctgaggcaggagaattgcttgaacctggaaggcagaggctgcagtgagccgacatcacaccactgcactctatctagcctgggcgacagagcaagactctgtcaaaaaaaccaaaaaaacgaaaaaaaaaaaacctctcataccctaaccatttatgtgaaacctttctactaaagtagcaaagccaagtttttgctgactgaaaaagagtagcattgcttggttaaataaamatgatatatagactatgaaggcaatagaagaaaatttaaaaagtgtacattttgataaaatggcacaaaatttttaaactttttagaaaaaacttttacaagttttaactgtttaatttttttaaataattaatttaaaattctcttcatatacacaccaaaattccttacatgataattccttaatatttttaaatccaataggagctcaaggtttggaattggagagacctcggtttgagtctgtgcaagttctctctctaaacctcagtgtcatcagtcaaataataataaaaaataaaagcaccagtcttatgggattgtgattaggattatgtttataaattgattgcagagtgataaacatagagcctaccacatcaacagaattga

SEQ ID NO: 61303 - DNA, 968 bp, Homo sapiens
aattatacaatggaattttaatcagcaattaaaaaaagaataaactttctccactcaacatcataggtgaacctcacagatacagtattgagtgaaagaaaagagatttcctctgggagagggagtagtgtgcagtgagtggatattgactgggaaggagcaagagagacccttcttaggtgttggaaacgctctgtagcttgactgagatagtgtagcatacatgagtgcatgacgtatgaatgaaattatatgtgaaaattcataacagtcatgtgcttaacattaatgcactttactatattttatatctcaataaaaaaattaagtgccatctttctgcaaccctcaatgtccctgtgatgacatgcctaagacagataccatccctctgctatgactggcaacaccactgtcacaccttggcacattcctgctgttggatcacactcccctttgggtaccctctatmcctcagggagagccccatgttccatgatctttattttttcttttcatctttggttttttaaacagcattctcctgaggcatctttaggactcttccaaggaacctggggcttggggcaaattctaattaatccagaaataattcattttccctagacagaagtcctcgtcattgctttcttcccctccagctggatccagccacctcgggccctgtggggggaggggacacagaggcataaagcctggcaccacctgccctgccagctctgcttgaattagtccttccctccacatgaggccgggggcctttccctgttaaaatggactttctcttattgtctttatcttttcatgttttgtggaaattaaaagatgagtgacttccaggcagcgccagaggcagcggcagcgcagagagtgtctgtgttttcttccaaggctgaccggagtgggcctggaattgacccagggctccccaggctcctccgccttca

SEQ ID NO: 61304 - DNA, 968 bp, Homo sapiens
aattatacaatggaattttaatcagcaattaaaaaaagaataaactttctccactcaacatcataggtgaacctcacagatacagtattgagtgaaagaaaagagatttcctctgggagagggagtagtgtgcagtgagtggatattgactgggaaggagcaagagagacccttcttaggtgttggaaacgctctgtagcttgactgagatagtgtagcatacatgagtgcatgacgtatgaatgaaattatatgtgaaaattcataacagtcatgtgcttaacattaatgcactttactatattttatatctcaataaaaaaattaagtgccatctttctgcaaccctcaatgtccctgtgatgacatgcctaagacagataccatccctctgctatgactggcaacaccactgtcacaccttggcacattcctgctgttggatcacactcccctttgggtaccctctatacctcagggagagccccatgttccatgatctttattttttcttytcatctttggttttttaaacagcattctcctgaggcatctttaggactcttccaaggaacctggggcttggggcaaattctaattaatccagaaataattcattttccctagacagaagtcctcgtcattgctttcttcccctccagctggatccagccacctcgggccctgtggggggaggggacacagaggcataaagcctggcaccacctgccctgccagctctgcttgaattagtccttccctccacatgaggccgggggcctttccctgttaaaatggactttctcttattgtctttatcttttcatgttttgtggaaattaaaagatgagtgacttccaggcagcgccagaggcagcggcagcgcagagagtgtctgtgttttcttccaaggctgaccggagtgggcctggaattgacccagggctccccaggctcctccgccttca

SEQ ID NO: 61305 - DNA, 788 bp, Homo sapiens
catcaaattgtccatgcaaaccctaacctctgagcttttagggaggctgatgtgagtgataactccagtttttcccatgtgggctggcctctcatcagttaaattctttctcgactacaatgccatggtctcagtgaattcattttgtctgtgcagcaggcaggaaaaacctgttagatgattacaaattttctttctttattatttatctccatctacacatgacactaaaaaatcaccaatttaaataaattattaaaaatcatgattattccccccccaggctatatatagatagaagccaaaccacctgtgttgaagagacacctaaactcagtatggtacagtatgctaggtacagtcagagcagaaacagtatagctcaaccstaaactatttattactttttaaaaatttttgtctagattttaatttaatgcccttaattttctaaatcttgacttagtttcttggatggtacatcctaattattgatcaattacatctttaaattcaatttttccaaacttgtgcctgaaatatattgatagctttatgctatgatattacacattgatgaaagggacaataacacccagagtgtctagttaccacaatggtcctggcaatgcagagattacacacttggctatgagctgaaagcataccttttgcatatcacttgagctgatggatattttgatttcatactcaggactgtcagcctgaaattttgatcataagtaccagaaggagtttcaaaattaccttgataaaattcttagaca

SEQ ID NO: 61306 - DNA, 788 bp, Homo sapiens
catcaaattgtccatgcaaaccctaacctctgagcttttagggaggctgatgtgagtgataactccagtttttcccatgtgggctggcctctcatcagttaaattctttctcgactacaatgccatggtctcagtgaattcattttgtctgtgcagcaggcaggaaaaacctgttagatgattacaaattttctttctttattatttatctccatctacacatgacactaaaaaatcaccaatttaaataaattattaaaaatcatgattattccccccccaggctatatatagatagaagccaaaccacctgtgttgaagagacacctaaactcagtatggtacagtatgctaggtacagtcagagcagaaacagtatagctcaaccgtaaactatttattactttttaaaaatttttgtctagattttaatttaatgcccttaattttctaaatcttgacttagtttcttggatggtacrtcctaattattgatcaattacatctttaaattcaatttttccaaacttgtgcctgaaatatattgatagctttatgctatgatattacacattgatgaaagggacaataacacccagagtgtctagttaccacaatggtcctggcaatgcagagattacacacttggctatgagctgaaagcataccttttgcatatcacttgagctgatggatattttgatttcatactcaggactgtcagcctgaaattttgatcataagtaccagaaggagtttcaaaattaccttgataaaattcttagaca

SEQ ID NO: 61307 - DNA, 788 bp, Homo sapiens
catcaaattgtccatgcaaaccctaacctctgagcttttagggaggctgatgtgagtgataactccagtttttcccatgtgggctggcctctcatcagttaaattctttctcgactacaatgccatggtctcagtgaattcattttgtctgtgcagcaggcaggaaaaacctgttagatgattacaaattttctttctttattatttatctccatctacacatgacactaaaaaatcaccaatttaaataaattattaaaaatcatgattattccccccccaggctatatatagatagaagccaaaccacctgtgttgaagagacacctaaactcagtatggtacagtatgctaggtacagtcagagcagaaacagtatagctcaaccgtaaactatttattactttttaaaaatttttgtctagattttaatttaatgcccttaattttctaaatcttgacttagtttcttggatggtacatcctaattattgatcaattacatctttaaattcaatttttccaaacttgtgcctgaaatrtattgatagctttatgctatgatattacacattgatgaaagggacaataacacccagagtgtctagttaccacaatggtcctggcaatgcagagattacacacttggctatgagctgaaagcataccttttgcatatcacttgagctgatggatattttgatttcatactcaggactgtcagcctgaaattttgatcataagtaccagaaggagtttcaaaattaccttgataaaattcttagaca

SEQ ID NO: 61308 - DNA, 788 bp, Homo sapiens
catcaaattgtccatgcaaaccctaacctctgagcttttagggaggctgatgtgagtgataactccagtttttcccatgtgggctggcctctcatcagttaaattctttctcgactacaatgccatggtctcagtgaattcattttgtctgtgcagcaggcaggaaaaacctgttagatgattacaaattttctttctttattatttatctccatctacacatgacactaaaaaatcaccaatttaaataaattattaaaaatcatgattattccccccccaggctatatatagatagaagccaaaccacctgtgttgaagagacacctaaactcagtatggtacagtatgctaggtacagtcagagcagaaacagtatagctcaaccgtaaactatttattactttttaaaaatttttgtctagattttaatttaatgcccttaattttctaaatcttgacttagtttcttggatggtacatcctaattattgatcaattacatctttaaattcaatttttccaaacttgtgcctgaaatatattgatagctttatgctatgatattacacattgatgaaagggacaataacacccagagtgtctagttaccacaatggtcctggcaatgcagagattacacacttggctatgagctgaaagcayaccttttgcatatcacttgagctgatggatattttgatttcatactcaggactgtcagcctgaaattttgatcataagtaccagaaggagtttcaaaattaccttgataaaattcttagaca

SEQ ID NO: 61309 - DNA, 1058 bp, Homo sapiens
aagtgctcagaacagtaccaagcagcatttaagtttcatttatcrcttgaggtaggataggcaaatgtcattatccccttttcacagatgggaaaaaggcttagaaagtgtgagtgaatcacacagccaaccagtggctgagtcctaaccaaactgttcaacttctgactctagtgttctaccctgtcagtcacacatcctgatatggtttggatctgtgtgcccactcaaatttcatgttgaattttaatccccagtgttggaggtggggcctggtgggaggtgactggttcatggggatggtttctcatggcttagcaccatcccattttatactgtccttgcaatgatgagtgaattcttgtgagatctggttctttaaaagtgtgtagcacacagagaggggaacaacacacaccagggcctgttagggggtaggaagtgagagaagggaacttaaaggatgggttaataggtgcagaaaaccaccatggttaataggttaacaggtgcagaaaaccaccttatacctgtgtaacaaacctgcatgttctgcacatgtatcctgtttttttttttttgtagaagaaataaaaaaaatcacattatgcactgaaaaaaagggggtagcacctcccccatctttctcttgcttctgctcctaccatatgggacatctcgtgcccccttttccaccatgattggaaacttcctgaggcctccccagaagcagaagctactattcctcctgtacagcctgcataaccatgagccactcttttctttataaattacccactcccagttatttctttatagcagtgcaagaatagactaatacacatccttaaattcagaagcaaagatgagcctgtctcattcaacggtaagaaaaccaattagcaaggatccattcactttctcactgggacactttagaaactgcaaaaacttgcataggccattacatcagtgcttttcaaaacgccgtcagagggtcacatattcagttcagtgggttgcaacttttaaaaaaagtaaaacacagtagaatagga

SEQ ID NO: 61310 - DNA, 1058 bp, Homo sapiens
aagtgctcagaacagtaccaagcagcatttaagtttcatttatcacttgaggtaggataggcaaatgtcattatccccttttcacagatgggaaaaaggcttagaaagtgtgagtgaatcacacagccaaccagtggctgagtcmtaaccaaactgttcaacttctgactctagtgttctaccctgtcagtcacacatcctgatatggtttggatctgtgtgcccactcaaatttcatgttgaattttaatccccagtgttggaggtggggcctggtgggaggtgactggttcatggggatggtttctcatggcttagcaccatcccattttatactgtccttgcaatgatgagtgaattcttgtgagatctggttctttaaaagtgtgtagcacacagagaggggaacaacacacaccagggcctgttagggggtaggaagtgagagaagggaacttaaaggatgggttaataggtgcagaaaaccaccatggttaataggttaacaggtgcagaaaaccaccttatacctgtgtaacaaacctgcatgttctgcacatgtatcctgtttttttttttttgtagaagaaataaaaaaaatcacattatgcactgaaaaaaagggggtagcacctcccccatctttctcttgcttctgctcctaccatatgggacatctcgtgcccccttttccaccatgattggaaacttcctgaggcctccccagaagcagaagctactattcctcctgtacagcctgcataaccatgagccactcttttctttataaattacccactcccagttatttctttatagcagtgcaagaatagactaatacacatccttaaattcagaagcaaagatgagcctgtctcattcaacggtaagaaaaccaattagcaaggatccattcactttctcactgggacactttagaaactgcaaaaacttgcataggccattacatcagtgcttttcaaaacgccgtcagagggtcacatattcagttcagtgggttgcaacttttaaaaaaagtaaaacacagtagaatagga

SEQ ID NO: 61311 - DNA, 1058 bp, Homo sapiens
aagtgctcagaacagtaccaagcagcatttaagtttcatttatcacttgaggtaggataggcaaatgtcattatccccttttcacagatgggaaaaaggcttagaaagtgtgagtgaatcacacagccaaccagtggctgagtcctaaccaaactgttcaacttctgactctagtgttctaccctgtcagtcacacatcctgatatggtttggatctgtgtgcccactcaaatttcatgttgaattttaatccccagtgttggaggtggggcctggtgggaggtgactggttcatggggatggtttctcatggcttagcaccatcccattttatactgtccttgcaatgatgagtgaattcttgtgagatctggttctttaaaagtgtgtagcacacagagaggggaacaacacacaccagggcctgttagggggtaggaagtgagagaagggaacttaaaggatgggttaataggtgcagaaaaccaccatggttaataggttaayaggtgcagaaaaccaccttatacctgtgtaacaaacctgcatgttctgcacatgtatcctgtttttttttttttgtagaagaaataaaaaaaatcacattatgcactgaaaaaaagggggtagcacctcccccatctttctcttgcttctgctcctaccatatgggacatctcgtgcccccttttccaccatgattggaaacttcctgaggcctccccagaagcagaagctactattcctcctgtacagcctgcataaccatgagccactcttttctttataaattacccactcccagttatttctttatagcagtgcaagaatagactaatacacatccttaaattcagaagcaaagatgagcctgtctcattcaacggtaagaaaaccaattagcaaggatccattcactttctcactgggacactttagaaactgcaaaaacttgcataggccattacatcagtgcttttcaaaacgccgtcagagggtcacatattcagttcagtgggttgcaacttttaaaaaaagtaaaacacagtagaatagga

SEQ ID NO: 61312 - DNA, 1058 bp, Homo sapiens
aagtgctcagaacagtaccaagcagcatttaagtttcatttatcacttgaggtaggataggcaaatgtcattatccccttttcacagatgggaaaaaggcttagaaagtgtgagtgaatcacacagccaaccagtggctgagtcctaaccaaactgttcaacttctgactctagtgttctaccctgtcagtcacacatcctgatatggtttggatctgtgtgcccactcaaatttcatgttgaattttaatccccagtgttggaggtggggcctggtgggaggtgactggttcatggggatggtttctcatggcttagcaccatcccattttatactgtccttgcaatgatgagtgaattcttgtgagatctggttctttaaaagtgtgtagcacacagagaggggaacaacacacaccagggcctgttagggggtaggaagtgagagaagggaacttaaaggatgggttaataggtgcagaaaaccaccatggttaataggttaacaggtgcagaaaaccaccttatacctgtgtaacaaacctgcatgttctgcacatgtatcctgtttttttttttttgyagaagaaataaaaaaaatcacattatgcactgaaaaaaagggggtagcacctcccccatctttctcttgcttctgctcctaccatatgggacatctcgtgcccccttttccaccatgattggaaacttcctgaggcctccccagaagcagaagctactattcctcctgtacagcctgcataaccatgagccactcttttctttataaattacccactcccagttatttctttatagcagtgcaagaatagactaatacacatccttaaattcagaagcaaagatgagcctgtctcattcaacggtaagaaaaccaattagcaaggatccattcactttctcactgggacactttagaaactgcaaaaacttgcataggccattacatcagtgcttttcaaaacgccgtcagagggtcacatattcagttcagtgggttgcaacttttaaaaaaagtaaaacacagtagaatagga

SEQ ID NO: 61313 - DNA, 761 bp, Homo sapiens
cctcattttaaagctcggaaaactgaggcatagagatttaggttaggtcacccagcaaagtcacaaagctagtaggcagaatagctgggattcaaacccagtcctgttggattcataagcctacaagtttacttctagactctactgttttgtccatgttctgaattattgttgcctgagtgttctaagtccattgaatttagtaaaaggtgttgttgtctcctgtccaaaaaaaatcagacatatgctagagtcaggcaatttaactgaagttagataagctcatttttccatcctacacgaggcatcaaaagattgcttttaaagtatgttgtttaaacactgatttagctctcagtaatttattaatatattaatatctctttttttcaattttattctcagaggaagcagccaagttttctcttagggcatgtttggtgtaaggatatggagaataggagtgttaatgggttgtccatttttccttgagacagtgctctgagaatgttcatattgaaagctggagaaggggatggggcaggaggagataaaagagcccattcagagctttgtctcatctttcttctgaaatatccattcagcaaaaatcctcttagagtcgtactttcttccccaccacagcctgactgcagaatcttgtcccttagtgtctgtgccactgattcatccttatagmtttcaatatccccttgaagccatcttgcagactacagtcccgctttctggactatatagag

SEQ ID NO: 61314 - DNA, 741 bp, Homo sapiens
agctactctagaagctgaggcaggaggatcatttgaggtcacgagcttgagagcagcctgggcaacatagactctatctctcaaaaaattaaaaaaataaagtatgcagggatattattccttacatacttcagagctgcctattgggaggccccagaccaagctgactctgctatcttctacatgtattttatgtatgttttgatatgaaaatatctggaaagcatggccctagttatagactattacatttaaaaagatacatgaactgctatgtatgggaagtttgaccaggaccatttgtaaaagttctctttgtaataacatttttcatttgaagagaaaaatacatctacccctcaaaatttgctctcaagtttgaaaagacagagtctatcttcagcttaagggtgagacttcctatttgggagaacgaaatgagggttgagaaatgatgccttaatatgaccaggaaaatcagagcgtctttaatttggtgatgatctaattttatgtagagtaagtctaccgcctgaagggaggctggttggaaaaaatatacctgtgttacaagatctcattatgygatatacttcttcacttggaaaatatcacctatgacaagccaccatccaaggggaggagcccaaagacagcaggaaactcagccctggatgaaagatgtttgacattgatagtatttgacatcagtagttgtgatatgttttctcattctaagca

SEQ ID NO: 61315 - DNA, 806 bp, Homo sapiens
ttttctacaagtaatcatcaaaaagaccagatgagtcagtgtttacaaattcacatttttagtaggtgtgtttgactgctccatagatcttgtcttctgcctaaatgttcctttaaaatattttgatttattatgattaaatgtaagctaggttggaccattaattaattacaaataaatttgagttaaacccagacattaataacagcattagaaaaaaatgcastgggtttacatgctaaacagagagctgtaacttggttgtgaaattttaccttctttgaaaatgactgataccaggagttaaaacaggcaccccctgggttaaatttagcccatagggtgttttctttggacagtatcatattttaaaacaaattagaattagtgaccaccacttgaaaatcaggagagttttacacaaaatcaaggatgtccttgatttcagttttaaaaaaaatcacctcttggcatggctgagcctgcaatcttcagggactatctccagttgcccctttaagcaagtgagcagtctagtgtggcaagtttcccacccagtgcaattcactcattcatccaaacagtcattcaagaaatatttcctgagtacctaccatgtgccagaagacattgtgctagattctgccatcatcaaacttacagcttaaggggaaatggacagtaagctattctacaaaattgcacatttagaggagtgctatgaagtaaaagctgctatggaagcatttgacaggatatcctgagctattctgggagtgggagagaaagggtcaggggtttccctg

SEQ ID NO: 61316 - DNA, 806 bp, Homo sapiens
ttttctacaagtaatcatcaaaaagaccagatgagtcagtgtttacaaattcacatttttagtaggtgtgtttgactgctccatagatcttgtcttctgcctaaatgttcctttaaaatattttgatttattatgattaaatgtaagctaggttggaccattaattaattacaaataaatttgagttaaacccagacattaataacagcattagaaaaaaatgcactgggtttacatgctaaacagagagctgtaacttggttgtgaaattttaccttctttgaaaatgactgataccaggagttaaaacaggcaccccctgggttaaatttagcccatagggtgttttctttggacagtaycatattttaaaacaaattagaattagtgaccaccacttgaaaatcaggagagttttacacaaaatcaaggatgtccttgatttcagttttaaaaaaaatcacctcttggcatggctgagcctgcaatcttcagggactatctccagttgcccctttaagcaagtgagcagtctagtgtggcaagtttcccacccagtgcaattcactcattcatccaaacagtcattcaagaaatatttcctgagtacctaccatgtgccagaagacattgtgctagattctgccatcatcaaacttacagcttaaggggaaatggacagtaagctattctacaaaattgcacatttagaggagtgctatgaagtaaaagctgctatggaagcatttgacaggatatcctgagctattctgggagtgggagagaaagggtcaggggtttccctg

SEQ ID NO: 61317 - DNA, 696 bp, Homo sapiens
ggtatttaagagcagtgggtagacattgaggaatttttcagcaagtatcagaaaaagtactttttgcttccaaagtaacattctggtttaccgggtggggaaaaggctcataggaagcaagaatagaagcagtcaaggatgatatgaactagagttgaccctatagaaaatggctcaaaaaattgaaatgaagctaaaaaactttaaagatactggaaattgtacaaggtcataaaagaagaccttccatttgctgccccaaatctactcacccctgctctgtgcacaggaggctggcccacatggactgtttccacaggttcccttacctgctrctctctggtatgttcagccaatgggcagcaccaacaggagatcagagggcggcaggagtgaggtcagggcatttattgagtcagctccctctttgatggatggctacatcactagtggttacattccttttccaaagatcacagctcttgtcagactacagctgtctccagtttctgtaccctttcctggtccttgcccttcaagctttgagacagcagtggtttctcactgttacccacacagggtttcatcattcgtcatcagtttcccttaactttgcccatacatttttaaatagtaccttcactaaattatacttggttacccccatttgagtgtgccacttgtttcctgccagga

SEQ ID NO: 61318 - DNA, 696 bp, Homo sapiens
ggtatttaagagcagtgggtagacattgaggaatttttcagcaagtatcagaaaaagtactttttgcttccaaagtaacattctggtttaccgggtggggaaaaggctcataggaagcaagaatagaagcagtcaaggatgatatgaactagagttgaccctatagaaaatggctcaaaaaattgaaatgaagctaaaaaactttaaagatactggaaattgtacaaggtcataaaagaagaccttccatttgctgccccaaatctactcacccctgctctgtgcacaggaggctggcccacatggactgtttccacaggttcccttacctgctgctctctggtatgttcagccaatgggcagcaccaacaggagatcagagggcggcaggagtgaggtcagggcatttattgagtcagctccctctttgatggatggctacatcactagtggttacattccttttccaaagatcacagctcttgtcagactacagctgtctccagtttctgtaccctttcctggtccttgcccttcaagctttgagacagcagtggtttctcactgttacccacacagggtttcatcattcgtcatcagtttcccttaactttgcccatacatttttaaatagtaccttcaytaaattatacttggttacccccatttgagtgtgccacttgtttcctgccagga

SEQ ID NO: 61319 - DNA, 1446 bp, Homo sapiens
acaacctttggaagatctgcataatcacaaattttctggatcatcagtgaatgattttgaaccatgcatggataaaactcccttaatgtgtaacacagaccaatgggttttaatggaatatgaaaagttcatcgagatagttccagattccacatggamactaattttcaataaactattaccaatagacttttagtgtagtaccaaagaatattcagaactatatgaaaagagcattaaaaactccccctggctaggtgtggtagcttaagcctataatcccaacattttgggaggctgaggcaggaggatcacttgaagccaggagttcaagaccagcctgggcaacaaacaaaccctgtctcaaaacaaacaaactaacaaacaaacaaacggacaaaactactcccattttgaaaaacacatatgtctgtgaggccagattttcttcatatacttcaactaaaacatgttataacattttatgcagaaacagacatgctaaatgtgaaaagttatttacaaacctgtaaaacaatgtcattattcttactaaaaattttttaaaatatttattgctataaaatatataatacatatgatatataaaatataccataaaatatacaaattattttttaagagttattttttaaattccaagtaatttcagttatcaaattaatttatcaattaaatcaattaataaacattgacaaatataagccaaaaaaccaaagctttttgggatcctcagttatgatgcatgattctcagagaaacatttctcagagtgtttttccccaaacactaatctcataaaatgattcataaataaaagggcttttgctctggggtaatttttcaaaatctggagaatcataacacctgccatacttggagagctaaaagccacattagtttgctagaggcccagggaagtcctgccgtactgtgtttgtttcatcttacacaatctagtgtttcgttctgttatctcaggaagtttgtgaatccagaacatgctggtcacctgaccttggagaaggggtgctggcacagcggaaatctaccatgactcaccttcaagccggaccaccaggggcaccttgagttctagctcccggcaggctttggtgatcccattggcaatgatggcacagttgacgataccaccaaatatattgacaaggatggcttcaacctgaaatcaaaaataaaaagttaccaatcaaaatgctgatcgccaacagtctcaaaaataactggttaaataatagagacaattaaaataagactgctcgtttttttgtttttgttttatacagagcataaaatacaaaaatggcccagaacatgttaagaaagctcatattagtaataaattaataaatatcacaatataacattaccaaattttcccatcaatcactcttttcaactcaa

SEQ ID NO: 61320 - DNA, 1446 bp, Homo sapiens
acaacctttggaagatctgcataatcacaaattttctggatcatcagtgaatgattttgaaccatgcatggataaaactcccttaatgtgtaacacagaccaatgggttttaatggaatatgaaaagttcatcgagatagttccagattccacatggaaactaattttcaataaactattaccaatagacttttagtgtagtaccaaagaatattcagaactatatgaaaagagcattaaaaactccccctggctaggtgtggtagcttaagcctataatcccaacattttgggaggctgaggcaggaggatcacttgaagccaggagttcaagaccagcctgggcaacaaacaaaccctgtctcaaaacaaacaaactaacaaacaaacaaacggacaaaactactcccattttgaaaaacacatatgtctgtgaggccagattttcttcatatacttcaactaaaacatgttataacattttatgcagaaacagacaygctaaatgtgaaaagttatttacaaacctgtaaaacaatgtcattattcttactaaaaattttttaaaatatttattgctataaaatatataatacatatgatatataaaatataccataaaatatacaaattattttttaagagttattttttaaattccaagtaatttcagttatcaaattaatttatcaattaaatcaattaataaacattgacaaatataagccaaaaaaccaaagctttttgggatcctcagttatgatgcatgattctcagagaaacatttctcagagtgtttttccccaaacactaatctcataaaatgattcataaataaaagggcttttgctctggggtaatttttcaaaatctggagaatcataacacctgccatacttggagagctaaaagccacattagtttgctagaggcccagggaagtcctgccgtactgtgtttgtttcatcttacacaatctagtgtttcgttctgttatctcaggaagtttgtgaatccagaacatgctggtcacctgaccttggagaaggggtgctggcacagcggaaatctaccatgactcaccttcaagccggaccaccaggggcaccttgagttctagctcccggcaggctttggtgatcccattggcaatgatggcacagttgacgataccaccaaatatattgacaaggatggcttcaacctgaaatcaaaaataaaaagttaccaatcaaaatgctgatcgccaacagtctcaaaaataactggttaaataatagagacaattaaaataagactgctcgtttttttgtttttgttttatacagagcataaaatacaaaaatggcccagaacatgttaagaaagctcatattagtaataaattaataaatatcacaatataacattaccaaattttcccatcaatcactcttttcaactcaa

SEQ ID NO: 61321 - DNA, 1446 bp, Homo sapiens
acaacctttggaagatctgcataatcacaaattttctggatcatcagtgaatgattttgaaccatgcatggataaaactcccttaatgtgtaacacagaccaatgggttttaatggaatatgaaaagttcatcgagatagttccagattccacatggaaactaattttcaataaactattaccaatagacttttagtgtagtaccaaagaatattcagaactatatgaaaagagcattaaaaactccccctggctaggtgtggtagcttaagcctataatcccaacattttgggaggctgaggcaggaggatcacttgaagccaggagttcaagaccagcctgggcaacaaacaaaccctgtctcaaaacaaacaaactaacaaacaaacaaacggacaaaactactcccattttgaaaaacacatatgtctgtgaggccagattttcttcatatacttcaactaaaacatgttataacattttatgcagaaacagacatgctaaatgtgaaaagttatttacaaacctgtaaaacaatgtcattattcttactraaaattttttaaaatatttattgctataaaatatataatacatatgatatataaaatataccataaaatatacaaattattttttaagagttattttttaaattccaagtaatttcagttatcaaattaatttatcaattaaatcaattaataaacattgacaaatataagccaaaaaaccaaagctttttgggatcctcagttatgatgcatgattctcagagaaacatttctcagagtgtttttccccaaacactaatctcataaaatgattcataaataaaagggcttttgctctggggtaatttttcaaaatctggagaatcataacacctgccatacttggagagctaaaagccacattagtttgctagaggcccagggaagtcctgccgtactgtgtttgtttcatcttacacaatctagtgtttcgttctgttatctcaggaagtttgtgaatccagaacatgctggtcacctgaccttggagaaggggtgctggcacagcggaaatctaccatgactcaccttcaagccggaccaccaggggcaccttgagttctagctcccggcaggctttggtgatcccattggcaatgatggcacagttgacgataccaccaaatatattgacaaggatggcttcaacctgaaatcaaaaataaaaagttaccaatcaaaatgctgatcgccaacagtctcaaaaataactggttaaataatagagacaattaaaataagactgctcgtttttttgtttttgttttatacagagcataaaatacaaaaatggcccagaacatgttaagaaagctcatattagtaataaattaataaatatcacaatataacattaccaaattttcccatcaatcactcttttcaactcaa

SEQ ID NO: 61322 - DNA, 1446 bp, Homo sapiens
acaacctttggaagatctgcataatcacaaattttctggatcatcagtgaatgattttgaaccatgcatggataaaactcccttaatgtgtaacacagaccaatgggttttaatggaatatgaaaagttcatcgagatagttccagattccacatggaaactaattttcaataaactattaccaatagacttttagtgtagtaccaaagaatattcagaactatatgaaaagagcattaaaaactccccctggctaggtgtggtagcttaagcctataatcccaacattttgggaggctgaggcaggaggatcacttgaagccaggagttcaagaccagcctgggcaacaaacaaaccctgtctcaaaacaaacaaactaacaaacaaacaaacggacaaaactactcccattttgaaaaacacatatgtctgtgaggccagattttcttcatatacttcaactaaaacatgttataacattttatgcagaaacagacatgctaaatgtgaaaagttatttacaaacctgtaaaacaatgtcattattcttactaaaaattttttaaaatatttattgctataaaatatataatacatrtgatatataaaatataccataaaatatacaaattattttttaagagttattttttaaattccaagtaatttcagttatcaaattaatttatcaattaaatcaattaataaacattgacaaatataagccaaaaaaccaaagctttttgggatcctcagttatgatgcatgattctcagagaaacatttctcagagtgtttttccccaaacactaatctcataaaatgattcataaataaaagggcttttgctctggggtaatttttcaaaatctggagaatcataacacctgccatacttggagagctaaaagccacattagtttgctagaggcccagggaagtcctgccgtactgtgtttgtttcatcttacacaatctagtgtttcgttctgttatctcaggaagtttgtgaatccagaacatgctggtcacctgaccttggagaaggggtgctggcacagcggaaatctaccatgactcaccttcaagccggaccaccaggggcaccttgagttctagctcccggcaggctttggtgatcccattggcaatgatggcacagttgacgataccaccaaatatattgacaaggatggcttcaacctgaaatcaaaaataaaaagttaccaatcaaaatgctgatcgccaacagtctcaaaaataactggttaaataatagagacaattaaaataagactgctcgtttttttgtttttgttttatacagagcataaaatacaaaaatggcccagaacatgttaagaaagctcatattagtaataaattaataaatatcacaatataacattaccaaattttcccatcaatcactcttttcaactcaa

SEQ ID NO: 61323 - DNA, 2175 bp, Homo sapiens
tacgcatttttgatacgtrttttataagaggactctttggcttatggaaacttgcatgtgatcagtgttccttagaattttctaagaaacaacgcccttttcattcaggactatattaaatgagggagacaagatgtttccctaaatgtcaggcaagtttaaatactttccttctcaaatattctagaactcctcatactatataataatgatctaatgtcccctttttttgcatttcaaatcctagataatctggccccagcctttttttccctttgtaacccattacttagtttacctggcttctcacactgtggccaaacttatttcttgttgctctatgaatactgttgttatctcttacctctatatccttcagtacaccacctttctctttgcttctgcctatttaatacttaaccacttttctagaatcatgcagaatcctaccttcatgaagcctcccccagttctgctatttggagttagtttctcccaccacatttcatgtggacctctgctctagcttatataaactttctggttttctagtggtttgctgacctttatgtgttctactcaaatgtgagtttcttgagggcaggggctgtgtcactcatctttggggacagagcctattacatcatcagaacggacagaatctaggccaagctaaatcaagttacagcagctcctagatcccatttccacctggccttctcttctagctttcctgcaaggtttttgaaatgaccaggccatgtgatgctggcaggttctaccctagagctggtgtaaggccactctagcaattctgagtgtatactactatgttctcatgtctgtttcatagatgcatatttgacagggtgctcctggctaacagattaggttccccagacatgcccagtttacctgcagaatttctctagatttataccataagactgtacctatgaggttgcagggaggcagttgagcttacaaaaggactattgtaccccctctttctccaaccacattcttgctgagggtgctgtcttcatggtcttgcctcactcagactttaaatctccctcccagagccctcatgttgcttaggatatttggctcagacttttgtttgctgtggattcatcattgatgactgtcttacctctaggatctgcaactggggaagacaatgtttacctctccattcagtttctttgcctagcttcagctctgagaatcctagcctggtttagagagctgagccttcccattttatcagaataaacctgcagttacttgcactgttccaggaagcaaaagaatagagaattaagagtaaataatgagctctggagtcaagctgcctgggttcatatcctggtttcaacactaaagagctgtaagtttggtcaaatagcctttgcgatttcagtttacttagctataaagtaaaatgagagtagtgcctattgcacaacatttttgtgagaattaaaggaaataacatgggtaaagcacctggcacaatgcctggcttgttgtaagggctcagaaatagtagctcttattattattggaagaaccaatttaaatcccagggattccctgagcaacatggttaatatcccacgtgtcctccctgtaaaatgggtgttctttagctactgctgcgtcacaaagtaacacaacttagtggcttagagcaactcacatttatgatctcacagtttctgtggtccaggagtctggtgcctacttgggtcacctgccaggctgcagtcaaggtgtgagccatggcttggttctcatctggaggcttgactgaggagagcccacttccgagctcactcaggttgttggcaaatttcattttcttttgggtatgggactcatggcagctaacttcttcaaagtcaactataaagacagaaagagagagacttcagcatatgaaaagcacaatgtgatcacacataccccattccctttgtcacagattctgcccacactaaaggggagaggatcacacgaaggcatgaataccaggaggtgggcatcatggggtcatcttcgtgtctatctgccaccagagggatgatttaaaaagaaacaagctcatgggttgttgtgaggatgaaatgagtcaacgtttgcaaagcatttaatatggtgcctgatgca

SEQ ID NO: 61324 - DNA, 739 bp, Homo sapiens
acctaagccacacccagattcctgaccacagaaactgtgagataataactgttctttttgttaagctgctacattttggggtaatttgttaagtgctgataggtaagtaacacagatgtaaaaatgtattatttcattaacacaacctgcgtgcactttgattcatttgactgtggcaggtgttagatagcaggctaaggaatttagaaactaatcaaagcrtggctttcatggagtaatgacagagtgtgaaacaaaagccctgatggacacaggagcaaaccagtctttggaccagaaggtaaatgacagttacacgtgtaaattttgttttagacagagtcttgctctgtcacccaggctggagtgcagtggcgtgatctcagctcactgcaaccttcacctccctggttcaagcaattctcctgcctcagcctcctgagtagctgggatgagaggcagtggccacctctcccaaccaatttttgtatttttagtagagatagggtctcaccatgttggccaggctgatcttaacctcctgacctcaagtgatccacttgcctcggcctcccaaagtctgggattagaagcatgagccaccgtaccccatgtgtaaatttctatctcctcctgcagagacgtagactaggcccttcttcctcttcctttcttcttttgagcaccttccaatctcaatgcagctctaagacctccagataggtgcaggagtggcgct

SEQ ID NO: 61325 - DNA, 1416 bp, Homo sapiens
aaagatttctccacctagcctggtcgtgtgataggagttctactctgggatttgaaaccaaagctcaagcgaatcaaactttttttctttgcttccttggtgcatatagctccctctgggataccgttggaagatttaggaagtaaaaatacaaggtaccctcaaaattttgaatttcaaataaacaatatttttttagttaagtatgccttgtgcaatatttgcaacattatttgttgtctaaaattatttgtgtcttatctgaaattcaaatttaactggacatcctatatttgacaactagtcaaaggtgggaaaaaatgaaatctcaaggcacatggtcaaaatgggctctgtagctgtactagccagggtcctgttcccagctttgacatttatcaactggatgccctttggaattgtctcagattttctatactttggtttagtcatcaagaatacaaggaaaatagtatttaattcacaggttcttaggagaattgaatgagtactttgcaagtaaggtacccagagtggtgcctagtatttcaaccttaccatcagtttttatagttacttgctggaytgtgtcagaatttgacttctctgagtgcacttgggttaactgatggccatcactctggaaatggagggatcccagctttgaagcaataaagtacatttttacagtaattgaattatctgactcaaaggaaggtccacagaagcaaggatgtcagggattgctttgcgtgtgtgcagggtcatcataaatccctctgaacttcgcctttagtaaacataaaccccatggtattttcatcgcttcccttccaagccggaatggtcctgattatttagaaattctcagaatccttgtgtccttgccacagatgaggagctgttgttgtcattagagcatgacatgtttccatcacaccttgtgctgtggctgctggggccagtgatgcctgagctgcagctgtgtgggcaccagcttccgtgggaaggcttggccatggtgggacgccccctccgcacttccttgaattcattcagtgaattcattccctgtccttcagtttacagggaacaatcattagaacgtgctattatgcctctggagagggctggctgttgtctccctattctttcagttatatacttacggactccaaatatcatttatttatgccaacagctgtctccttatcaacagcaggcttagttgaaactgctcacacctatactttccagcattcttggcaacaatctaatcttaggcacagttgaactctgcgctgtttctctggcatcaatatttatgggattatgtttctttctctataaacagaattcccagtagagctgtctctttcctgtccgtcttggcctcacatgcgcccatgcgcacac

SEQ ID NO: 61326 - DNA, 855 bp, Homo sapiens
gtatgcataatcagtgaattagacaagcatgcacatacatgatatctgatcaaacatttttttgtctctcatcatcctcataaaatttattcagtgggagaagctttttcttccatcagatacattccagttgtatgccaacatactcaggtaagagcaacattttggtcattttaaatagtttggtaattatgactcccagtcgcctacaataagaagaaactacaataatttagtactaaatttttcttccctctccaactgagtcttgtgttgagttgcctacttgcgctagcacatcttcccttgctggttgacatttttgctaagatttctccctctccttccaccccaccttggacacggaggtttctggcctccctttccccaaggtccccaaaaaaagaaatctgtcttatgagatagggctgccttcacatrgtgtcagggttctctggatagtaattgtgtgtaataagagagggagcattcaagaactcccatagaaattctcatagccctgacttctcatctttagcttgtgtagatttttttgtattccaggtggtcatttgtgactccttcctcatcccacaatctggcttcacctcccacttcttgatgctgggttccctccacctctttggacaaccctatcagagaggacctaaaagagccccatgctgaccttcactcttgcatgtctcactatggttcatgggaaacacacacatccattgccctgacaaacactagacatacaggctattctcaacacagaactcattcagggctctactaccggagctgtggccacaattctaggcaagaatcagacttccatcagccatgcat

SEQ ID NO: 61327 - DNA, 1172 bp, Homo sapiens
cattcatctgtttggattcagattttctccaaaatcaatgtgctcatggaatcattgatgtctaccggttgcctcacctactagtgtctgctaaagtgtttttggtctaatgagacaatgtagggtttcctttggttctgagggccataccttggccctaggaagttgttgggctgcagtgacacaatgagccaaaggtggataacagagcttccatctcagcttcaagccctcaccaccttaaactccacactagttggtcatttcaactgtttccacccaattccatggccactttcttgctctagtgattagtagattattaattccattttataaacacattcttactaggatgtcagtgaattactttaaacacttgtaatttaatatagacaataggaaaggggtggcactgaactgagaagatggcatctctcatcttaaaactttagacattggacctactgagtaagagtatgtatgtctggaagtctttatcctttcggaattgaaatttggtctacagttataattggtggactgtgaaacaggcaaaaccctacagaaaacaagcagaaggagaatggaattaactcgactagattatgagattagcttttttccacccaggctgatgggggacaaaggaacaatggttgaagcttgagtctacctgacaattggggtttgtcaggtaagccccattctcttgataactttttcagtgggctagacccagacccaatcatgttaagtatgatagggatcagtggcccagctggtgtggaagacaagtgggtcatactgggtttaggcccacatagcactaaaggtcttcaacatgcaattagaagctcaaatgttgacgggaatattgttcactctaaaaaagatgtttctattagaatttacttactctttcatgaaaacatagatgcttcctctttcctgattgtgagaacagtgtacctgactagcttccccttttctttaactgttaggaagttctgtcctagagataagtttcaaatttatgaaacaataatttcagggattattatttgcatcacttttcttaattgactctttatagtttccttttttatagtttatatagaggttttatartgattttaaaatttttattctcacactattttattttatgc

SEQ ID NO: 61328 - DNA, 1643 bp, Homo sapiens
ttgtaagtattctgtatgaacatgaaaataacatgaattataatattcaagttccttatataatatttgcccgttttaaaatccactagcttcttttaaaacttactcttttaattttttcttttatctattactgaaagacgtgtgtttgaaatgtctataatatttgggggcttatccatttctacttactttctgatatttttgctttatataatttgactctctctctaaatacgtgtgtgtctgtgtgtgtgagagagagtgtgtggtttgtgtgtatatatatgtatgtatcaggctaatacacattgaagtcatcacatcttcttaataacttaaaacttttatcacactggttacactaacttattttaataaatgtttctaacttacattctatttggtctacatagcaactttttaaaaaattatattcatgtagtatgtttgtatgtatatcatatatacacagtatctgtattgtttgaacttcaaagtttctgtaaatttatatattagttgtgtctcttgtaactatgatagagacggatgttttaaattttgccaatctttgtattttaacaaaaacattgtctacttaggtttaagttaatctttgatcatttatacttaattttgtattagtaatttgttgtgtatatatatatatatataaaatgtctcattttctcctatcactttctgtcttcttgttttaaaattatgacttttatttttattgttttcatagatacaacagagaaatgcataatgtccagtcaatttattaaagttccaaagtcggtcgcgcgcagtggctcacgcctgtaatctcaacacttcgggaggccgaggcgtgtggatcacgaggtcaggagttggagactagcctgatcaacatggtgaaaccccgtctctactaaaaatacaaaaattagccaggcagggtggcacgcggctgtaatccccgctactcaggaggctgaggcaggagaattgcttgaacctgggaggcagaggttgcagtgagcggagatgacgccaccatactccagcctgggagaaagggtgaatgagactccttctcaaaaaaaaaaaaaaaaaagagttgcaaagtcatacctttctgctcttgtcagacaattaaggggtctttgaatacttcagccctaataatttgcttcctaacatacatattgcagtgcttatctaattttaaatattcttttgtttcaacacctaattttctattttgatytatctttatgtttacaatatattttgctctgtgttcattctttgatttcagaacttcaatctttctgaagcgtgttttcagagtttcctttgagtttctttagtggaattctgctggtggtgttttgttttttgtctctaaatatgtgatttagccataggttgatgaatatttttcttggttgagaatttcagaatggcattattattcttaacaaataatattgtttattttacctttcatgctttcagatttcaatatgattaaaggtaatttgatttttctagtgctaattgaaatatttttcccttcctgattgtttactatttctctaggagatatgtagatgtaggtttatctccatcgtagcttgcttagcatg

SEQ ID NO: 61329 - DNA, 1643 bp, Homo sapiens
ttgtaagtattctgtatgaacatgaaaataacatgaattataatattcaagttccttatataatatttgcccgttttaaaatccactagcttcttttaaaacttactcttttaattttttcttttatctattactgaaagacgtgtgtttgaaatgtctataatatttgggggcttatccatttctacttactttctgatatttttgctttatataatttgactctctctctaaatacgtgtgtgtctgtgtgtgtgagagagagtgtgtggtttgtgtgtatatatatgtatgtatcaggctaatacacattgaagtcatcacatcttcttaataacttaaaacttttatcacactggttacactaacttattttaataaatgtttctaacttacattctatttggtctacatagcaactttttaaaaaattatattcatgtagtatgtttgtatgtatatcatatatacacagtatctgtattgtttgaacttcaaagtttctgtaaatttatatattagttgtgtctcttgtaactatgatagagacggatgttttaaattttgccaatctttgtattttaacaaaaacattgtctacttaggtttaagttaatctttgatcatttatacttaattttgtattagtaatttgttgtgtatatatatatatatataaaatgtctcattttctcctatcactttctgtcttcttgttttaaaattatgacttttatttttattgttttcatagatacaacagagaaatgcataatgtccagtcaatttattaaagttccaaagtcggtcgcgcgcagtggctcacgcctgtaatctcaacacttcgggaggccgaggcgtgtggatcacgaggtcaggagttggagactagcctgatcaacatggtgaaaccccgtctctactaaaaatacaaaaattagccaggcagggtggcacgcggctgtaatccccgctactcaggaggctgaggcaggagaattgcttgaacctgggaggcagaggttgcagtgagcggagatgacgccaccatactccagcctgggagaaagggtgaatgagactccttctcaaaaaaaaaaaaaaaaaagagttgcaaagtcatacctttctgctcttgtcagacaattaaggggtctttgaatacttcagccctaataatttgcttcctaacatacatattgcagtgcttatctaattttaaatattcttttgtttcaacacctaattttctattttgatctatctttatgtttacaatatattttgctctgtgttcattctttgatttcagaacttcaatctttctgaagcgtgttttcagagtttcctttgagtttctttagtggaattctgctggtggtgttttgttttttgtctctaaatatgtgatttagccataggttgatgaatatttttcttggttgagratttcagaatggcattattattcttaacaaataatattgtttattttacctttcatgctttcagatttcaatatgattaaaggtaatttgatttttctagtgctaattgaaatatttttcccttcctgattgtttactatttctctaggagatatgtagatgtaggtttatctccatcgtagcttgcttagcatg

SEQ ID NO: 61330 - DNA, 895 bp, Homo sapiens
aaattttatcatcaaaatctatagacaatttttgatgaaaatagactccatctctatgtcctgcttttcttcttcttattaattacattgctgtataaaagaacaagacttcagcatcaagaatatcttgtctcttggcattgaatttatacaaggtgctctttctttaatgctgtctcaaaggacatatttttactcattaaaaaggaagatcrgaatctagttgtatgcactgctccaacatattaataattaaaattaggaggtaaatgtggtcaaagctatagaaagacggagatgtcatttatatggattactctatagcactctacaaacagaaattgttaaataatagtttatataaatattttgtagcatttcaaatatttgagtgcttgaagtttctcctcttctatagttcagattatcaatttgaagacttactccgctagttaatatgtttttagtctcgtttgagtattatataaaagcaattttcagttaaatgtgttccgcttacataaaacgttacaaattattgaggatttaattacttattcatgttcctgtaatgtctttagaagattttcttattattacctatcaatatatgtatgctttgtcaaagaaaaatcaaacatatatatcattgaaattgaaactttttaaaagtacttattaattctattgaaaaaccacatccataggaacaattacaatataatattgtgaacatgtaaacatataccctatgtctattttatgtataagcatgtatgattaaaaatatagtgaagaatttttaaacctagtattataaagtaaaaattagttaacttccgatgattatttgttaattaagataaaattattttgatttgggtgattttaaata

SEQ ID NO: 61331 - DNA, 895 bp, Homo sapiens
aaattttatcatcaaaatctatagacaatttttgatgaaaatagactccatctctatgtcctgcttttcttcttcttattaattacattgctgtataaaagaacaagacttcagcatcaagaatatcttgtctcttggcattgaatttatacaaggtgctctttctttaatgctgtctcaaaggacatatttttactcattaaaaaggaagatcagaatctagttgtatgcactgctccaacatattaataattaaaattaggaggtaaatgtggtcaaagctatagaaagackgagatgtcatttatatggattactctatagcactctacaaacagaaattgttaaataatagtttatataaatattttgtagcatttcaaatatttgagtgcttgaagtttctcctcttctatagttcagattatcaatttgaagacttactccgctagttaatatgtttttagtctcgtttgagtattatataaaagcaattttcagttaaatgtgttccgcttacataaaacgttacaaattattgaggatttaattacttattcatgttcctgtaatgtctttagaagattttcttattattacctatcaatatatgtatgctttgtcaaagaaaaatcaaacatatatatcattgaaattgaaactttttaaaagtacttattaattctattgaaaaaccacatccataggaacaattacaatataatattgtgaacatgtaaacatataccctatgtctattttatgtataagcatgtatgattaaaaatatagtgaagaatttttaaacctagtattataaagtaaaaattagttaacttccgatgattatttgttaattaagataaaattattttgatttgggtgattttaaata

SEQ ID NO: 61332 - DNA, 938 bp, Homo sapiens
gcattagagggggtgagtgcaggtctttggggaatcttcctctgtccctgtagtcacactgtccatcaaaggtggcagacaggccaggcacagtggctcacacctgtaatcccagcactttgggagcccaaggcaggcggatcacctgaggtcaggagttcgagaccagcctggccaacatggtgaaaccatgtctctactaaaaatacaaaaattagccaggcatggtggtgcacgtctgtaatcccagctactcgggaggctgaggtatgagaattgcttgaacccaagagctggaagttgcagtaagctgagatagtgccactgcactccagcctgcggaatagagtgagactctgtctccaaaaaaaaaaaaaaaaaaaattgggggacagacagactttcactccatcaactcaaccaggaatcttgtggagaaaccccctaagaagaaaaaaaaaagcaaaggaacatgtctctcagtgggtgtattacccacgaggaacgaaaatgaatgtacgggagtctggttggaacagacagaaggggagatcctgagaagattcttccagcaaaagatattaacaggaaatgggcttcagagaacccagtamatgaagatgtgcaaaatgccttgtatagccttttttagtttgcctttattgctgtattgtaatagatattaaaatagatatttacgaatgtcttcagggtgagtcacagctcttgtttcccagccctccctttctcaagtcttccattcctccattgcaagttttccagcacagatattttccgaagctggattcctgtattggggaagttgttctgcactttaatcaccgacttgtacctacacaaggggagaggttgtaactcgggaagctaatgtaaagagaagctgtaccattcaacctatgtatatgaaagttgtcatt

SEQ ID NO: 61333 - DNA, 938 bp, Homo sapiens
gcattagagggggtgagtgcaggtctttggggaatcttcctctgtccctgtagtcacactgtccatcaaaggtggcagacaggccaggcacagtggctcacacctgtaatcccagcactttgggagcccaaggcaggcggatcacctgaggtcaggagttcgagaccagcctggccaacatggtgaaaccatgtctctactaaaaatacaaaaattagccaggcatggtggtgcacgtctgtaatcccagctactcgggaggctgaggtatgagaattgcttgaacccaagagctggaagttgcagtaagctgagatagtgccactgcactccagcctgcggaatagagtgagactctgtctccaaaaaaaaaaaaaaaaaaaattgggggacagacagactttcactccatcaactcaaccaggaatcttgtggagaaaccccctaagaagaaaaaaaaaagcaaaggaacatgtctctcagtgggtgtattacccacgaggaacgaaaatgaatgtacgggagtctggttggaacagacagaaggggagatcctgagaagattcttccagcaaaagatattaacaggaaatgggcttcagagaacccagtacatgaagatgtgcaaaatgccttgtatagccttttttagtttgcctttattgctgtattgtaatagatattaaaatagatatttacgaatgtcttcagggtgagtcacagctcttgtttcccagccctccctttctcaagtcttccattcctccattgcaagttttccagcacagatattttcmgaagctggattcctgtattggggaagttgttctgcactttaatcaccgacttgtacctacacaaggggagaggttgtaactcgggaagctaatgtaaagagaagctgtaccattcaacctatgtatatgaaagttgtcatt

SEQ ID NO: 61334 - DNA, 938 bp, Homo sapiens
gcattagagggggtgagtgcaggtctttggggaatcttcctctgtccctgtagtcacactgtccatcaaaggtggcagacaggccaggcacagtggctcacacctgtaatcccagcactttgggagcccaaggcaggcggatcacctgaggtcaggagttcgagaccagcctggccaacatggtgaaaccatgtctctactaaaaatacaaaaattagccaggcatggtggtgcacgtctgtaatcccagctactcgggaggctgaggtatgagaattgcttgaacccaagagctggaagttgcagtaagctgagatagtgccactgcactccagcctgcggaatagagtgagactctgtctccaaaaaaaaaaaaaaaaaaaattgggggacagacagactttcactccatcaactcaaccaggaatcttgtggagaaaccccctaagaagaaaaaaaaaagcaaaggaacatgtctctcagtgggtgtattacccacgaggaacgaaaatgaatgtacgggagtctggttggaacagacagaaggggagatcctgagaagattcttccagcaaaagatattaacaggaaatgggcttcagagaacccagtacatgaagatgtgcaaaatgccttgtatagccttttttagtttgcctttattgctgtattgtaatagatattaaaatagatatttacgaatgtcttcagggtgagtcacagctcttgtttcccagccctccctttctcaagtcttccattcctccattgcaagttttccagcacagatattttccgaagctggattcctgtattggggaagttgttctgcactttaatcaccgacttgtacctacacaaggggagaggttgtaactcgggragctaatgtaaagagaagctgtaccattcaacctatgtatatgaaagttgtcatt

SEQ ID NO: 61335 - DNA, 1809 bp, Homo sapiens
tgagggtaaaacaaggaacaagatgagaatgccccactcccatatggcacatgtaaaagcataaaagtctatctgaatcatttttgaaacagaaggcccatgacattgcctgctgagtccacattggctcttgtttgtggataccagcacatattaaaattatctgaaatattcagttgtgagccccctcccctgatatggttaggcttcgcgtccccacccagatctcatcttgaattgtaatccccataatccccataatccctatttgtcaaaggagagaccaggtggaggtaattgaatcatggggatggtttcccccatgctgttctcatgatagtgagtgagttctcccaagatcggatggttttataaggggcttcttcccctttgcttagcacttctcctttctgccaccttgtgtagaaggtgccttgcttccccttcaccttccaccatgattgtaagtttcctgaggcctccccagccatgctgaactgtgagtcaattaaacctctttcttttataaattacccagtctcaggcagttctttattacagtatgaaaatggactaatacagtgagaaaaaaaatagctctggagggctgggttacattcaggacatgtactaaatattttaatgcatttttttagcaagcacgtaaaatgtctcccccaaggctttaagctctctttctacttccctaaaggtttccccatcaaaataggaaataaatattgaagctagaaaaggcttgtccccttcaaagtaagtaagggcacgcttcatgacaggcatatctttcttcagacagtgggggaggacacttaattccttcacctaagaaaaaaaaagttacaaaacagcaacctatggaaacaaaaacatggaatcaatgcatctcctgaaataacttcyctgtagtcctgagggtggtgttttgtttggcttgttctccttcccacctttttataccccccaaggatccttctcattctgttgtagccagggctcctagagaaggctgtcaacattgaagggcccagatcccttctaccagtttttcttgtgcttcctatgtgcttgtaactgtgaatctcctgcttttcaaacaactcttctgccttttgtatgggtatacattaaaggggaaaatcagggcctcttcacactactctggcaaaatcaacctgaactgctggattataggtcttggcatctggagctgcctgcttgagccctggcaggtctggaggcttggggctctttcattgactcaggaaatatttctgcttcccacccaggacttctgttgtctcttcctcccttctcctgccctgctctcaggactcttagatgtagcccaggtttgcttccacacagttgacattggcggtgcacggtcttctcccctctacgccctcagatctccacgcctgtgcctatgacacgtgccaccagcacctgtgttgccaagcctggctcctcatccgtggccactcctgcccccacaacctgccagtcctgcctcctttttgcctgcctcctgcctatctttacttcactgatttctttggctggaaaatatttctacaacttcccctcccacactcacctggggctatgacattgttgtgggcactggttgggcctcgcccctgccacctaacaagtacatcctacaggcccaggagggcattatctgtggttttgaatttctagtgtctcgaactgtactggcccagagaggacctcaaatatggaaaactgaagtgattgctttctgcacgtgttacctatgcaccc

SEQ ID NO: 61336 - DNA, 1809 bp, Homo sapiens
tgagggtaaaacaaggaacaagatgagaatgccccactcccatatggcacatgtaaaagcataaaagtctatctgaatcatttttgaaacagaaggcccatgacattgcctgctgagtccacattggctcttgtttgtggataccagcacatattaaaattatctgaaatattcagttgtgagccccctcccctgatatggttaggcttcgcgtccccacccagatctcatcttgaattgtaatccccataatccccataatccctatttgtcaaaggagagaccaggtggaggtaattgaatcatggggatggtttcccccatgctgttctcatgatagtgagtgagttctcccaagatcggatggttttataaggggcttcttcccctttgcttagcacttctcctttctgccaccttgtgtagaaggtgccttgcttccccttcaccttccaccatgattgtaagtttcctgaggcctccccagccatgctgaactgtgagtcaattaaacctctttcttttataaattacccagtctcaggcagttctttattacagtatgaaaatggactaatacagtgagaaaaaaaatagctctggagggctgggttacattcaggacatgtactaaatattttaatgcatttttttagcaagcacgtaaaatgtctcccccaaggctttaagctctctttctacttccctaaaggtttccccatcaaaataggaaataaatattgaagctagaaaaggcttgtccccttcaaagtaagtaagggcacgcttcatgacaggcatatctttcttcagacagtgggggaggacacttaattccttcacctaagaaaaaaaaagttacaaaacagcaacctatggaaacaaaaacatggaatcaatgcatctcctgaaataacttccctgtagtcctgagggtggtgttttgtttggcttgttctccttcccacctttttataccccccaaggatccttctcattctgttgtagccagggctcctagagaaggctgtcaacattgaagggcccagatcccttctaccagtttttcttgtgcttcctatgtgcttgtaactgtgaatctcctgcttttcaaacaactcttctgccttttgtatgggtatacattaaaggggaaaatcagggcctcttcacactactctggcaaaatcaacctgaactgctggattataggtcttggcatctggagctgcctgcttgagccctggcaggtctggaggcttggggctctttcattgactcaggaaatatttctgcttcccacccaggacttctgttgtctcttcctcccttctcctgccctgctctcaggactcttagatgtagcccaggtttgcttccacacagttgacattggcggtgcacggtcttctcccctctacgccctcagatctccacgcctgtgcctatgacacgtgccaccwgcacctgtgttgccaagcctggctcctcatccgtggccactcctgcccccacaacctgccagtcctgcctcctttttgcctgcctcctgcctatctttacttcactgatttctttggctggaaaatatttctacaacttcccctcccacactcacctggggctatgacattgttgtgggcactggttgggcctcgcccctgccacctaacaagtacatcctacaggcccaggagggcattatctgtggttttgaatttctagtgtctcgaactgtactggcccagagaggacctcaaatatggaaaactgaagtgattgctttctgcacgtgttacctatgcaccc

SEQ ID NO: 61337 - DNA, 1809 bp, Homo sapiens
tgagggtaaaacaaggaacaagatgagaatgccccactcccatatggcacatgtaaaagcataaaagtctatctgaatcatttttgaaacagaaggcccatgacattgcctgctgagtccacattggctcttgtttgtggataccagcacatattaaaattatctgaaatattcagttgtgagccccctcccctgatatggttaggcttcgcgtccccacccagatctcatcttgaattgtaatccccataatccccataatccctatttgtcaaaggagagaccaggtggaggtaattgaatcatggggatggtttcccccatgctgttctcatgatagtgagtgagttctcccaagatcggatggttttataaggggcttcttcccctttgcttagcacttctcctttctgccaccttgtgtagaaggtgccttgcttccccttcaccttccaccatgattgtaagtttcctgaggcctccccagccatgctgaactgtgagtcaattaaacctctttcttttataaattacccagtctcaggcagttctttattacagtatgaaaatggactaatacagtgagaaaaaaaatagctctggagggctgggttacattcaggacatgtactaaatattttaatgcatttttttagcaagcacgtaaaatgtctcccccaaggctttaagctctctttctacttccctaaaggtttccccatcaaaataggaaataaatattgaagctagaaaaggcttgtccccttcaaagtaagtaagggcacgcttcatgacaggcatatctttcttcagacagtgggggaggacacttaattccttcacctaagaaaaaaaaagttacaaaacagcaacctatggaaacaaaaacatggaatcaatgcatctcctgaaataacttccctgtagtcctgagggtggtgttttgtttggcttgttctccttcccacctttttataccccccaaggatccttctcattctgttgtagccagggctcctagagaaggctgtcaacattgaagggcccagatcccttctaccagtttttcttgtgcttcctatgtgcttgtaactgtgaatctcctgcttttcaaacaactcttctgccttttgtatgggtatacattaaaggggaaaatcagggcctcttcacactactctggcaaaatcaacctgaactgctggattataggtcttggcatctggagctgcctgcttgagccctggcaggtctggaggcttggggctctttcattgactcaggaaatatttctgcttcccacccaggacttctgttgtctcttcctcccttctcctgccctgctctcaggactcttagatgtagcccaggtttgcttccacacagttgacattggcggtgcacggtcttctcccctctacgccctcagatctccacgcctgtgcctatgacacgtgccaccagcacckgtgttgccaagcctggctcctcatccgtggccactcctgcccccacaacctgccagtcctgcctcctttttgcctgcctcctgcctatctttacttcactgatttctttggctggaaaatatttctacaacttcccctcccacactcacctggggctatgacattgttgtgggcactggttgggcctcgcccctgccacctaacaagtacatcctacaggcccaggagggcattatctgtggttttgaatttctagtgtctcgaactgtactggcccagagaggacctcaaatatggaaaactgaagtgattgctttctgcacgtgttacctatgcaccc

SEQ ID NO: 61338 - DNA, 577 bp, Homo sapiens
ggtatgtctacatatggatttatacttactgagtttgctcagagcttggagtatttcctcagtcttaaaggccctagttgtgaaaatgttactacagaaaaactttctttttttaacttaaaatcctttttattgggaaataaatgtaagattatagataagtttgaaaataaaagaattgttagaacaaaaaatactcatatgcctgttaccctaatttgtctattattattttattaaatttaggttaccatttgttctctctctctctctctctcaatatatatcccaattttcagtctttagatctaaatctttcagcaacctggactatcatggccccagtgtaatgcttggctttgtacctcatgagggaagaaatgtttttttttaatcttaagttctagggtacgtgtgcatcatatgcaggtttattacataggtatacatgtgccatgttggtttgctgtacccatcaacttgtcatttacattaggtatttctcctratgctatctgtcccccagccccccaccccctgacaggccccagtgtgtgatgttccccaccctgtgtcc

SEQ ID NO: 61339 - DNA, 747 bp, Homo sapiens
gactacttaacytgtgtcctgcggaggacccttctggcggccagctggaagctgtgctccggtcttcaaatagtggcttttaattcgcagactagaacatttaggattacaaagaaaaccgtttcctttcaaagctgtttatctttgtgaagtagcattttgcttaaaattggaagcctttgactatcagagagaaatcatatctatgaaactagagaggctgctcagatgactgcaaaccagccatccttgctggttttaccagtagtagtgttataaagaatgttgtccaatttcatgagtctcgtaggtttgtttttttgtttttcaaatacagtattgtacaaaaaggaagcagaatgtggttgctgtcacaatgtaatgcctctctgggcctgagaatttggaaaggctcacactcctcataaaagttctcttctttcctcattctccctttagataaaaagtctttttttttttttttttttttttgagacggagtctcgctctgtcggcgggatctcggctcactgcaagctccgcctcccgggttcacgccattctcctgcctcagcctcccgagtagctgggactacaggcgcccgccacgacgcccggctaattttttgtatttttagtagagccggggtttcactgtgttagccaggatggtctcgatctcctgacctcatgatccgcccgcctctgcctcccaaagtgctgggattacaggcgtgagccaccgcg

SEQ ID NO: 61340 - DNA, 747 bp, Homo sapiens
gactacttaacttgtgtcctgcggaggacccttctggcggccagctggaagctgtgckccggtcttcaaatagtggcttttaattcgcagactagaacatttaggattacaaagaaaaccgtttcctttcaaagctgtttatctttgtgaagtagcattttgcttaaaattggaagcctttgactatcagagagaaatcatatctatgaaactagagaggctgctcagatgactgcaaaccagccatccttgctggttttaccagtagtagtgttataaagaatgttgtccaatttcatgagtctcgtaggtttgtttttttgtttttcaaatacagtattgtacaaaaaggaagcagaatgtggttgctgtcacaatgtaatgcctctctgggcctgagaatttggaaaggctcacactcctcataaaagttctcttctttcctcattctccctttagataaaaagtctttttttttttttttttttttttgagacggagtctcgctctgtcggcgggatctcggctcactgcaagctccgcctcccgggttcacgccattctcctgcctcagcctcccgagtagctgggactacaggcgcccgccacgacgcccggctaattttttgtatttttagtagagccggggtttcactgtgttagccaggatggtctcgatctcctgacctcatgatccgcccgcctctgcctcccaaagtgctgggattacaggcgtgagccaccgcg

SEQ ID NO: 61341 - DNA, 747 bp, Homo sapiens
gactacttaacttgtgtcctgcggaggacccttctggcggccagctggaagctgtgctccggtcttcaaatagtggcttttaattcgcagactagaacrtttaggattacaaagaaaaccgtttcctttcaaagctgtttatctttgtgaagtagcattttgcttaaaattggaagcctttgactatcagagagaaatcatatctatgaaactagagaggctgctcagatgactgcaaaccagccatccttgctggttttaccagtagtagtgttataaagaatgttgtccaatttcatgagtctcgtaggtttgtttttttgtttttcaaatacagtattgtacaaaaaggaagcagaatgtggttgctgtcacaatgtaatgcctctctgggcctgagaatttggaaaggctcacactcctcataaaagttctcttctttcctcattctccctttagataaaaagtctttttttttttttttttttttttgagacggagtctcgctctgtcggcgggatctcggctcactgcaagctccgcctcccgggttcacgccattctcctgcctcagcctcccgagtagctgggactacaggcgcccgccacgacgcccggctaattttttgtatttttagtagagccggggtttcactgtgttagccaggatggtctcgatctcctgacctcatgatccgcccgcctctgcctcccaaagtgctgggattacaggcgtgagccaccgcg

SEQ ID NO: 61342 - DNA, 747 bp, Homo sapiens
gactacttaacttgtgtcctgcggaggacccttctggcggccagctggaagctgtgctccggtcttcaaatagtggcttttaattcgcagactagaacatttaggattacaaagaaaaccgtttcctttcaaagctgtttatctttgtgaagtagcattttgcttaaaattggaagcctttgactatcagagagaaatcayatctatgaaactagagaggctgctcagatgactgcaaaccagccatccttgctggttttaccagtagtagtgttataaagaatgttgtccaatttcatgagtctcgtaggtttgtttttttgtttttcaaatacagtattgtacaaaaaggaagcagaatgtggttgctgtcacaatgtaatgcctctctgggcctgagaatttggaaaggctcacactcctcataaaagttctcttctttcctcattctccctttagataaaaagtctttttttttttttttttttttttgagacggagtctcgctctgtcggcgggatctcggctcactgcaagctccgcctcccgggttcacgccattctcctgcctcagcctcccgagtagctgggactacaggcgcccgccacgacgcccggctaattttttgtatttttagtagagccggggtttcactgtgttagccaggatggtctcgatctcctgacctcatgatccgcccgcctctgcctcccaaagtgctgggattacaggcgtgagccaccgcg

SEQ ID NO: 61343 - DNA, 747 bp, Homo sapiens
gactacttaacttgtgtcctgcggaggacccttctggcggccagctggaagctgtgctccggtcttcaaatagtggcttttaattcgcagactagaacatttaggattacaaagaaaaccgtttcctttcaaagctgtttatctttgtgaagtagcattttgcttaaaattggaagcctttgactatcagagagaaatcatatctatgaaactagagaggctgctcagatgactgcaaaccagccatccttgctggttttaccagtagtagtgttataaagaatgttgtccaatttcatgagtctcgtaggtttktttttttgtttttcaaatacagtattgtacaaaaaggaagcagaatgtggttgctgtcacaatgtaatgcctctctgggcctgagaatttggaaaggctcacactcctcataaaagttctcttctttcctcattctccctttagataaaaagtctttttttttttttttttttttttgagacggagtctcgctctgtcggcgggatctcggctcactgcaagctccgcctcccgggttcacgccattctcctgcctcagcctcccgagtagctgggactacaggcgcccgccacgacgcccggctaattttttgtatttttagtagagccggggtttcactgtgttagccaggatggtctcgatctcctgacctcatgatccgcccgcctctgcctcccaaagtgctgggattacaggcgtgagccaccgcg

SEQ ID NO: 61344 - DNA, 1433 bp, Homo sapiens
cattgttaacatttcttccctgccatctaaacctctggttttggttggtcagggagatggatttgagactgagttctcatctccccccctgcagcaccctattaaagtgccttccttggcgataagcgtctcggtgattggctttctgtgcggcaaccagcaggaatcccagatctctgaattttggcaaaggagtctcgtgataaaggtgggatggattctactgaccaacatcaaaacgttcagacatttgaaagccttaatctcagggtcggggtttgggccgcccttgagccttttccttgggcctatccattaaaatcagcctggccaggcctgtcttcaaggtccaggggtagggtcaggtcctcccgacgcttcttgacgcttctcccgccgggtcggcagccaccctccccttccctgtgacctgcagagaagcttcagggggcgtttattcaatctgcgaggagcccacgaggcacaggcacacggtgactctggttcccactgcacccaccgccctccttggtcctctcgctctctctggcaggcagtaacgttctgggtgagcatgggtgctgaagacacccaggcaggaagggtagggaagggcaccagccccttaggtcctgcgcagtggggatccaaaaaaggtcttgaagaaacagaaagggagcgttgggagtagatcaaagggaaagaaaggaatcctaggagatttcctgtctgaaggcaccatgaagagaaagtccgcctcctctgggccgggtcctcccgtcgcaggtgaaccaagtgccggtctccattggagaccaaagcagataactttgccctgactcctagttaggaagccatgytttgtcctcccctgtttagcgcttgatcctgtagcacttgattgtctctcccgggctttctatggattccagggatgcaactgagaagttagtttttaatgcacttttgcttgaagtaagagtattttaggctggggcaaggtggctcacgcctgtaatcccaacactttgggaggccaaggtgggcagattacttgaggtcaggaatttgagaccagcctggccaacatggtgaaactccgtctctactaaaaatacaaaaattagccgcctgtgttggctcaggcctgtagtcccagctactcacgaggctgaggcaggagaatcctttgaacttgggaagtggaagttgcagtgcgctgatctcaaaaaaaaaaaaaagaaagtattttagaatctttcggcaaaggaaatgaattctgacaggttttgcactgaagacattcagatgtgaggaaaacacgaaaaccactatgctaggggaaagcaaatgctgttgagaatgtctcacaaacacaaattacacgtcagcaggtaggtttgaccctcaggttcggcacattttactttaag

SEQ ID NO: 61345 - DNA, 1572 bp, Homo sapiens
caaacaattgtacaaacaagggaagcaagtcctttcgccaaaaggaacacagagggtcatgatgatgctactcctccagggatttcagggttcccagacacccagttttctgtctagttcttctggaagatgttattcttggggagttataggtcctcgcgtttggagctctttcatgttctctctgaattttcccctcagttcctccccattctgcttcaacaacaacaacaacaacaaaaaacaattctcacctccagaagatccagcctgtgcctctgcacgagcctttcaggaggtctggatgtgtgttccaccgctccccggcttctttccccgcttttgcttttcccttccctcctgccctcccgccccaggaccctaccactgctcagctgagcccccgcggctccaccgcgcagaaggtgcactggaggccctgcccgttgccctccccgggggatgcctagaaatcaacgtgaataaacgctttgaaaaaagaacttccccatggaaaaatctcatgatttctattcttgggattcttcaagggactaaaagctaaaggcgacgatggccccgggaggtcgaggctgcagtgagccgtgtttgcaccactgcactccagcctgggtgacctagcgagaccctgtctcaaaaacaaatcaaaacttccccatggtaaaatatttcatgatttccattttcggggctcttcaaargactaaaagctgaaggtgacgatggattaattcaacaagtcctagtcgtgcgcgctggtgagtgccagaccctgctctccgcgaggggacccacgagccaccctcaccaccatccctgccctggtggagcccccgtgcgggacacaggatccgaagatggcagcggaagttccgcagcggcctcaaaagtgactgggcagggtgggcacaggctgcctcactgggtcaaggcggcataaagaaccatcgcgggagcccaccgggcgttcagcttcccttgggcccccaggcggctcaggtccgggtcggggccgggcgtttccgggggcttctgctgcaggtgaggggcaaggtcgtcctggttccagaatctcccaacctgcgggtctccaatgagaccaacacgattcacccctctcatcgctccagttttccaaggcctttcacagttgtactgccgggtgggctctgaggatgggagggttggggagtgtttggtgagtgcacccttcctatagcgcccagaagaaggtacactacgtgtctctgtggcacaatcggttagcgcgtttggctgttaatctaaagtttggtggttagagcccactgagggacgcctgctccaggtgttttgttttgttttgttttgttttgttttgttttgtttttcttcttccctgagacacagtcttgctctttcgccaggctggagtgcagtggagcgatcttggctcactgcaacctcggcctcccgggttcaagggattcccctgcctcagcctctggagtagctgggaatacaggcgcgcgccaccccgcccagctaatgttttgtgttttagtagaaaca

SEQ ID NO: 61346 - DNA, 1572 bp, Homo sapiens
caaacaattgtacaaacaagggaagcaagtcctttcgccaaaaggaacacagagggtcatgatgatgctactcctccagggatttcagggttcccagacacccagttttctgtctagttcttctggaagatgttattcttggggagttataggtcctcgcgtttggagctctttcatgttctctctgaattttcccctcagttcctccccattctgcttcaacaacaacaacaacaacaaaaaacaattctcacctccagaagatccagcctgtgcctctgcacgagcctttcaggaggtctggatgtgtgttccaccgctccccggcttctttccccgcttttgcttttcccttccctcctgccctcccgccccaggaccctaccactgctcagctgagcccccgcggctccaccgcgcagaaggtgcactggaggccctgcccgttgccctccccgggggatgcctagaaatcaacgtgaataaacgctttgaaaaaagaacttccccatggaaaaatctcatgatttctattcttgggattcttcaagggactaaaagctaaaggcgacgatggccccgggaggtcgaggctgcagtgagccgtgtttgcaccactgcactccagcctgggtgacctagcgagaccctgtctcaaaaacaaatcaaaacttccccatggtaaaatatttcatgatttccattttcggggctcttcaaaagactaaaagctgaaggtgacgatggattaattcaacaagtcctagtcgtgcgcgctggtgagtgccagaccctgctctccgcgaggggacccacgagccaccctcaccaccatccctgccctggtggagcccccgtgcgggacacaggatccgaagatggcagcggaagttccgcagcggcctcaaaagtgactgggcagggtgggcacaggctgcctcactgggtcaaggcggcayaaagaaccatcgcgggagcccaccgggcgttcagcttcccttgggcccccaggcggctcaggtccgggtcggggccgggcgtttccgggggcttctgctgcaggtgaggggcaaggtcgtcctggttccagaatctcccaacctgcgggtctccaatgagaccaacacgattcacccctctcatcgctccagttttccaaggcctttcacagttgtactgccgggtgggctctgaggatgggagggttggggagtgtttggtgagtgcacccttcctatagcgcccagaagaaggtacactacgtgtctctgtggcacaatcggttagcgcgtttggctgttaatctaaagtttggtggttagagcccactgagggacgcctgctccaggtgttttgttttgttttgttttgttttgttttgttttgtttttcttcttccctgagacacagtcttgctctttcgccaggctggagtgcagtggagcgatcttggctcactgcaacctcggcctcccgggttcaagggattcccctgcctcagcctctggagtagctgggaatacaggcgcgcgccaccccgcccagctaatgttttgtgttttagtagaaaca

SEQ ID NO: 61347 - DNA, 1572 bp, Homo sapiens
caaacaattgtacaaacaagggaagcaagtcctttcgccaaaaggaacacagagggtcatgatgatgctactcctccagggatttcagggttcccagacacccagttttctgtctagttcttctggaagatgttattcttggggagttataggtcctcgcgtttggagctctttcatgttctctctgaattttcccctcagttcctccccattctgcttcaacaacaacaacaacaacaaaaaacaattctcacctccagaagatccagcctgtgcctctgcacgagcctttcaggaggtctggatgtgtgttccaccgctccccggcttctttccccgcttttgcttttcccttccctcctgccctcccgccccaggaccctaccactgctcagctgagcccccgcggctccaccgcgcagaaggtgcactggaggccctgcccgttgccctccccgggggatgcctagaaatcaacgtgaataaacgctttgaaaaaagaacttccccatggaaaaatctcatgatttctattcttgggattcttcaagggactaaaagctaaaggcgacgatggccccgggaggtcgaggctgcagtgagccgtgtttgcaccactgcactccagcctgggtgacctagcgagaccctgtctcaaaaacaaatcaaaacttccccatggtaaaatatttcatgatttccattttcggggctcttcaaaagactaaaagctgaaggtgacgatggattaattcaacaagtcctagtcgtgcgcgctggtgagtgccagaccctgctctccgcgaggggacccacgagccaccctcaccaccatccctgccctggtggagcccccgtgcgggacacaggatccgaagatggcagcggaagttccgcagcggcctcaaaagtgactgggcagggtgggcacaggctgcctcactgggtcaaggcggcataaagaaccatcgcgggagcccaccgggcgttcagcttcccttgggcccccaggcggctcaggtccgggtcggggccgggygtttccgggggcttctgctgcaggtgaggggcaaggtcgtcctggttccagaatctcccaacctgcgggtctccaatgagaccaacacgattcacccctctcatcgctccagttttccaaggcctttcacagttgtactgccgggtgggctctgaggatgggagggttggggagtgtttggtgagtgcacccttcctatagcgcccagaagaaggtacactacgtgtctctgtggcacaatcggttagcgcgtttggctgttaatctaaagtttggtggttagagcccactgagggacgcctgctccaggtgttttgttttgttttgttttgttttgttttgttttgtttttcttcttccctgagacacagtcttgctctttcgccaggctggagtgcagtggagcgatcttggctcactgcaacctcggcctcccgggttcaagggattcccctgcctcagcctctggagtagctgggaatacaggcgcgcgccaccccgcccagctaatgttttgtgttttagtagaaaca

SEQ ID NO: 61348 - DNA, 1572 bp, Homo sapiens
caaacaattgtacaaacaagggaagcaagtcctttcgccaaaaggaacacagagggtcatgatgatgctactcctccagggatttcagggttcccagacacccagttttctgtctagttcttctggaagatgttattcttggggagttataggtcctcgcgtttggagctctttcatgttctctctgaattttcccctcagttcctccccattctgcttcaacaacaacaacaacaacaaaaaacaattctcacctccagaagatccagcctgtgcctctgcacgagcctttcaggaggtctggatgtgtgttccaccgctccccggcttctttccccgcttttgcttttcccttccctcctgccctcccgccccaggaccctaccactgctcagctgagcccccgcggctccaccgcgcagaaggtgcactggaggccctgcccgttgccctccccgggggatgcctagaaatcaacgtgaataaacgctttgaaaaaagaacttccccatggaaaaatctcatgatttctattcttgggattcttcaagggactaaaagctaaaggcgacgatggccccgggaggtcgaggctgcagtgagccgtgtttgcaccactgcactccagcctgggtgacctagcgagaccctgtctcaaaaacaaatcaaaacttccccatggtaaaatatttcatgatttccattttcggggctcttcaaaagactaaaagctgaaggtgacgatggattaattcaacaagtcctagtcgtgcgcgctggtgagtgccagaccctgctctccgcgaggggacccacgagccaccctcaccaccatccctgccctggtggagcccccgtgcgggacacaggatccgaagatggcagcggaagttccgcagcggcctcaaaagtgactgggcagggtgggcacaggctgcctcactgggtcaaggcggcataaagaaccatcgcgggagcccaccgggcgttcagcttcccttgggcccccaggcggctcaggtccgggtcggggccgggcgtttccgggggcttctgctgcaggtgaggggcaaggtcgtcctggttccagaatctcccaayctgcgggtctccaatgagaccaacacgattcacccctctcatcgctccagttttccaaggcctttcacagttgtactgccgggtgggctctgaggatgggagggttggggagtgtttggtgagtgcacccttcctatagcgcccagaagaaggtacactacgtgtctctgtggcacaatcggttagcgcgtttggctgttaatctaaagtttggtggttagagcccactgagggacgcctgctccaggtgttttgttttgttttgttttgttttgttttgttttgtttttcttcttccctgagacacagtcttgctctttcgccaggctggagtgcagtggagcgatcttggctcactgcaacctcggcctcccgggttcaagggattcccctgcctcagcctctggagtagctgggaatacaggcgcgcgccaccccgcccagctaatgttttgtgttttagtagaaaca

SEQ ID NO: 61349 - DNA, 1572 bp, Homo sapiens
caaacaattgtacaaacaagggaagcaagtcctttcgccaaaaggaacacagagggtcatgatgatgctactcctccagggatttcagggttcccagacacccagttttctgtctagttcttctggaagatgttattcttggggagttataggtcctcgcgtttggagctctttcatgttctctctgaattttcccctcagttcctccccattctgcttcaacaacaacaacaacaacaaaaaacaattctcacctccagaagatccagcctgtgcctctgcacgagcctttcaggaggtctggatgtgtgttccaccgctccccggcttctttccccgcttttgcttttcccttccctcctgccctcccgccccaggaccctaccactgctcagctgagcccccgcggctccaccgcgcagaaggtgcactggaggccctgcccgttgccctccccgggggatgcctagaaatcaacgtgaataaacgctttgaaaaaagaacttccccatggaaaaatctcatgatttctattcttgggattcttcaagggactaaaagctaaaggcgacgatggccccgggaggtcgaggctgcagtgagccgtgtttgcaccactgcactccagcctgggtgacctagcgagaccctgtctcaaaaacaaatcaaaacttccccatggtaaaatatttcatgatttccattttcggggctcttcaaaagactaaaagctgaaggtgacgatggattaattcaacaagtcctagtcgtgcgcgctggtgagtgccagaccctgctctccgcgaggggacccacgagccaccctcaccaccatccctgccctggtggagcccccgtgcgggacacaggatccgaagatggcagcggaagttccgcagcggcctcaaaagtgactgggcagggtgggcacaggctgcctcactgggtcaaggcggcataaagaaccatcgcgggagcccaccgggcgttcagcttcccttgggcccccaggcggctcaggtccgggtcggggccgggcgtttccgggggcttctgctgcaggtgaggggcaaggtcgtcctggttccagaatctcccaacctgcgggtctccaatgagaccaacacgattcaccsctctcatcgctccagttttccaaggcctttcacagttgtactgccgggtgggctctgaggatgggagggttggggagtgtttggtgagtgcacccttcctatagcgcccagaagaaggtacactacgtgtctctgtggcacaatcggttagcgcgtttggctgttaatctaaagtttggtggttagagcccactgagggacgcctgctccaggtgttttgttttgttttgttttgttttgttttgttttgtttttcttcttccctgagacacagtcttgctctttcgccaggctggagtgcagtggagcgatcttggctcactgcaacctcggcctcccgggttcaagggattcccctgcctcagcctctggagtagctgggaatacaggcgcgcgccaccccgcccagctaatgttttgtgttttagtagaaaca

SEQ ID NO: 61350 - DNA, 1572 bp, Homo sapiens
caaacaattgtacaaacaagggaagcaagtcctttcgccaaaaggaacacagagggtcatgatgatgctactcctccagggatttcagggttcccagacacccagttttctgtctagttcttctggaagatgttattcttggggagttataggtcctcgcgtttggagctctttcatgttctctctgaattttcccctcagttcctccccattctgcttcaacaacaacaacaacaacaaaaaacaattctcacctccagaagatccagcctgtgcctctgcacgagcctttcaggaggtctggatgtgtgttccaccgctccccggcttctttccccgcttttgcttttcccttccctcctgccctcccgccccaggaccctaccactgctcagctgagcccccgcggctccaccgcgcagaaggtgcactggaggccctgcccgttgccctccccgggggatgcctagaaatcaacgtgaataaacgctttgaaaaaagaacttccccatggaaaaatctcatgatttctattcttgggattcttcaagggactaaaagctaaaggcgacgatggccccgggaggtcgaggctgcagtgagccgtgtttgcaccactgcactccagcctgggtgacctagcgagaccctgtctcaaaaacaaatcaaaacttccccatggtaaaatatttcatgatttccattttcggggctcttcaaaagactaaaagctgaaggtgacgatggattaattcaacaagtcctagtcgtgcgcgctggtgagtgccagaccctgctctccgcgaggggacccacgagccaccctcaccaccatccctgccctggtggagcccccgtgcgggacacaggatccgaagatggcagcggaagttccgcagcggcctcaaaagtgactgggcagggtgggcacaggctgcctcactgggtcaaggcggcataaagaaccatcgcgggagcccaccgggcgttcagcttcccttgggcccccaggcggctcaggtccgggtcggggccgggcgtttccgggggcttctgctgcaggtgaggggcaaggtcgtcctggttccagaatctcccaacctgcgggtctccaatgagaccaacacgattcacccctctcatcgctccagttttccaaggcctttcacagttgtactgccgggtgggctctgaggatgggagggttggggagtgtttggtgagtgcacccttcctayagcgcccagaagaaggtacactacgtgtctctgtggcacaatcggttagcgcgtttggctgttaatctaaagtttggtggttagagcccactgagggacgcctgctccaggtgttttgttttgttttgttttgttttgttttgttttgtttttcttcttccctgagacacagtcttgctctttcgccaggctggagtgcagtggagcgatcttggctcactgcaacctcggcctcccgggttcaagggattcccctgcctcagcctctggagtagctgggaatacaggcgcgcgccaccccgcccagctaatgttttgtgttttagtagaaaca

SEQ ID NO: 61351 - DNA, 1005 bp, Homo sapiens
ataaacaatttacttgatttcatgaagggctgtcaatatatctagtacacacataatacaaatcaattcaactgaaaaagttttacattaatattcttgttaaaatttattttcttgaaatagagatagggttttgttatgttgcccaggctggcctcaaactcctggcctcaagcactcaccaacagaggcctcccaaagtgctgagattacagrcatgagccactgcctggcctaatattctaattataataatatgttaacaattattttaataatgtttcctttaatatgcaaaagaacttttaaggaaagatttgtgttgttcagctttcttaaaagtggtatacaaatagtttttaactgatgtccctttttgttggtaaaatttgtacaaacagctcctgtttagctgtccaaggcaggaagctgactgaatttgggatggaagccctgggtattaataaagacaatggttttcctagagtatctattgagatcatatctctagccatttaacatgactagccataggaatttttaaaagaaagaactgacttttattttattatttaattttattttattggagacagggtcttgctctgtcacccaggctggggtgcagtggcgcaatcatggttcactgcagcctcgacctcccaggctcaactaatcctcccatctcagcatcccaagtagctgggactacaggtgcacatcaccacacctggctaatttttgtattttttgtagaggttttgctctgttgcccaggctggtctcaaactcctgggctcaagctgtccatccacctcagcctcccaaagtgctgggattacagacaagagccaccatgcccagcctgacgtttctttttctcactctctcttagctccatagtttaatcacactcaagtgaaattacatataatggtaaactttcctgggagtttaccatgtgctaggcagtgctctgtgtcctggatatgcatcatctcattt

SEQ ID NO: 61352 - DNA, 1005 bp, Homo sapiens
ataaacaatttacttgatttcatgaagggctgtcaatatatctagtacacacataatacaaatcaattcaactgaaaaagttttacattaatattcttgttaaaatttattttcttgaaatagagatagggttttgttatgttgcccaggctggcctcaaactcctggcctcaagcactcaccaacagaggcctcccaaagtgctgagattacagacatgagccactgcctggcctaatattctaattataataatatgttaacaattattttaataatgtttcctttaatatgcaaaagaacttttaaggaaagatttgtgttgttcagctttcttaaaagtggtatacaaatagtttttaactgatgtccctttttgttggtaaaatttgtacaaacagctcctgtttagctgtccaaggcaggaagctgactgaatttgggatggaagccctgggtattaataaagacaatggttttcctagagtatctattgagatcatatctctagccatttaacatractagccataggaatttttaaaagaaagaactgacttttattttattatttaattttattttattggagacagggtcttgctctgtcacccaggctggggtgcagtggcgcaatcatggttcactgcagcctcgacctcccaggctcaactaatcctcccatctcagcatcccaagtagctgggactacaggtgcacatcaccacacctggctaatttttgtattttttgtagaggttttgctctgttgcccaggctggtctcaaactcctgggctcaagctgtccatccacctcagcctcccaaagtgctgggattacagacaagagccaccatgcccagcctgacgtttctttttctcactctctcttagctccatagtttaatcacactcaagtgaaattacatataatggtaaactttcctgggagtttaccatgtgctaggcagtgctctgtgtcctggatatgcatcatctcattt

SEQ ID NO: 61353 - DNA, 1005 bp, Homo sapiens
ataaacaatttacttgatttcatgaagggctgtcaatatatctagtacacacataatacaaatcaattcaactgaaaaagttttacattaatattcttgttaaaatttattttcttgaaatagagatagggttttgttatgttgcccaggctggcctcaaactcctggcctcaagcactcaccaacagaggcctcccaaagtgctgagattacagacatgagccactgcctggcctaatattctaattataataatatgttaacaattattttaataatgtttcctttaatatgcaaaagaacttttaaggaaagatttgtgttgttcagctttcttaaaagtggtatacaaatagtttttaactgatgtccctttttgttggtaaaatttgtacaaacagctcctgtttagctgtccaaggcaggaagctgactgaatttgggatggaagccctgggtattaataaagacaatggttttcctagagtatctattgagatcatatctctagccatttaacatgactagccataggaatttttaaaagaaagaactgacttttattttattatttaattttattttattggagacagggtcttgctctgtcacccaggctggggtgcagtggcgcaatcatggttcactgcagcctcracctcccaggctcaactaatcctcccatctcagcatcccaagtagctgggactacaggtgcacatcaccacacctggctaatttttgtattttttgtagaggttttgctctgttgcccaggctggtctcaaactcctgggctcaagctgtccatccacctcagcctcccaaagtgctgggattacagacaagagccaccatgcccagcctgacgtttctttttctcactctctcttagctccatagtttaatcacactcaagtgaaattacatataatggtaaactttcctgggagtttaccatgtgctaggcagtgctctgtgtcctggatatgcatcatctcattt

SEQ ID NO: 61354 - DNA, 622 bp, Homo sapiens
gggggagtctggtcacattcacatcaagtctgccattcagctgccaggactgcggccacaggggactctcagctgtgataaatgcagcatgagtatgcaggatgctgctttgaggggaggcgggcaaaggcatccccgccagaggatgcaacactgtgacaagacacacagaggagcgctgtgcaggaatatgtgtctaaaaccacagcagacccatgggcgcgggaagacaccagtgccctgcatgttttggaaaagagacggtggccttcctgcactggctgaggcacctggaggggcttttcaaggatgtgggtggcactgacagcagcctcaccctcacgaggacattctcctgctgcactcacacacggagacctagcaggtaccaggtttccatttcccttagaagtgtatgaagtatttaaaccaatgagtgcattaaaatactctgaccatcactgcaggatgctaagaaactcacacagattcaaacatcatgaactgcacctcagggtaaaaaaacgagaagctgcgctttatagacatgtcccagctrtaagtaagaaaggaatgacagatttagagtaccaccgtttagagtaacccctaagaaatgagt

SEQ ID NO: 61355 - DNA, 676 bp, Homo sapiens
atcttcatgcaggagccacagcatgatggggaaaggtggcatcctgagatctgggcccactgaccccttggagtgtgctggtgacacacatttggagctgcatgcagcagccctgggccttgccttcaccctgctactgtcttactcgttgctgaagcccacagatgcattcggctgtgcttccaaaacaataatgcattacatctcgctgtttgtgagaaaccagggatttattttaaattttaagcattggaaacatccctctcaggaagctgcctgaatgacaaagccacagaataaaactgaaaagaaaaacaagccctaccccataactgcagaaagttggttaacattttcctgacaatgaaagccagaaaaaagcaaaagagcacttacacttattttaaagaagtctgtaacccaaaccagcaatggcaccccatcctgggaggtgtcctgccagcactatccaactttaagagactgaaaacctgggaagtaaaagacaatttcaaggaagttaaaatgccgcgtgaccttgggtttgtgcyatcagcccttgtgggcactggactatggttttaacaatcacttgcctgaaggaggtgccagatggagaatcacctgggcacccccctgtgttgtccagctctgcacatgtgaccctgtctttctt

SEQ ID NO: 61356 - DNA, 730 bp, Homo sapiens
gacagggatgctgtctgtctgtctcccggctggggacagggatgctggtctgtctcccggctggggacagggatgctgtctgtgtgtctgtctcccagctgaggacagggatgctctctgtgtatgtctgtctcctggctgaggacagggatgctgtctgtttttctcctggctgaggacagggatgctgtctgtctgtctcctgggtggggacagggatgctgtctgtctgtctgtctcccggctgaggacagcaatgctgtctatctgtctcccggctgaggacagcaatgctgtctatctgtctcccggctgaggacagggatgctgtctgtgtgtctgtctcccagctgaggacagagatgctctctgtgtgtgtctctctcctggctgaggacagggatgctgtctgtttttctcctggctgaggacagggatgctgtctgtttttctgctagctgaggacaaggatgctgtctgtctgtctcctgggtggggacagggatgctgtctgtctgtctcccagatgaggacagggatgctgtctgtctgtctgtctgtctccttgctgcactgctcagttttcctagaactattataagtaaaaatccgtttacctataartgtattcctttactcaaaatctgttttaaggaatatctttttatgcatagtcaattaatattaatatgttctcagtaatatagcctatatatgatcatatgcttct

SEQ ID NO: 61357 - DNA, 661 bp, Homo sapiens
acgcgtccactgaacttgctgtaaacccgccttcctccccagtcccactgcccgggccctcttcgggcctcctttcttcttctgtaatgcagtggccgcgcctgcatgcgcttctgggctgctctgctctgtgattttctctctatgccagatcagtgttcctgtcctactgaagttcctccctactctctctctctctctstgtgtgtatatgtttctccaagtgattcaaatctgaaacttcctgggatttccctttgcctagcacagtggttcttaaagtgtcttgggaaggccggaagtatcacgattacttgggaacttgttagaaatgcaaattcccaggtcccacgcagacccactgaatatgggactctgagggtgggcccggcagcctgcgttcaagccctctaggtgagtctgatgtgtgcgagagtttggaagtcactgggctggacagttcatgccacactcccatgtgaattgaaagcttcccacacgctggtcccaatttgcctgttctgtccaattcctaactgtcccatctcccatatcccttcctgggggacgctgctcacacggttccctctcctgaaaagctgtttgccacttccaagtattgaaagcttcaagatccagctcaagcatcatttgttttgat

SEQ ID NO: 61358 - DNA, 661 bp, Homo sapiens
acgcgtccactgaacttgctgtaaacccgccttcctccccagtcccactgcccgggccctcttcgggcctcctttcttcttctgtaatgcagtggccgcgcctgcatgcgcttctgggctgctctgctctgtgattttctctctatgccagatcagtgttcctgtcctactgaagttcctccctactctctctctctctctgtgtgtgtatatgtttctccaagtgattcaaatctgaaacttcctgggatttccctttgcctagcacagtggttcttaaagtgtcttgggaaggccggaagtatcacgattacttgggaacttgttagaaatgcaaattcccaggtcccacgcagacccactgaatatgggactctgagggtgggcccggcagcctgcgttcaagccctctaggtgagtctgatgtgtgcgagagtttggaagtcactgggctggacagttcaygccacactcccatgtgaattgaaagcttcccacacgctggtcccaatttgcctgttctgtccaattcctaactgtcccatctcccatatcccttcctgggggacgctgctcacacggttccctctcctgaaaagctgtttgccacttccaagtattgaaagcttcaagatccagctcaagcatcatttgttttgat

SEQ ID NO: 61359 - DNA, 845 bp, Homo sapiens
tttgctaagaagggaagtcagagccaacactacaaaaatcttcaattcttcttttcccaaatcagagcagcgctaactgtggaaatacaattctagaatgttccagaggcccttggacggagtcaggggcatagcagttttctcttcattgtacaaatgagaccttggaaagcgaaggtctcatatgtaatgatgtaaaacaaagaaagaatctataatgcagaaatcttacctctctccagagaagtcttggattttcttcccaaacttccctgcttttcatcaaagtttgaaacatatctgtaatggataaggcagctctttgactttaagttttaaggtgtcaaggaccgaacaaggaattgagagtcaaaasccagagttttaatctccctctacctctgaccttgggcaagccacgttccctctccagaccttgctttcctcttctgaaacatgagaagttggactggttgaccttccactcagctgggaaccaaaacacagaaagaagaaatatattgacgcccacttttgaatgctagtaaaaactcatcaggcttcaccttgggaacaatattaaaatgtatttagctcttcgttatccataaacatagactgcacatgatttaggatccagcctgaattaaatattcccaagtgcctgtctcctgcatcagacatagattggggatggatagaaaagaaacaaaaaccgttgaataaacattgaacaagtaaatatattaacacgatgctgaaactccaagtatgagtatgtcttatataatagctctagaaaatgttgcctgcctgttatctatctattcactcaacaattcata

SEQ ID NO: 61360 - DNA, 1186 bp, Homo sapiens
gttcacaagcggccccttcacttggaattctgatatgaacaagaacatggtgagggggtcatgctaagccaagctctcattcattcccacagatagagaccccaggcctatactcagttttatgatactgtactgtgatcattggcttgctgtaattttgttttctctatttctggcatgatctgtttcattgaacacagaaaatatgacatgtgggcagaaaatgaggcctaaaaagaaatttaggaaagcaaatttcatttgtcattttaccactagataggcatttcatttaggacaggtttctagtgaaacttggtgaaattttcttgtttcaaacatctttggaatagtctaattctcatgatgatgaggaaaagaaacaagaagagggaggagaagacctaaatagccattggtaccaactcattgctgtaaccacacacagctataaatttattagatgtgacacgatttaagtttcaaaaaatgaaaagagcattgccaggatgatctcactgaaagtaaaaatgtccttgaaattcttattytgtgacaaaaaatgagggcaaatctgtctggtattctctctccttgttcttcttcaagacaaagtttctaaaataatctcagacgtggtgtaacatttgccagacagctgttctagggaatgccaggaagataatccttgggtctatcatcgtcttttgtattttttctcccttcagtacattctgggttcaggccagcacatagacaacatgttcagaaagtttagaaagtctctctagggagacttgatgtctctggaggtcttttatgccgattttactggcctcgttgagaaggcagtttcttgacttcttggcaaagggattgaccttaagtctgtttctagagggcaaatgtctgtcaagatgaagccgtggctgaggctcaccactcagggattcacctgatctgaattctctttctccatccctgagatagctcccatggatggtgagtgaaactctgaaccaggaattatagatttggtcatcttataactagaaaaagaccctagaggacatttagcttagcactctcccttccaacgtattggtgacccccactgtccagcagaaatgagttttctagaaaacaaaatgctttctctcaatacacatgttcaaaatctcatgca

SEQ ID NO: 61361 - DNA, 557 bp, Homo sapiens
aaactggtaaagtttgtaggtaagagaaacgggcaagcagcctattctgagactcaagtttctcatctatgaatgagtgacatttaccttgcaggctagttttaactattaaaggaaataaaatgaaataatgcacaggaagtactcaaaacctacatatgtaatagggatatatcattatttcattattcccccacagattatcatttccaatttttctccattataaacaaygcttatacttggctagatctatttccgtacaagcacaaatacttctctaggcttgatacactataagtgaaattgctgaattgaaaagtatgaatattttacagatattgccaatttaagatcccacaaacagcatacaagagtacatgtttttctctaccttcctggtcaataccagacacaaaagttattctaaaactttgcctatctgatgggtaaaatgttttaatttttatttccctaaatattagtgatgttgaacatctttttcaaatgcaagttggccacttgcatttattttcttgtaaattgcctattcttag

SEQ ID NO: 61362 - DNA, 557 bp, Homo sapiens
aaactggtaaagtttgtaggtaagagaaacgggcaagcagcctattctgagactcaagtttctcatctatgaatgagtgacatttaccttgcaggctagttttaactattaaaggaaataaaatgaaataatgcacaggaagtactcaaaacctacatatgtaatagggatatatcattatttcattattcccccacagattatcatttccaatttttctccattataaacaatgcttatacttggctagatctatttccgtacaagcacaaatacttctctaggcttgatacactawaagtgaaattgctgaattgaaaagtatgaatattttacagatattgccaatttaagatcccacaaacagcatacaagagtacatgtttttctctaccttcctggtcaataccagacacaaaagttattctaaaactttgcctatctgatgggtaaaatgttttaatttttatttccctaaatattagtgatgttgaacatctttttcaaatgcaagttggccacttgcatttattttcttgtaaattgcctattcttag

SEQ ID NO: 61363 - DNA, 970 bp, Homo sapiens
aaaggaaatagcaggcagatcaggcaagatcatcagaactcaaaggaccactgaactagcagtgagtctgaaatagcttttcccttgaatgtccccagcctgaacttaaatgcggctggaaacatgaaatgagcaattctccagaagcactcggcctcaaggagcaagaaaagaaacaagtgctcagagaaatgatagaaaatccccattttcttctcttttctctcatacaccatgaatcagccataggcaatcctatagccacatgcggtggcaacaatggaaatgtgcgggagccaaaaatctgaaggagggttcttcttctaagtccgctggagctgtggttctgaaaaggtggggccaacacccattgcttttctgtttttttctctctctgtcctctagtcccttagtccctgatttaggtgcaactacagtgcaacttaatgatagccacaattttctggatggacattgataaaggaaaccccagggaattgggttctccgaatataatataaacaaaaaataaataacaaaaaaaagaaagcatccaaatacatggaaattaaacaaaacacctctaaataatttacagatcaaaaaggaagtctcaagggaaataaaatattttgaaccaaatgaaaatacaacatatctwaatttgtagcatgaaactaaagcaattcaaaagaaaagatgatgaaaaatttcccagctcattttatgagtccagcattaccctgataccaaatctaaacacagtaccaaaataaaaaagaaacaaactacagatcagtattcttcataaacacagatgtaaaaatcttcaacaaagtattaggaaaccaaatatgccagtatacgaaaagaattcaacaccacaactaagtggggtttatgagaatgcaagctgattcaatattgaaaatcaatctaccacattaacagtctaaagaagaaaaacaag

SEQ ID NO: 61364 - DNA, 748 bp, Homo sapiens
aaagcggagcataaccctaacatataattttaagaaggagaaaagaaaaatagctttttaggaatttcactttaaaagtctctttactttgaaattaccaataggtacataatatgggggtggggtacagtagggggtaaatggttcagaataatgtaaaagtatcctagatcttctatagaaaatactatggagaaataacagaggtttcggatacactggcaaagcaagtctttccatgaaatttatataaagtgatttaaacaagcaaataaggtgaaaacaygaggcacctgaaatatttgttagattagtaatactctacacctgctgtagagtattgccacctctcaaaccccaaattactgctttgatgtgacagtcaacggccccttgaaattttatcttttcaaataatatacttgctatgtaatatttctattattttcaaagcagtagttggaactattcagcatttgccacaaaacaaaccaaggtagtaatccattactccagcttttgtgttccaaaagtatatctgaaaatcagccattagaaatttagaacacatttttctggagaaaaaaactacacaaatagccaaaaaccacttccagagatttgcaagctactcatagggagtctcagaatcctatttaacctataatataccaggaacgtcagtaagccaccatatataattctctctcgtgctcgcgccttagcagtacttccctagctacagaca

SEQ ID NO: 61365 - DNA, 795 bp, Homo sapiens
aaaaactattcaatgtaattggtaatcaaagaaatgcatttatcaaaattgaaaaatcggccaaaattaccatacaattataatatttactactatttggtgacaattcaggaaaacagggagcctcatacatgctggtgctagaatactttgacaaacatttctagaagataatttggcaatcaaaagccttcagttgaactgaactagcaattttacttctaagaatttaatcttagtaaataatcagagatgtatacacaaatggatactcaccacaggattacttatcctctcctcccaaaaaaagggggaacaacataaatgtccaataatattggaaacaagttaaataagttatagaacatgcacagaattccatgcatctattaacaatattactcaaccctgcctgagaagtctaaatcctggctgtacaccactgtatttatttatttatttatttgtttctttttgagagggagttttgctcttgttgaccaggctggagtgcaatggcgcgatctcggctcactgcaacctccaccttctgggttcaagcgattctcccgcctcagcctttcgagtagctgggattacaggcaagtgctaccacgcccagctaattttggggkttttttttcagtagagatggggtttcctcatgttggtcaggatggtctcaaactcctgatctcaggtgatccgcccgcctcagcttcccaaagtcctgggattacaggcatgagccaccgcacccggcactactgtatttttttttaaatacaaatgcct

SEQ ID NO: 61366 - DNA, 522 bp, Homo sapiens
cacatggatggacagaagccatgtggaggagcaccaaggcaccacacaggtgtgggaatcctccttagatcttgtagctcagctagccaccacctgactatagctgagcgagtgacccagccatcctcactggaacagaagagccagctgaaccctgcctgaattcctatgccactgattatgagaaggagtaaattattgttttaagccactaagttttggagtgtggtttgtttcacaacaatagataacaaaacgatcatattcttacagtttggtaattaaccctagagacaaacatatttatcaagatttctctctttacatgatggcaccttaaatgtgaaaaacaaaattctgatggtcaagagtatgtagtcaatgaaatctgacggctakgctaagcccagaaaacaatgaggcagccacaacaaattaacaaagtattatttttaaaaatttatttttgagacaggatctcactctgtcatccaggctggagtacagtggtggaatctcagc

SEQ ID NO: 61367 - DNA, 628 bp, Homo sapiens
cagactctttatttatttatttatttattttgagatggagtctcgcgtctcactctgccacccaggctgaagcgcagtggtgccatcttggctcaccgcaacctccgcctcctggattcaagcgattctcctgcctcagcctcctgagcagctgggcttacaggcacctgccacaaggcccagctaatttttgtatttttaatagagacagggggtttcgccatgttggccaagctggtctcaaactcctgacctcaggtgatccgccctcctcggcctcccaaagtgctgggattgcaggcgtgagccaccgtgcccggccggtagattccagactcttaaggaggatgtgcactgaatatttaagccagagtgttccactgtgtaagrtgggaagtagcaaaatagaaccaactgcaaaggattgtggggtagaattagctaattcacatcacgggtttcacacaacgccaagcgctgagaaaaccctccacagccattagctcttgtcaaaactcctcgaacatccctataggatggattccgttatcccttagttatatagaaaaaaaggaggctcaaagaaacaaatagcttgccaaagaccaagccagaacctggaggagag

SEQ ID NO: 61368 - DNA, 676 bp, Homo sapiens
tgcattaaagaaaaagaaaatatgatagtgactaaaagggaagttagtttactaagagggagtgggttttgagaaggcctattggaagaagagacgtttttaaatgagacataaagaatgagtaagaagcaggtgaaaaatgcaccagttctaggcaaaggacatagaaagcacaaaggccttaattggaagttggttaagaaaggcagctgggagctggagaggaggggtatgaccagatgatgccagccatatcccatccatttaaagctgtgcattacattaatctactcagtttgcccagggtacattgtctgctaggatctgttattcttattttgttttagtcttgaagttctgttcccttgcttttcaagattgtatttacttgtatattttttcttttgcacctgttccaaacagtagttctcaggtcacttcatcctcttaggcagtggttctcgaagtgtggtagtctctgkattagcagtattagcatcatggggaacaggcaggataggaaatgggaagaggagggcagttcctgacattttaaagcacccacagtaggccatgccattctcctactaaacagtctcacagaacaccaaccctaaacaaggttgcagaccatgagaaatgagacaaagcaagtctacttcataattttatctaa

SEQ ID NO: 61369 - DNA, 1110 bp, Homo sapiens
gaggatcctggggttacacacttgaagcatgtgtattctctggagtgaacagataaaatccaacttattacggcacagaaatttcaggattcaaaagtgttctttgtcttaaataaaaatggttgacagatttgaaatttgtggctacagataaacatagggcagaaaggtcaaaggcaattttagaaatccaggaatccaaatatcaaatttaattcctttaaaatatctcatgcttttcttactcacagttcctcccagttgagacttgaacacttgctgacaaaatatgaacactggctaatctacattgaacaattatatacataatatcaaatgttaataaagctggaatagtactccttcaagatatcctatatcattgcaccaaaaacctttgggtaggttattatgtgcattttggtacataaaactattataagcattattgtaagcattattatctttaaataatttccagttgtttcatggctctcaactctattaccacttcagtaatattatgagtaagaaattctgaaaagccttcttattgcatacacctagctatgtttcttaatacttaactaataatctttgaaattcatatgtagggtcacacccacccacaacacaaatgcaagaaatctactggagccaaaagatagtgaactaaactagagtgatgtatgtgtaatagagacatgggctacactgaagggatctgccagtacgaggagcttcaaaagctgcgttgtagtagccatgagggagaatgacagacaaaactttggctcacataaagtgtgtagaaagaacaaagacctccaaataccctgcagttatgaagggttatagctacagtaaaaagggggctaaaaaaaatctgtttcctggaaaaagaagctggcaaggaaatatgtctaagttcttggcttgaggtgggaaaatttttttctggaaattagcagccatatgactacccatgtacagaaaaaggattcaaattaatatcacttgcacagtccagggaaatgcaattcagtaaattaaattaaaatattttggggtcagggatgttccrggatgcttggaaagagataacacaaa

SEQ ID NO: 61370 - DNA, 522 bp, Homo sapiens
acatggtgaaaccctgtctctactaaaaatacaaaaattagctgggtgtggtggcacacgcctgtaatcccagccacttgggagggtgaggtaggagaatcgcttgaacctgggaggtagaggttgcagtgatgcagtgagccgagaccacgccattgtactctagcctgggcgacagagcgagcctccatctcaaaaaaaaaaaaaaaaaaaaaaaaaagcaaaaacaaacaggygagattcatttggataaaatagctgatttaacctaatatacctaaaacatcataattttaacataatcaatagaaacatttttgcaagattttatgttattttttaccatacgacgtcttggaaatgttggtttggaccagccatgttcaactgctcagtagccatgtgtggccagaggcggccgtattggacagtgcagatggtgcatgagggtgttcgggcagtgggaacagccagtacagaggcccagtgggggcacatgcctgctgctacgggaacagtgag

SEQ ID NO: 61371 - DNA, 522 bp, Homo sapiens
acatggtgaaaccctgtctctactaaaaatacaaaaattagctgggtgtggtggcacacgcctgtaatcccagccacttgggagggtgaggtaggagaatcgcttgaacctgggaggtagaggttgcagtgatgcagtgagccgagaccacgccattgtactctagcctgggcgacagagcgagcctccatctcaaaaaaaaaaaaaaaaaaaaaaaaaagcaaaaacaaacaggcgagattcatttkgataaaatagctgatttaacctaatatacctaaaacatcataattttaacataatcaatagaaacatttttgcaagattttatgttattttttaccatacgacgtcttggaaatgttggtttggaccagccatgttcaactgctcagtagccatgtgtggccagaggcggccgtattggacagtgcagatggtgcatgagggtgttcgggcagtgggaacagccagtacagaggcccagtgggggcacatgcctgctgctacgggaacagtgag

SEQ ID NO: 61372 - DNA, 1526 bp, Homo sapiens
  misc_feature (1)...(1526): n = A,T,C or G
tgcatgcagtgatttgcccattcaacagcaggaaggtctcaagccmaggttatctcatctcaggagctcagccacagcatttcttttaggccccgcagggcagagatccttctattttaaccacattgataaccctctccattattttcctccacactccatccctggtggaaaagcagcccctggaatctctcttctgatttcccagggaatccctactggctctttggggtagacagaagggaatgagttcaaagacttcagcagagaatgtagaatggaggaggattgtccccacatgatctgggctcattcttccattccaggccaccttctgtagcctgaaagtcccctgtgactctttctttttctgcatttgccaaacatttattttgtccctttatttaaaacttcagtgttgctttgttgctttttaaattagaagacaatgattttcttctttgcgaggcagagagagaagatgtggaaagaaaagctcccaggatttagagcatggatattaggatacttcttcatcacgtctttcttgaagatgtgggtatgagccatggtaaaattaagagtggtcccttccagatgacctctccagtgaccttgggcacttaaggcactctccttggctctagcgtttttatttgagaaacgggtagaaatcatttctgtctgctcacatcagagaaataggtgggaaatgctgaatggaatataaagtgctaatcacaggttggtggttgttattattgatgttgtttttacttctgctgccatgagcagtgttatagggagaaaacatatgtttttaacaagttttttatttttcaaataagacaaagaaatggtaaaaatatagtataaaggttatacagtgaaaactgtctccttcccactatcagtcccttctcagaacagtagataccttcaatcagtttttctgtgttcttccaacaaatgttctctgggtatttacaaggtatttggtattttttgtttgttggagatattttagggggtgaaaccaatgcgggtttttcataatannnnnnnnnnnnnnnnnnnnnnnnnnnnnnnnnnnnnnnnnnnnnnnnnnnnnnnnnnnnnnnnnnnnnnnnnnnnnnnnnnnnnnnnnnnnnnnnnnnncccccccttttccaaatagctcatcttctacttctctcttcattccagggcccattctataataagcctgaatccactactttatgatgattaattttaaacagatctctggttcacaaccactctacaggatagattcaagcctgtaagacgaaggaaattcagtctttgaagtggaacaatatctgaggacaggggtggaggaggcctcttattacctcttttaaacaaaatactacaaatattgcagccatttcaatactttcataaataaatacaaaaaattgtcattgtacaccaattttgctgatgacatgaaagcatttcaaagaatacacagtaggcattttttcatttgcaaatttaac

SEQ ID NO: 61373 - DNA, 1526 bp, Homo sapiens
  misc_feature (1)...(1526): n = A,T,C or G
tgcatgcagtgatttgcccattcaacagcaggaaggtctcaagccaaggttatctcatctcaggagctcagccacagcatttcttttaggccccgcagggcagagatccttctattttaaccacattgataaccctctccattattttcctccacactccatccctggtggaaaagcagcccctggaatctctcttctgatttcccagggaatccctactggctctttggggtagasagaagggaatgagttcaaagacttcagcagagaatgtagaatggaggaggattgtccccacatgatctgggctcattcttccattccaggccaccttctgtagcctgaaagtcccctgtgactctttctttttctgcatttgccaaacatttattttgtccctttatttaaaacttcagtgttgctttgttgctttttaaattagaagacaatgattttcttctttgcgaggcagagagagaagatgtggaaagaaaagctcccaggatttagagcatggatattaggatacttcttcatcacgtctttcttgaagatgtgggtatgagccatggtaaaattaagagtggtcccttccagatgacctctccagtgaccttgggcacttaaggcactctccttggctctagcgtttttatttgagaaacgggtagaaatcatttctgtctgctcacatcagagaaataggtgggaaatgctgaatggaatataaagtgctaatcacaggttggtggttgttattattgatgttgtttttacttctgctgccatgagcagtgttatagggagaaaacatatgtttttaacaagttttttatttttcaaataagacaaagaaatggtaaaaatatagtataaaggttatacagtgaaaactgtctccttcccactatcagtcccttctcagaacagtagataccttcaatcagtttttctgtgttcttccaacaaatgttctctgggtatttacaaggtatttggtattttttgtttgttggagatattttagggggtgaaaccaatgcgggtttttcataatannnnnnnnnnnnnnnnnnnnnnnnnnnnnnnnnnnnnnnnnnnnnnnnnnnnnnnnnnnnnnnnnnnnnnnnnnnnnnnnnnnnnnnnnnnnnnnnnnnncccccccttttccaaatagctcatcttctacttctctcttcattccagggcccattctataataagcctgaatccactactttatgatgattaattttaaacagatctctggttcacaaccactctacaggatagattcaagcctgtaagacgaaggaaattcagtctttgaagtggaacaatatctgaggacaggggtggaggaggcctcttattacctcttttaaacaaaatactacaaatattgcagccatttcaatactttcataaataaatacaaaaaattgtcattgtacaccaattttgctgatgacatgaaagcatttcaaagaatacacagtaggcattttttcatttgcaaatttaac

SEQ ID NO: 61374 - DNA, 1526 bp, Homo sapiens
  misc_feature (1)...(1526): n = A,T,C or G
tgcatgcagtgatttgcccattcaacagcaggaaggtctcaagccaaggttatctcatctcaggagctcagccacagcatttcttttaggccccgcagggcagagatccttctattttaaccacattgataaccctctccattattttcctccacactccatccctggtggaaaagcagcccctggaatctctcttctgatttcccagggaatccctactggctctttggggtagacagaagggaatgagttcaaagacttcagcagagaatgtagaatggaggaggattgtccccacatgatctgggctcattcttccattccaggccaccttctgtagcctgaaagtcccctgtgactctttctttttctgcatttgccaaacatttattttgtccctttatttaaaacttcagtgttgctttgttgctttttaaattagaagacaatgattttcttctttgygaggcagagagagaagatgtggaaagaaaagctcccaggatttagagcatggatattaggatacttcttcatcacgtctttcttgaagatgtgggtatgagccatggtaaaattaagagtggtcccttccagatgacctctccagtgaccttgggcacttaaggcactctccttggctctagcgtttttatttgagaaacgggtagaaatcatttctgtctgctcacatcagagaaataggtgggaaatgctgaatggaatataaagtgctaatcacaggttggtggttgttattattgatgttgtttttacttctgctgccatgagcagtgttatagggagaaaacatatgtttttaacaagttttttatttttcaaataagacaaagaaatggtaaaaatatagtataaaggttatacagtgaaaactgtctccttcccactatcagtcccttctcagaacagtagataccttcaatcagtttttctgtgttcttccaacaaatgttctctgggtatttacaaggtatttggtattttttgtttgttggagatattttagggggtgaaaccaatgcgggtttttcataatannnnnnnnnnnnnnnnnnnnnnnnnnnnnnnnnnnnnnnnnnnnnnnnnnnnnnnnnnnnnnnnnnnnnnnnnnnnnnnnnnnnnnnnnnnnnnnnnnnncccccccttttccaaatagctcatcttctacttctctcttcattccagggcccattctataataagcctgaatccactactttatgatgattaattttaaacagatctctggttcacaaccactctacaggatagattcaagcctgtaagacgaaggaaattcagtctttgaagtggaacaatatctgaggacaggggtggaggaggcctcttattacctcttttaaacaaaatactacaaatattgcagccatttcaatactttcataaataaatacaaaaaattgtcattgtacaccaattttgctgatgacatgaaagcatttcaaagaatacacagtaggcattttttcatttgcaaatttaac

SEQ ID NO: 61375 - DNA, 1526 bp, Homo sapiens
  misc_feature (1)...(1526): n = A,T,C or G
tgcatgcagtgatttgcccattcaacagcaggaaggtctcaagccaaggttatctcatctcaggagctcagccacagcatttcttttaggccccgcagggcagagatccttctattttaaccacattgataaccctctccattattttcctccacactccatccctggtggaaaagcagcccctggaatctctcttctgatttcccagggaatccctactggctctttggggtagacagaagggaatgagttcaaagacttcagcagagaatgtagaatggaggaggattgtccccacatgatctgggctcattcttccattccaggccaccttctgtagcctgaaagtcccctgtgactctttctttttctgcatttgccaaacatttattttgtccctttatttaaaacttcagtgttgctttgttgctttttaaattagaagacaatgattttcttctttgcgaggcagagagagaagatgtggaaagaaaagctcccaggatttagagcatggatattaggatacttcttcatcacgtctttcttgaagatgtgggtatgagccatggtaaaattaagagtggtcccttccagatgacctctccagtgaccttgggcacttaaggcactctccttggctctagcgtttttatttgagaaacgggtagaaatcatttctgtctgctcacatcagagaaataggtgggaaatgctgaatggaatataaagtgctaatcacaggttggtggttgttattattgatgttgtttttacttctgctgccatgagcagtgttatagggagaaaacatatgtttttaacaagttttttatttttcaaataagacaaagaaatggtaaaaatatagtataaaggttatacagtgaaaactgtctccttcccrctatcagtcccttctcagaacagtagataccttcaatcagtttttctgtgttcttccaacaaatgttctctgggtatttacaaggtatttggtattttttgtttgttggagatattttagggggtgaaaccaatgcgggtttttcataatannnnnnnnnnnnnnnnnnnnnnnnnnnnnnnnnnnnnnnnnnnnnnnnnnnnnnnnnnnnnnnnnnnnnnnnnnnnnnnnnnnnnnnnnnnnnnnnnnnncccccccttttccaaatagctcatcttctacttctctcttcattccagggcccattctataataagcctgaatccactactttatgatgattaattttaaacagatctctggttcacaaccactctacaggatagattcaagcctgtaagacgaaggaaattcagtctttgaagtggaacaatatctgaggacaggggtggaggaggcctcttattacctcttttaaacaaaatactacaaatattgcagccatttcaatactttcataaataaatacaaaaaattgtcattgtacaccaattttgctgatgacatgaaagcatttcaaagaatacacagtaggcattttttcatttgcaaatttaac

SEQ ID NO: 61376 - DNA, 875 bp, Homo sapiens
tgcatctgagaaaggactaatatccagaatctacaaggaactcaaacaaatcagcaagaaaattataaataatcctatcaaaaagtgggctaaggacatgaatagaaaattctcaaagcaagatacacaaatggccaataaacatataaaaaaagcccaacatcactaattatcatggaaatgcaaatcaaaaccacagtgcaataccactttactcctgcaagaacggccataattttaaaatcaaaaaatagtagatattggtgtggatgtggtgaaagggaacacttttacaatgctggtgagaatgtaaactactacacccattatggaaattccttaaagaactaaatgtgggttttcttttttttttttttagaactttctggcacataagatgctccaggcttatctggtgtatttcctgctccaagtctttaaatccaggaagacctagcttcctggtacccataatctrggtaccaggtgcactggttgctactgggacattgttgacactaggcccactcagctgaacaagcaaggaaatatatgtgtgtataccaactcaagtacatacacatacctacaaatatttcttcatgtaactatccatatctattaagctgacatcagttcaattccaatacagatgtgtaaaagcatctgaattgctaacccacactcccatgagatacaaatttatcaactaaaatacaataattcttttgcctctagttttacaaattccactcatttccaaagttacttaggtcagtacctgttccccaactcctttcagtgaaattgttttccttctgtgattccgttcgactggtgtgttccagtcttgttccttcttaatttcctgactt

SEQ ID NO: 61377 - DNA, 1200 bp, Homo sapiens
aaccttctcccccccacctcctctaactgggtgaaattgccctgcccgcctctctaactttctccaaatcgagaaccctctgtttgcaatcagccccctcacctcgttccccccaccaaccctcggtagcgcaatcaggtttgtggataagaaaaaccctaatttaagtcccgcagctcctttttttttaaggagcactcagataacgcttccgggacactcggatgcggctagaactcagtctcccttatccccttcaccgctctgctccttttcattttcgtttttttctttgtttttaataatataattagcccggattttgacattatttcctggccggctgcctttttttttttttctggggctaagcaattagattttctaaaggccctatcaagtccttccatcccgagagaacttttttttctctcccccttttccggatcccactgccgtcttttcctccgtggataggcaaggaccctggcggtgctgccctcctttgctttggttagaggagaacggccagcaggagagacagcccgacttgcagcagcgggagagagactgacccacgcggctggtgacctgggccgtgkctgtggccctgggacagggtcggtgtttcctgggtcagggcagccaggctgatgcgggcaccacgcctttgggcgaccacagcccggcgcttccaggtccggtccacttatcagacaccgcatagctgcgtctccacagacaaggtgaaacggagactcggcgggcgtctagcccagtggaactttcggagccgtgtctaatcttttcctagaggaactttgactggggagatttgggttgtccgccctattttctctggtggtcgccatagtctgcttgtgtagatgctgttccctccctttctggccagttcagcctgggtgtgggttcattggacccccgcccgcctgcaggtggaaggcagggcccagagaacacccggcctgggttttccacctggagagatggacctcctggcaccgctggggcgccatcccccaagccctgttgtgaatctctgctttccccgttactacaaagaagaccgacactgcttcacacacgctttgaaggccgagctcaccagcctggtaatcagattagcaccccggcggtaaagaagtcagtcgatcccaggaaacaacacttcacaaggaa

SEQ ID NO: 61378 - DNA, 704 bp, Homo sapiens
accaaatgtaaaaattggagctggctcacaaccttaaaacatacacaccccatgggaatgcagcgttcgatgctgatcagaaagaacttagaagcacacagatggagtcgcagaaatctggaatgcwtgaggtcctgtaattaaacattaaattttactctgaggcctggcacagtggctcacgcctgtaatcccagcactttgggaggccgaggcaggtggatcacttgaggccaggagttcgagaccagcctgaccagcattgtaaaaccccgtctctactaaaaatacaaaaatgagccgggcgtggtggtgcatggctgtaatcccagctacttgagaggctgaggcaggagaattgcttgaatccaggaggtggaggttgcagtgatccaggatcatgccactgcactccaggctgggtgacagagtgagactccatcttaaaaaaaaaaaaaaaattgtactctaagcttcctggcaggcaagacaaaatggaaattgttcaggatcatctacatcttcctgttactcagttctaggagggtggtagagagtggcagtgcttttgacttctgttttgttaaagatataaaacattagtcatatactgtgttccaatctgagtttatcgaaagtaatataaaaaaaggactcaggaaagatagacacatggagggcccaatatctttgtagcactgtgg

SEQ ID NO: 61379 - DNA, 704 bp, Homo sapiens
accaaatgtaaaaattggagctggctcacaaccttaaaacatacacaccccatgggaatgcagcgttcgatgctgatcagaaagaacttagaagcacacagatggagtcgcagaaatctggaatgcatgaggtcctgtaattaaacattaaattttactctgaggcctggcacagtggctcacgcctgtaatcccagcactttgggaggccgaggcaggtggatcacttgaggycaggagttcgagaccagcctgaccagcattgtaaaaccccgtctctactaaaaatacaaaaatgagccgggcgtggtggtgcatggctgtaatcccagctacttgagaggctgaggcaggagaattgcttgaatccaggaggtggaggttgcagtgatccaggatcatgccactgcactccaggctgggtgacagagtgagactccatcttaaaaaaaaaaaaaaaattgtactctaagcttcctggcaggcaagacaaaatggaaattgttcaggatcatctacatcttcctgttactcagttctaggagggtggtagagagtggcagtgcttttgacttctgttttgttaaagatataaaacattagtcatatactgtgttccaatctgagtttatcgaaagtaatataaaaaaaggactcaggaaagatagacacatggagggcccaatatctttgtagcactgtgg

SEQ ID NO: 61380 - DNA, 714 bp, Homo sapiens
ttgacaagccttcagagggggctctgccctgctggcaccctgactttggacttccggcctccagaactgggagaatacatttctgttgcagcagacacaggaggccaatataccacctgacgccatggccgttctggacggggacccacgaacgaagaatttgggaaaatcggacactctgcagcaatgcagggtgggattcggaggatttcccacatgaaggcagggtcctgggagggttgggttggaaattagaatccagacaacaagcctggatttggcctcggattcttggggcgagaatctaaaagcagattttcccacttttggttgacttctcctccactctgagatgaagggtttggcctgggaagggagttctcaaaaggtagcgcatgaaccagcagcagcagcagctcgtgagggtactgttgaaaatgcagatgcctgtgctcccccgagcccctttgaagcagcatcatcagagatgcagcctggaaatctgcattttcacaaagtccccggtgatttgagagcatgcacgtgtgttacgcactgacctggaagaggttcagcgtttagtgataaatgagtctctacaaatgtaaacacagtctcactccctggaaacactccctggaaaaggggagcagatgtgsagcaccttaacctggaaaccgagcccttgggagtaagggcatgaggttgtagctg

SEQ ID NO: 61381 - DNA, 724 bp, Homo sapiens
aagtacaggctcagtcttctaagcgaccccagcaggatcagctgctcctccaggccctttccggctgtgcctgcgcccccgccacaggcctggcaccggcgcgctgcctccccgccgcttgctgcatcccagaaggagccgctctggtcgcgggggagaaacatccttgtggattagggcgcttatggatgatgttctgtctcagttcccaaattcagagctccctgcagcccactcgcctggtctgtagtgggaaagcctttggcaggatcgtaagacggtggtgtgctagccgtggcttgctgtggaactatctggagcttggtagagtctgtatatctggcttctagggaggctctacttctggctgccatgggtaggttagttaacctctcttgacttcagtgacctcatgtgtaaagtgggggaaaggccatgccttctcccggaaagcttaggagaatttaatccgacgttaatgtgaagcctgtatagcccagtgccgggtgcagagaagtttagttcatggtgaccaaaggacaaatcacgaggaagtgcataaaaataagtctttgggctgctgatatgaatgcatgaatgaaaccactcatgtaaggggctgtgagtgatttggagtccaggattggacagccttaggtttcggtggggcccagaccatcaccagccgtgcccaccagctagggtaacttttttccctkgcgca

SEQ ID NO: 61382 - DNA, 1326 bp, Homo sapiens
tgttcctgccggaggacaggtgtcccgcatgcaaccgacacaagcattggagaccacggttctgcacaggctcggctgcctggaaattgacgattttcttatttttctgctgggaactgggagtttcccagcaaaaggtaacacagcctgtggaatattatttcctgagaagcactggatttccccccatattagtcatcgtagaatgtatattattttaactcccggagttagacttgaatttgagagtattgaagacagagtggaaaaatgctggtaggaccagaaggttgacgactcgggaaggggcagctctcttttcctctcttaaccccgatatgatgccccctgaaggcacacacaagctgtgtgcgggtccatgacatgtgacttcttggaagcggggtccaagtcgaccgctggtgtcttgcagactgaatgggaacggagtagaggggagctggctattaaacagcacctggctgagagcggcacccagaaagtgtgaggtggtctcatttagtgaccacctgttctgtgccacgcacaggccatgccctgggtttagggaagtggacaggacctggttgtgggcatagtcaggtgactaagatatcaatggtaggggacacagaaggtttacaagctcagaggaagtgatgatacagtcttcatagaagggctggatccccaggaggagggagctttccagaggggaacaaggtgcccggcatcaggaccagcgggggcagggccccaaggccaggacgacaagggtgctcctgagccacacggtcctgcgcaggccgcctttgtctcccacccccagcccccaccacagtcctccatgtccaaccaagttgttggctttcttggtgggaggccccaggcagcctctcacagcaatgcggcaggctgggaaaaggcagtgaccttgagcgcccctccccttatctgtgggagaaagccaggaagacctgagggaaggcggaagtcagttcggggggggggggggggcccggggctatcggaggtgaccctgtgcaggctagatggggaccagctgttgggatcgccaaatgcagcctgaccggggtccccctccagccctctgagcccgcttcccattggagggaccctggagactagattaaaataactaaayaggccgggcacggtggctcacacctgtaatcctgcactttaggaggccgaggtgggtggatgacttgaggtcaggagttcaacaccagcctggccaacatggcaaaacccagtctctactaaaaatacaacaattagctgggtatggtggcgtgcgcctgt

SEQ ID NO: 61383 - DNA, 903 bp, Homo sapiens
acagcttactgtgtgcttgctataaggtggttacatcgctgtgctggggaatgcttaacaagtggttttccaagggttaaaaaaaccctgagttatagcgtttgccagtctccatggtgtaaatcccctccttacgtctcatttcaaccagtgtgaggccattgaacataaagttgggaagcagtgtgcaagctcatcgttattccgtatttccaccaaagtggaaacgtgagtatccttaagggcagggaggaaagtaaaatgtggggaaataattaggaagtgatgacttttgagtgtttattacgtttgttttaaatatagtttactccactctaagtgtgcataatgtaatgtttaaygatggcaaaattctttaagctttaatagttagctcttgccggagttggctccagccctcactgggtgactgctgtgatgatccctatgtcactgagaatcccgagacacagagaggctgagtaactcactcaaggtcacaggcagagccaggggttcaaacccaggtggcctggcttcagagcctacacgcctcgccattgggaataataatcacagcagcctcctacggtgttttaaggattagagcccatgaccccgttagaggagtgcgcagcacagagtacgtgattaactagcgctgggtgttactagcgttgttcctgttaatccaagctggtgtccacaggcacattgaacacaattcctgtccttgatgaatgtactatacagacagcgagctgcacacattcaaggcaaagcagtctgtgtcaagacagaagcactcacaacacatacacttcaggggcccaaagaaagagttgattgactttttatggggcaaggaaatcttcatggtgaaaggaatgtttaaactgggtt

SEQ ID NO: 61384 - DNA, 727 bp, Homo sapiens
atccttccctagcttctggtattgtgttgacttgtggcagcacaattccaagcttcaatggcattcttcctgtgtgtgtgtgtgtgtgtgtgtgtgtgtgtgtccaaattttctttttgtacaaggacactaataacattggattaggggcccatcctactctactatgactttatcttagtgacatctgcaataactttatttttaaatctgctcacattctgagatactagcggttaggtctttaatatgtgaattttggttgagggacacaattcaacctaaagcattcattccccttcttctcctttgaactagtaagattcttgtggaaactaaatgggaaattcatgtaaagtttttctctcacaatagctgttcaatctattgcaatgttcttgctattattactactattattatgaaaatgtatccagtctcctctaatatcctctaaatagtcattttttcctgttgccaactgcacttaagttctatggtcatttgtaatccctcctaatatgttgaagatgtagaagtttcmaaaatagatacttaaaaattgtttaccttttgcttatttgttatttattcgctgctgcttgtgaatgggattgaatatgtgggggccatttcttttcaagcagaacactcttgccttatgggtgtccctatttagagaacatatccagggcaaagggctacactctctttatactaatccagc

SEQ ID NO: 61385 - DNA, 820 bp, Homo sapiens
ctgctctgacccttctggactggctgatgtgtccctcttctgtatgtagtttgttagatgctatagcatgttttgtccctacctttaccactagactgtgatgtcctttagtgcaagggctatgtctcataaatcgctgtaactccagcatatagcaaagttcctgacacatggccaataaacttttattgcatagggagtcttcaagccataaaatgattcacagkagaattaacggagaagtaacatggtccaagcactcctggaggaatcagtgctctgtgtgatgctggagaggtcacttcacctttctacagctctactcctcagctgacaaacgaccacctatattttaaggttctttcctgttccatatttctataaattacgtctcttcatgctgcatttatgtttttcatgttttctattatagaattttaacaactcccttaagatacttcgcagacattccacacacggtaactacattgaagttgagaacctattgtgaattaagtcatttacacagattaagttccccagcaaagaaagatgagtaagtgtaaattgaataaataaatacattttattaccaacttttaaaaatgtactgaagaaatataaatttatggatagaaacttcagtcaaccaagaataaagcatactcacatagccatagttttttaggggggtatgtgggagtatgaatagtccagataagctatgtgcgctaaaaccttattcattaaggcaacatttttttgagaatctattgagtgttaagatatttattatatgcagttgtcagtccagtcatca

SEQ ID NO: 61386 - DNA, 820 bp, Homo sapiens
ctgctctgacccttctggactggctgatgtgtccctcttctgtatgtagtttgttagatgctatagcatgttttgtccctacctttaccactagactgtgatgtcctttagtgcaagggctatgtctcataaatcgctgtaactccagcatatagcaaagttcctgacacatggccaataaacttttattgcatagggagtcttcaagccataaaatgattcacagtagaattaacggagaagtaacatggtccaagcactcctggaggaatcagtgctctgtgtgatgctggagaggtcacttcacctttctacagctctactcctcagctgacaaamgaccacctatattttaaggttctttcctgttccatatttctataaattacgtctcttcatgctgcatttatgtttttcatgttttctattatagaattttaacaactcccttaagatacttcgcagacattccacacacggtaactacattgaagttgagaacctattgtgaattaagtcatttacacagattaagttccccagcaaagaaagatgagtaagtgtaaattgaataaataaatacattttattaccaacttttaaaaatgtactgaagaaatataaatttatggatagaaacttcagtcaaccaagaataaagcatactcacatagccatagttttttaggggggtatgtgggagtatgaatagtccagataagctatgtgcgctaaaaccttattcattaaggcaacatttttttgagaatctattgagtgttaagatatttattatatgcagttgtcagtccagtcatca

SEQ ID NO: 61387 - DNA, 1086 bp, Homo sapiens
gcagcatttgagaacatctctatgacagttccccgatattctcctatctctttagctacttctccacattctgctttgtgtaatcccactcctctttgtgaccccaaatttgtgtggtcctgaggcctcatctcccactcttcaataggactggtctactgtcatttgcttaaattggataaggtttgtcttccttaagttccctacacatgctgatattttgccacaatgtttctttcacagtctgtctgtctgcatagattctattcattcttcatggcatatcttaaatatcatttcctctgaacagcttttattttaccccctagtctatttcagccctgctataattcctcattgtttcctctgcttttttaaattagcacctgacacaatttattttttaatatctggataacatcagtaacaacactttttggaattgaagaaaaataaaaattacaaaatattacagataaatatagatataaatattggacggcataatgctaaacaaaatatatattgaaataaacatcatctatatagtcttatattgaagaataaagaggtggttcgatatcatgaagttaataatatccatagtgtgtgaagaaatgataatattccttgaatctaattagccatatatgacttcagtaccatttctcatcaaagaaaagtaaatcctattcatgtagtctttctaaattaatttttaggtttaatgcaattcttactaacatgtcaactatgttttaaaaatgtttttaaaggaaatttctgtaatttttttcctaaaaatgttatttttaaataatggtcctgaaataattgtccaaaatgatgttctaaagtatgtctaatagagtacataatctagaatatccagaacaattttgaaaataaagtacaattaagcaattttcagtcattattaaaaggcattataaaattaagattattaaaattagtaagcaaggagackagataattgacagacagatcaacagaactgtttgaagactcaagaagtagacaaaaggtatttatatgtataggaatatatatctattcatatataca

SEQ ID NO: 61388 - DNA, 564 bp, Homo sapiens
tgcaacgttcctgcaactatataggcccctggcattctcactctggtagcttcccagcsccagttctagcatttgagtggagaaaggaaaccatggaaacgaaaaaccaaatgcaaaaaattttactcagttgcccaagactaacttgtctaaagcatctcttggaaaaatgttgatgatttataattatttttagatatttcaaccaggaaaagtttggcgtaaaaagaattccacagaggaaaaagctcttttctttttcattatctcagtaagtgtgaatgtgttaaagtcagcgtcgctgcagacggatctctacgtaggaattgaagaggactgtggagactcctttttactctcctcacacatatagttagtccaaaaagacctcgctcagtgtctgactacagtgcctgaaatcctcatcattagaacttctcccatttgcgataaacattgctgtttccatgtcatgtttttttttagaactccagtattctcgggagtgaaaaaaatggtaaacacagatatgttttacatattgctttctttccagacaagaag

SEQ ID NO: 61389 - DNA, 581 bp, Homo sapiens
ggaagatacatccagctactggatagaaaatggatttgagggaagagcataaaagtggaaagaaaaactaggaggctgttgcaatggtccacatgtttgcaccatggagaaaccaacacagttttataagccaaatatacctgggaatttggcctcacaaaccttagctggcacacagctgggtctgtctgtccttagctgaccttgattctcaccatcttgccagtttagccactctgaaatcttagccatctctgaaatcctatgtcagagtttgtaaatcatcttgggagcccaattattctgtttctttgctctacagtgtttttgatttcaagagctaagtctgtactatttgtatgagaggaaaaaatcaatagaaagagaaagtttaataaaaaaatamattctccattgactttaattaacttggccttaggtttacaactttggcaagtatggaaaatgaaaaagaagagagaaaaaacaatctcatatctcaccctataacacaaagctttttaagaataaaatctcaaattgaaatctgaatgtatcagcaatttatttgccagcaacaa

SEQ ID NO: 61390 - DNA, 736 bp, Homo sapiens
tgttaggcaagattaagcatggaaaatacatgaatcatttacatgaattattaaaattattctggactgtctatctaatcccagttataatttgataaagtcttgtgttcctttttatgattttatgattattgctttctatatctgtctaagaaatatttgcctcatccacacaaaaggatattctcttatgttttctctcacaagttttccagaaaaatgggctttttgaaaaaaaaaagcacttctcccattttgaattactttggtgctttgttaaaaatcagtccattggccaggcgttgtggctcacccctgtaatcccagcactttgggaagctggggctgatggatcacctgaggtcaggagttcaagaccaggctggccaacatggtgaaactctgtctctataaaaataaaaaaaaatacaaaaattagctgggcgtggtggtaggtgcctgtaatcccagctactcaggaggctgaggcaggagaatcgcttgaacccgggaggcagaggttgcagtgagccgagattgcaccattgccctccagcctgggtgacagagagagactccrtctcaaaaaaaacaacaacaaaaaatatccatccatcatcatgagagacgttgccaagattactattcatataatagaaattgacctgtcaatagaaataaggacatacttgtctttacaaacatttttatattttaagaataatttttactcatg

SEQ ID NO: 61391 - DNA, 790 bp, Homo sapiens
gcattgtaattacagcttattttctgggcttatgtcattgtcaacagtttataatattctacattttacacctgtttttgttaccaaatgtgtgctgtgtttattataatcaattcataagttagtatccagctgttgaggctatccaacttggcaaaggaagtaattattacatgaaattaggaacagkttattaaattgcagaagagctcatgatctatttatttctttttttcataaacttttaaagtttagctatttatttctatcattatacaattttatattttttagagcaggacactgtgcaattgaaatttgaattagtaattgactctgaataggtcatttaatgttttgcacccaggagaacttgttcatgatcaagaaagaacagcaatgctgaaccacatcggcaagccaagaagaaaatagggcttatgtctgtgttttgactctgtcatatgagtcacatttctattacacttgaaaggagctgacaaacttctggtgtgttctccaaatgtcacacttagctaagtacaatttatatcttttgggttttccagtgattaggtattcttatttaccgtcatatttttgccttctccatatcacctaaatacaaggccaagaaaagaggaattcgtgattttaacaaggaaaatgttcagttgtgctgccaagtcttctgaagaacacacactctttttcccagttgtataaaatacatacagtacacaaatagagatttctcgtagctctgtaaacaaattaaactgttattcag

SEQ ID NO: 61392 - DNA, 790 bp, Homo sapiens
gcattgtaattacagcttattttctgggcttatgtcattgtcaacagtttataatattctacattttacacctgtttttgttaccaaatgtgtgctgtgtttattataatcaattcataagttagtatccagctgttgaggctatccaacttggcaaaggaagtaattattacatgaaattaggaacaggttattaaattgcagaagagctcatgatctatttatttctttttttcataaacttttaaagtttagctatttatttctatcattatacaattttatattttttagagcaggacactgtgcaattgaaatttgaattagtaattgactctgaataggtcatttaatgttttgcacccaggagaacttgttcatgatcaagaaagarcagcaatgctgaaccacatcggcaagccaagaagaaaatagggcttatgtctgtgttttgactctgtcatatgagtcacatttctattacacttgaaaggagctgacaaacttctggtgtgttctccaaatgtcacacttagctaagtacaatttatatcttttgggttttccagtgattaggtattcttatttaccgtcatatttttgccttctccatatcacctaaatacaaggccaagaaaagaggaattcgtgattttaacaaggaaaatgttcagttgtgctgccaagtcttctgaagaacacacactctttttcccagttgtataaaatacatacagtacacaaatagagatttctcgtagctctgtaaacaaattaaactgttattcag

SEQ ID NO: 61393 - DNA, 941 bp, Homo sapiens
cctggctaatttttgtattttttgtagagatggggtttgcccaggctgctcacgaactcctggactcaagcaatccactgcctgcctcggcctcccaaagtgttggcattatagacataattcactgcactgggctgacaaatttctattgcttataaattatgcagtctcaggttttctgttatagcatcacaaaacagactaagatacaccccattgaaaagcgtcatctaacttcacttcctcctcatgtagaataaatgactgccttccttatcttccttccagtttttcagattatccagattatcctcatagtctatatcttttcccttttcatactgcattaattttctttcctagttatttcctctcaagacaccctgtaattttgacggaaaagactaaattccttgttgtcccaacagaagataatctcacccagtaaacaaagttttcatcgttagtactgctttggtctcttcaataggagccagcaatttatttatttcaaagaatctcatgtggcaaatataaaacaggaaccaaagcagttgtgaataggcccatgggctccacctstgtcctctaccaattaccacacatgggttatactaaaaacccagacgagctgacagagtttctcttttggaatcataacctctcttgtgtttttactctaggctctaattactgctgacaccaaaaaactaccattgactgggccccacaaatcaatcccaagtctcccatttcagtacatggcatgatcattcacttgtttgctcaagccaaagacttagttgtcttccttgtttcctatctttacttaaataccacatcaaacccatcagcaaaccctgttgcctctaactccaaaatatattccaaatccactattcaccatcatagtccaaagcaccacctttttccacacttga

SEQ ID NO: 61394 - DNA, 1137 bp, Homo sapiens
taattcttagttaaaaatggacagtattcaacttcaagaataacaacatttgctgaataactgcatgaattcgttatttaatcagctaactgctctttgaaaagtcttttgttttaaacaaccaagaggccacacacacacacacacacacacacacagatctgagcaaatgactgagcatggtggctcacacctgtaaccccggcactttgggaagccagggcgggaggacagcttgaggccaggagctcgaggccaggagttcaagaccagcctgagcagcacagtgagaccccccagctttacaaaaataaaaatataaaaatgagtcaggcacagtggagtatactrtagtttcagctacttgagaggctgaggcaggaggttatcttgagcccaggaatttgaggttatagtcagctatgatcacaacactgcactaactggcctccctagtcaagtacctgactcacagagtgagaccctgtctctcaaaaaaaagaaaaaaaatgaaaaaaagaaacacaaaacaataaattgagcaaatgatagaataacaaaatatgtctgtgactactgagttaaatgccttttttgttgttgttgaaatatacaggtagtcagggtccaattatactcacgtcaactcaagtcttcctaagtaggttatattgaattaatatatgagtataacaaataactatacaagaaaggacaaagtgaagcaagttagtatgaggggagagatactgaaactattctccgtgaagcaagttagtatgaggggagagatactgaaattattctccgtgaagcaagttagtatgaggggagagatactgaaattattctccaatagagggcaggaacatctgtaagtctttctaacagaaatacttttcataacataattgttgccactaatgttaagttgtccattttccaaacactgaccccatggtaatttggaattttcctcctacattatcgctctgtctctctttatcttcagagatatcccaaaaggctagcctgcccagttatcttgctctaaaacatatgttctagtattccctgaaattggtacttttgtcttcttcaggtcaattcatcaagtgtccaccgttccttttccct

SEQ ID NO: 61395 - DNA, 1292 bp, Homo sapiens
aacacatggacacaggaaagggaacatcacacaccagggcctgttgtggggtgggggaagggggagggatagcattaggatcattaggagatatacctaatgttaaatgatgagttaatgggtgcagcacaccaacgtggcacatgtatacatatgtaactaacctgcacgttgtgcacatgtaccctgaaacttaaagtataataaaaaaaattwaaaaaaaaaggctaaatggggctattgtcttctgatatttgaatgcttgccatgtagaagaaagaatatggagagttcacagctctctctttatatgaatcaagcacggggctacgtgcttgacatgaatttattttttaattttgactacaggttaagatttagtgtctagtttaagaaattgaggctcagagggggtgaagcaatttgcccaagatcacacagctagtaatactcaaaaatgagtttgtcttatgctggaactaaaattgttagccttggtgcatctgccagatgcagaatgattttgatgggtggaattagagccaaacacatttttgtcttaatgtaggaagaaactacccaatcctttaaaccattcaataatggaatggactgcctcgtggtgttaagtgagtcccttctcacagagaggatccaagcagaggctagctggctctgagaaggggaagctgtctcagaagtttcttccagtcgacgtactgaaacccagtgctgcaggtgcttcagcggggtgagcagtgtcatcaataaccctctggcttttgtcttttgttcactctggcttttgtctgccacccttgtgtagcatgactatgcaggtaggtaaggtatggctttcaagaccccttttacgtgagtctctttcaattcctttttgaatgtagccatttacacatccaattagagctaattattataattatcactttctttcctgaaactgataaccaaataagttcagagaatgtcgataatacaatatcaaatagctatagtgggtttttttttcattacatggaataaagacattcttctgaccatcataaggaaaactccttagcaaattagctactcattgggttttctaaagtcaaaatttattgaataaatcaaattttttctcaagattttcagatatttataatatcattacaaaggacctggcaatggggccaacgtgatagaagtggtcccattcctggtgaaactggagcatacagttgtgtgggtgagaaagcactgagtccaagagtcagttattccatgatggt

SEQ ID NO: 61396 - DNA, 1292 bp, Homo sapiens
aacacatggacacaggaaagggaacatcacacaccagggcctgttgtggggtgggggaagggggagggatagcattaggatcattaggagatatacctaatgttaaatgatgagttaatgggtgcagcacaccaacgtggcacatgtatacatatgtaactaacctgcacgttgtgcacatgtaccctgaaacttaaagtataataaaaaaaattaaaaaaaaaaggctaaatggggctattgtcttctgatatttgaatgcttgccatgtagaagaaagaatatggagagttcacagctctctctttatatgaatcaagcacggggctacgtgcttgacatgaatttattttttaattttgactacaggttaagatttagtgtctagtttaagaaattgaggctcagagggggtgaagcaatttgcccaagatcacacagctagtaatactcaaaaatgagtttgtcttatgctggaactaaaattgttagccttggtgcatctgccagatgcagaatgattttgatgggtggaattagagccaaacacatttttgtcttaatgtaggaagaaactacccaatcctttaaaccattcaataatggaatggactgcctcgtggtgttaagtgagtcccttctcacagagaggatccaagcagaggctagctggctctgagaaggggaagctgtctcagaagtttcttccagtcgacgtactgaaacccagtgctgcaggtgcttcagcggggtgagcagtgtcatcaataaccctctggcttttgtcttttgttcactctggcttttgtctgccacccttgtgtagcatgactatgcaggtaggtaaggtatggctttcaagaccccttttacgtgagtctctttcaattcctttttgaatgtagccatttacacatccaattagagctaattattataattatcactttctttcctgaaactgataaccaaataagttcagagaatgtcgataatacaatatcaaatagctatagtgggtttttttttcrttacatggaataaagacattcttctgaccatcataaggaaaactccttagcaaattagctactcattgggttttctaaagtcaaaatttattgaataaatcaaattttttctcaagattttcagatatttataatatcattacaaaggacctggcaatggggccaacgtgatagaagtggtcccattcctggtgaaactggagcatacagttgtgtgggtgagaaagcactgagtccaagagtcagttattccatgatggt

SEQ ID NO: 61397 - DNA, 640 bp, Homo sapiens
aatcaggaacctgaatgctctcagggccaagactttctctctgccttttgtctctgctgctgactgtttgcagcttttccatgacagtggagccatggttgccaccaactctgttatyatgtttttgttttttttttttcagacaggatcttgctctgttatccaggctggcatgatcatggttcactgcagccccaacctcctgggctccagcaattctctcacctcagcttcccgagaacctaggactacaggtgcacatcaccacgcctggctaatttttcattttttttgtagagatggggtcctgccatgttgcccaggctggtcttgaattcctgggctcaagcgatcttcacacctcggcctcccaaagtgttaggattacaggtatgagcaactgcagcctggcctgttactacattcttgtagctccttgactagagaagaacagagttccagtagttgaaaaatctaaggaaaggattctcattggcctggctatgttcatgtgtctagtgcttggagcaatcactgtggccaaggaggaaaagtggtgcgacaacttctgaagccagaggggcaaagtgtaaagctagaaggagataaaggatactgaaagacaaaaaccatagttgga

SEQ ID NO: 61398 - DNA, 640 bp, Homo sapiens
aatcaggaacctgaatgctctcagggccaagactttctctctgccttttgtctctgctgctgactgtttgcagcttttccatgacagtggagccatggttgccaccaactctgttatcatgtttttgtttttttttttycagacaggatcttgctctgttatccaggctggcatgatcatggttcactgcagccccaacctcctgggctccagcaattctctcacctcagcttcccgagaacctaggactacaggtgcacatcaccacgcctggctaatttttcattttttttgtagagatggggtcctgccatgttgcccaggctggtcttgaattcctgggctcaagcgatcttcacacctcggcctcccaaagtgttaggattacaggtatgagcaactgcagcctggcctgttactacattcttgtagctccttgactagagaagaacagagttccagtagttgaaaaatctaaggaaaggattctcattggcctggctatgttcatgtgtctagtgcttggagcaatcactgtggccaaggaggaaaagtggtgcgacaacttctgaagccagaggggcaaagtgtaaagctagaaggagataaaggatactgaaagacaaaaaccatagttgga

SEQ ID NO: 61399 - DNA, 640 bp, Homo sapiens
aatcaggaacctgaatgctctcagggccaagactttctctctgccttttgtctctgctgctgactgtttgcagcttttccatgacagtggagccatggttgccaccaactctgttatcatgtttttgttttttttttttcagacaggatcttgctctgttatccaggctggcatgatcatggttcactgcagccccaacctcctgggctccagcaatyctctcacctcagcttcccgagaacctaggactacaggtgcacatcaccacgcctggctaatttttcattttttttgtagagatggggtcctgccatgttgcccaggctggtcttgaattcctgggctcaagcgatcttcacacctcggcctcccaaagtgttaggattacaggtatgagcaactgcagcctggcctgttactacattcttgtagctccttgactagagaagaacagagttccagtagttgaaaaatctaaggaaaggattctcattggcctggctatgttcatgtgtctagtgcttggagcaatcactgtggccaaggaggaaaagtggtgcgacaacttctgaagccagaggggcaaagtgtaaagctagaaggagataaaggatactgaaagacaaaaaccatagttgga

SEQ ID NO: 61400 - DNA, 1028 bp, Homo sapiens
ggtcccagacagctgctccaactccctcccagtgtccacattccaggcagcagaagaaggggggacaaaagagaagacatgcctttccctttaactgtaattcccagaaggtgtatactacgcatacttacatcccattggccctatctgagttatatgggcatactttgtcacaaagaaggctgggaaatgtagtctttactccagacagctatgtgcccaccataaattgagtttatatatgttgctagagtatgtgggggaaaatagaattggaaataatacagtctctcataagttacttccaatgctgtgaaatttaatcaaagcaacaaagaacattcctatgtatctgcttttgtacacttatgtgagagtatttttggacaactttctacaagaggaatataagcagctttagaaaacctattccaattatttcattttacaaatgaggtttaagaccgaaaggggtaaagtaacttgccaaagtcaaacaatagctcccagaaaagtagggttgccagataaaatacagaacacccaacgatattagaatttcagataaacaacaaataatttttaatgtaagtatgtcacaggtaacatttgagacatacttatactagaaaagtatcccttgtttttctgaaattcaaatttactgagtatcatataaatgtgtgtatatatacatatatatgtcatatatacacatacatatacatatatatacatatatgtgtttgtgtatatatatagtttgtttgtttttttagagacaggctctcattctgttggccaggctgtagtgcagtagcggtatgatcatagttcactgtaactcctgtgctcaagcaatcccctcacctcagcctcctaaacagctaggactgcaggcatrtaccaccacactcgaataattttgtaatttatttgagacaggatcttgctatgctgcccaggctagccttgaactcttagcctcaggcaatcctcccatttcagcctcccaaagagctgggatt

SEQ ID NO: 61401 - DNA, 470 bp, Homo sapiens
cagaaatttccaattgccttgatgacttgttcctcacgcccaagkttcctccggcttgtcctgctacattttccttttcaaccttccattttttctctgttctgttttttaccatcttgcatagctgtcattagctggtcatcattttcttaacttttaagttgtccccttatcgacatgccacgtttgtgagctgttatgtattgattaatctcacaatgaaatttagcaattttcctaaaaaaaaaacctcaaagtaaaggttgctctactaccctcgttgagtttagattattaatgtggagatttagtaaagttttataagttcaaaatttccttattacctctcagagaaagtggaaaagtcacaaattaggctctgtgtaaagttcagaaatagttgctattctctgaccatttcgtctagaatagctccctacatgatcttactctgcctactttttttttta

SEQ ID NO: 61402 - DNA, 883 bp, Homo sapiens
taagaatttttaaaagtttctggctaggccgggcacggtggctcccgcctgtaatcccagcgctttgggaggccgaggccggcagatcacgaggtcaggagatcaagaccatcttggctaacatggtgaaatcccgtctctattaaaaatacaaaaaattagccagcgcagtggcgggcgcctgtagtcccagctattcaggaggctgaggcaggagaatggcatgaacccgggaggcagagcttgtagtgagtggagatagcgtcactgcagtctggcctgggcaaaagagcgagactccgtctcaaaaaaaaaaaaaaaaaaaaaaagtttctggccatacgtttttaccagcatgcatttatacatatgcagcattaccttcaatatcacgaaagatactcaggtttttggcaacattttcttctcttccttgcattcatgttgcttccttgggaaaccatttgttttgcttgtatagggtgccttctctcttccatgctgttttctttaaatgcctggtgatgtgatttttagtcatctctttctatattgtttatacattaatatctagagtagtcaacatgagtagctgataaagagctactcagcaatggtgtgtccctcttcccctagccatgaatgggagtgttgtctgtagagttttagtagggtgagaagatttggagcatcttattttaaggtacagaggctcacatctgctgtgggtgcctgaagttgcctgggaacagctcagcttctctttctggctctaattcccatgctaagagtccaccacaaacccataacctgctcctgctacctgaacctgctgactctgtatttaaagatttgggagactgtcttgcacaatttrttattc

SEQ ID NO: 61403 - DNA, 3569 bp, Homo sapiens
caatgtcgggaaagaacaaagagctgtttgctcctcaggccctggttagtgaccaggaaagggtgtggtttgtcaagtgggtgtggacagggcaccagcaggcgggaacagggtcagctgtgaaggtggatagttgcagccagctcttcagcatcgttgacagaacaaagtccttgagacgagactccttcttccctcctggaaatgttctgccagtgcattgagtgtggagtgtggttctcctctaacttctcaggtttgcctcacatttttgtgctgtgtcctccagcccccctccaccatgggcttaggtagagagttccagaacatctttagcatccggctctgtttttaggcaaggtattatgcatttcccttctctctcttccttgaaaagcatcatatggttttcatcataaagttgaaatgcacaataaccatgtatcttttgtaagttctgattatctcaaatacaggaaggtttcctatagacttgcattcaaggtctagtccctgcaccagcagcatgggtgcccccggaaactcttaggatctctcaggccccacacctgaactactcaccaaaacatgcattttgacatgtttcccaaggatccttttaaggcatgagaggggctgtttctaagtacagtacctctgatcctggaggtggctgtgtgaacttgctgtgttaaactatttaatgtctactgcctcagcttcctcatcgacagtctggggacaggaaaggctggatgaggggaggagtgcccagtgccctgcctggtatttggtggggagcgggggtcatggatacctgggatcttttcctgcatggtggttgcagtgcccgctgggagttggagtatagcaatagtcagcctggatcacgtggggacatggaacggcagccgtggagaaacagctcaggaaacacagccagccctgacttagagggatcggcaggctctgctgtggtgccaaccacctgccacgctcagcccagcccccatcatggagcgtgctgcatccaagtgccaatcagctgcaacaaaccccagtggggccccaacaacaggtgtctcattaaacatctctcaccctcccaggcttacccactgacaggcaccaaactcacactcaatcaccgcctaatcacagccaaactccattaacaagtcatactaattaccaacttctaacagtgtctctggtttggaggcaaaacaccttattctttttagatgaaaactggcttgtgatccttcagaaagacccataattaggtcctttaaaaatgacggtcaagggaggagtccgggsaaaagttgatagacccagggtggctacggtcctgaaagtgcacaatgcgtagctctgtttgttttaattttgtgcctgctgggtggcccccaagggtccaattagcttgttacagatgcttgtattggttccatcctcttgtctcctccttccttccttttttccccttttctgtttttttttctttaatttttccctaggagggataaacttgtagcacagattgcaggcctgcaggcatccaaagatcaacaactagttttctatgatggaaccccctgtgaaccatgaacactcatttgcagaattcctaatgcatcggatgaggcagggcagggcttgagtggctataacagggtctggtaccattttgaaatggccagaaggtagacattcttctctgaatgggtgcaacttcgtagactggcttttttttttttttatttctttgccttttaaaaattttattttggatcataataaaattattactattattattacttgcattgcctcttctatcataagtcattccatttttttatttgaaagggatcttgcttttagagcttatactgggtacagaatatcttttgccaggcaaatataacaaataaactaaaaaaagaaatcctgattaacttggatttgctcatgtactcagcccctggagggtgtttctctgatgtccaggtcagggcagccagcactagcaatagtgagagggattaaagcgagaagcaacactgcaataaaatatgacatggttacctttcaccccaatcttccattgtcaaatgaggggttatgtagtccaaatatctgaattaatcccacctttaactcaagcatttgagatagaatcaaattatgttttgaaatatataatttctgtattccctaatggacatacgagaatagttttaagggctctgatttatatgaagtttatttttctttctaaatttcttctctaaaaatccttgaagtatccaagattccatccagcaagtttatcagatttagtttctgagatgggagacaggatttgccaacattcactgatgatgaagaactggaattctatggggattatggagtattttggatgctgatgatatacagataaccataggagggcatagaaaaaagcatggtctttaaaggcagatgaacttgatccacacttgccatactagcttatctaagggttagacttctttccagaacactgggataatatttacctcacagtgccttgaaaataagaagacataatgaatatgaatgttcttagccagtgcagctatgcagtgggtgctccattatactccttgtcagttccttcttcttttctggagccagagcccctcctttagaagctcccagagcaggacaagcttggtaagcagcagattctaaaccctggactgagctgcagtggcatgagtgttgggagccaggagtctggagtcatggctcaccaggtttggctgcaactcttagggcctcagatggagtggcggagaagcaggaagcctaacctagggatggaaaatccagattggtgaatttctactgaaaccagatgctttgaagaccttataggcagttgttagcctgtgatcctgtaggagggatctggccactcctttggccacctccctgaaatgtgttctaatatgtacactcgggggcttctttctggggaatgcatcgctgagttggtcacataagtctataggaaaatagaatttctctaacagagagtcactctatagccatttttcaaaaaagaaaacttttttcctattccttcatagaacctcatgaaaagcagtaaagttggatgtatctacatgtaacaaaatgttcaaatgctggagctctgactgctcaaagtgcttttcttttcaaagtatgagcatattcatggtattattaattccaagaagctgattgggacaatggcatgataggacctcctctcatcatttacagtatcagaactgcaataataaacattgtactagaaggaactggaaaaaatgtacattctatatgtctccatgtgcatattgtaactttccagttatatttcaaaaacaacaaatttatctggcagtactaagtgttaggtaatattaaatatatatttatttttatatcctgccctgatggctttctttcagtctccacagacattgggcagctaatacagaattgttcaagtaagtttaattcag

SEQ ID NO: 61404 - DNA, 1125 bp, Homo sapiens
aaaaacaactaaatatgttgtgacacatagttcctattattgcttgtgttgctctgagacaatgtaagagttgcatttttcacaaacatagaaaataaaaaccaagacactgtgagcatttcttcatgaagacttctctattcctgctcaagtcacctccatatatcaccacctctttgcatggctctcctcattcaactttttttgaagtattgatctacaacaagtacactcaggattccttcgaaacagaattctcatgaaaatcaaattgaaatgaagcagacaaaaaggtagagatcgttcatatttctgccctgaattcttttaggtctgtggcattagcccaatatttagtttcttttcttaaaacgtaatttcttctagatattgatttgcaccaacaatacccatatgaagaatattggggtcactamtcactcagtgttagatccaggaataccgaatcacagaaagcataccatttgaccttaccctaagttaaatgtgggttattgaaaacctgtttaatacattttagtaaacgaaatcattttaaatacacggagaggtctgcacttttagcaacaggctatggtggactgtaggaagtgatcaagcggagtgtttcagtgtcagtaactgcctcctgattggtttgttctaagagtatggagcatagtgtgcgtctcttggatttgtagcatggctgctcctgtctgtgccacaaggggcgcttcttaggcccacagtggaattgtgtatgaggggggatgaattcatgaggaaacaggctttaagttttcacaacttggcatcatctgctggtcccttttctctccatctaattactaacaaggggctggacccaataggggatccaagagaaagtatcgcccacttcctgaaagcttctccaggctgagcccttgctagagatgaacaaagccaaaagcagggtctgataaacgtgtcaaagcagggacaagttttgactttatgaaaataacgtatttccatgtaccacacccagtagaagagaaggtctcatattcttgggcttttggggtgccatatatctatgtctgtcttcatctacattttcatttgtgtctaaatatctat

SEQ ID NO: 61405 - DNA, 1064 bp, Homo sapiens
atttgagacagagaatactcaaggcaaagaagttatcagggataacttcaggcattacataatgataaaggggtcagttctcccagaagaaataacagccttcagtgtgtatgtgcttaacaacagagcattaagatacgtgagggaaaagctggtagaaatagaaggagaagtagatgaatctattattattggaaatttcaactctcctttattagaaatgaacagatccagcagacagaaaataaataagaacatggttgaactaaataatgtcactgattaactgaatataattgacatctatcaacttcttcatccaacaacagcggtatacacagtcttcttaagttttcccatgttttctaatatagattacactctgggctaaaaagcacacttttaaaaagctgaaagattagaaatcatacaaagtattttctcttaccaaactagaattagagataataacaaagatagatggcaatcccaaaatatatgaagattaaacaatccacttctatttctcttccacctttatgaaggtatgatcaacaagggaggcggagcttgcagtgagccgagatcgcgccactgcactccagcctgggcgacagagggagactccrtctcaaaaaaaaaaaaaaaaaaaagaaattgtgtatagttaaggtgtacaacatgatattttgatatccatatgcattgtaaattattaaattaaatgacatattcaaaaccttacatgtttattatttttgtggtaagaacatttaagatctattcacttagcaatttgcaagcatacaatacgttattattaactatcatcaccatgctgtagaatagatctgcagaacttaaacttattcatcctgcataactaaaactttgtatcctttgaccaacatctgcattccttccccttcccccagaccctggtaactatcattctattttctgcttctatgagtgcaactctttaagattccgtatataagtaagattatgcagtatttgtttttctttgtccattttatttcacttaatataagcccatcagg

SEQ ID NO: 61406 - DNA, 1064 bp, Homo sapiens
atttgagacagagaatactcaaggcaaagaagttatcagggataacttcaggcattacataatgataaaggggtcagttctcccagaagaaataacagccttcagtgtgtatgtgcttaacaacagagcattaagatacgtgagggaaaagctggtagaaatagaaggagaagtagatgaatctattattattggaaatttcaactctcctttattagaaatgaacagatccagcagacagaaaataaataagaacatggttgaactaaataatgtcactgattaactgaatataattgacatctatcaacttcttcatccaacaacagcggtatacacagtcttcttaagttttcccatgttttctaatatagattacactctgggctaaaaagcacacttttaaaaagctgaaagattagaaatcatacaaagtattttctcttaccaaactagaattagagataataacaaagatagatggcaatcccaaaatatatgaagattaaacaatccacttctatttctcttccacctttatgaaggtatgatcaacaagggaggcggagcttgcagtgagccgagatcgcgccactgcactccagcctgggcgacagagggagactccgtctcaaaaaaaaaaaaaaaaaaaagaaattgtgtatagttaaggtgtacaacatgatattttgatatccatatgcattgtaaattattaaattaaatgacatattcaaaaccttacatgtttattatttttgtggtaagaacatttaagatctattcacttagcaatttgcaagcatacaatacgttattattaactatcatcaccatgctgtagaatagatctgcagaacttaaacttattcatcctgcataactaaaactttgtatccttygaccaacatctgcattccttccccttcccccagaccctggtaactatcattctattttctgcttctatgagtgcaactctttaagattccgtatataagtaagattatgcagtatttgtttttctttgtccattttatttcacttaatataagcccatcagg

SEQ ID NO: 61407 - DNA, 1064 bp, Homo sapiens
atttgagacagagaatactcaaggcaaagaagttatcagggataacttcaggcattacataatgataaaggggtcagttctcccagaagaaataacagccttcagtgtgtatgtgcttaacaacagagcattaagatacgtgagggaaaagctggtagaaatagaaggagaagtagatgaatctattattattggaaatttcaactctcctttattagaaatgaacagatccagcagacagaaaataaataagaacatggttgaactaaataatgtcactgattaactgaatataattgacatctatcaacttcttcatccaacaacagcggtatacacagtcttcttaagttttcccatgttttctaatatagattacactctgggctaaaaagcacacttttaaaaagctgaaagattagaaatcatacaaagtattttctcttaccaaactagaattagagataataacaaagatagatggcaatcccaaaatatatgaagattaaacaatccacttctatttctcttccacctttatgaaggtatgatcaacaagggaggcggagcttgcagtgagccgagatcgcgccactgcactccagcctgggcgacagagggagactccgtctcaaaaaaaaaaaaaaaaaaaagaaattgtgtatagttaaggtgtacaacatgatattttgatatccatatgcattgtaaattattaaattaaatgacatattcaaaaccttacatgtttattatttttgtggtaagaacatttaagatctattcacttagcaatttgcaagcatacaatacgttattattaactatcatcaccatgctgtagaatagatctgcagaacttaaacttattcatcctgcataactaaaactttgtatcctttgaccaacatctgcattccttccccttcccccagaccctggtaactatcattctrttttctgcttctatgagtgcaactctttaagattccgtatataagtaagattatgcagtatttgtttttctttgtccattttatttcacttaatataagcccatcagg

SEQ ID NO: 61408 - DNA, 579 bp, Homo sapiens
ggtcagtagtagagtatgggcccttcagattgattcatcagaatccttttatctttctcyttgacatactctgctcccttcatcgtagtagggattaccacagctctaagtgtctccttgtcttccttacaccacagagttcaacacataaagcaagggagggtctgcaagcaaacaaaaattctcttttctctcagaaagaagatatatttatatcccagatgcccccaacagacttcttacatgtcattggccaaaactgagtcatatgtacacctatagattattgactggcaaaaataagtaggatttttacaattcacttagaccagtcattcttctctgggtgctggacacaatcagagctctgttaacaaggaagaggggcaaatggctgttgagcagtcaacattgtagagccatttgagtggcttaagtgggtctggccaaatttgctatagcgtagagctgccccagccagacataaagaggatatttaaataaaaaatattctataactagagagaagttaatttatatggtgactcaactcattcacagataaaattccatttttgt

SEQ ID NO: 61409 - DNA, 590 bp, Homo sapiens
tgcctccaggcccaggccggtccccacacaagttccgagtcctgggggaggtggatgggctgtggctgcccaggaaacaggagagctcagccctcttcctgtttgggccccaacgtcagaggcagcccctcatccttctgctcgtcctaagggcccagccctgagatctgggtggtcccacaagcctgcactgtgagccaggcatggcaagtggggctccaaggccctgcaggcaggtgctggatgtgctggacggccagaatgcaggtccccagcacagcgcggccckggccgcacttccaggagggagccagtggaacccaggccgagagcccaggcacagcggctcttccagtaacggggggtctgctggatgggtgtgaggggttctcacctgcatttgccgctgggtggacaatcagttcctaacccggagcacaggagcaggcaaggagggcctggatgtagctgcctccgcctcacttcccagcttgctggtgtgtgcatggaagcgggggactgctcccagggctggcaagccagtgagggaagcactgcgggggaggggcccaagacccccaaccctccag

SEQ ID NO: 61410 - DNA, 590 bp, Homo sapiens
tgcctccaggcccaggccggtccccacacaagttccgagtcctgggggaggtggatgggctgtggctgcccaggaaacaggagagctcagccctcttcctgtttgggccccaacgtcagaggcagcccctcatccttctgctcgtcctaagggcccagccctgagatctgggtggtcccacaagcctgcactgtgagccaggcatggcaagtggggctccaaggccctgcaggcaggtgctggatgtgctggacggccagaatgcaggtccccagcacagcgcggccctggccgcacttccaggagggagccagtggaacccaggccgagagcccaggcacagcggctcttccagtaacggggggtctgctggatgggtgtgaggggttctcacctgcatttgccgctgggtggacaatcagttcctaacccggagcacaggagcaggcaaggagggcctggatgtagctgcctccgcctcacttcccagcttgctggtgtgtgcatggaagcgggggactgctcscagggctggcaagccagtgagggaagcactgcgggggaggggcccaagacccccaaccctccag

SEQ ID NO: 61411 - DNA, 474 bp, Homo sapiens
agctctgcccctctccctgggagctctcaggcaccctgaatgaccacagcccgctggcctaggggcctgtggctgccaggagccacctcttctaggagcccctccgtctccctctgtgggagacagtggcacgggtgtgggagggctgtgcaggaccccaggggctgcaggtgggaggatggaaggacagacacgtggacagggctttttccagccttgacccacccacacacctacccatctcgtgctgrcctctgaacacactgacctctggggtctttcagggcatgtcctgtatccacaggcctcacccccctgaggacccagcctcatgggcagcccccagctggtcccacagcgagccctgagtgtggcccttggtgcagccacaccccaggacacagggccctgcccatccatctgctcctggccagggctccttcctgggctgttctgctttgatccccagccctg

SEQ ID NO: 61412 - DNA, 544 bp, Homo sapiens
ccaaggtatcttttggctgctatatgcttagaggaggcaaactaatatgaatgtattagattatgtaaaacataattagggagggaaatttgctgtaaaagcatcctatgtatttatagaactcagaggaaattataagcaatgtggggggagatttcatgttctttagactcacagataaactctaggacctaagtgattggaactatttccctatcscaatcaaattatccagataattaccaaatatctactttgctatgctacagagtcacaaacgcacattgtctcaatggcacgggagtaagcatcagcttcatttctaataggtgaagtagaaaagggggccgggcggaggggctcatgtctgtaatcccagcactttgggaggccaaggcgggaggatcacgaagtcaggagatcgagaccatcctggctaacatggtgaaaccccgtctctactaaaaatacaaaaaatgagccgggcgtggtggcggattcctgtagtcccagctactcgggaggctgaggcaggagaatggcg

SEQ ID NO: 61413 - DNA, 544 bp, Homo sapiens
ccaaggtatcttttggctgctatatgcttagaggaggcaaactaatatgaatgtattagattatgtaaaacataattagggagggaaatttgctgtaaaagcatcctatgtatttatagaactcagaggaaattataagcaatgtggggggagatttcatgttctttagactcacagataaactctaggacctaagtgattggaactatttccctatcgcaatcaaattatccagataattaccaaatatctactttgctatgctacagagtcacaaacgcacattgtctcaatggcacgggagtaagcatcagcttcatttctaataggtgaagtagaaaagggggccgggcggaggggctcatgtctgtaatcccagcactttgggaggccaaggcgggaggatcaygaagtcaggagatcgagaccatcctggctaacatggtgaaaccccgtctctactaaaaatacaaaaaatgagccgggcgtggtggcggattcctgtagtcccagctactcgggaggctgaggcaggagaatggcg

SEQ ID NO: 61414 - DNA, 745 bp, Homo sapiens
tgggaacattggatgatagaaaataataaagcagaccttcaaagtatatattgatkgaaactttggagccctctggataatataaaacgaggctgcattctgggtgagggccaagttacttccgtttacctttacacgtagagtgcagttcctcaggatctctactcaaagtaggattgggagtatattttatcagagcactggactgacattgtcttcgatttttaaaaaatatgtcatccctgagaggttatcattagcacactcagccactcagccattttttccagattggcaaatgtcccctctacaaaagcagtccttagtgccagcttctttctctggattcatgtcttcttccagatcctggccctgaaactagaagtctctctctgtaaactgaaaacaactactttctgcaaaaaaaaaaaaaaaaagtataaaatctcctctgaaatatggactccctttgcaccttaaacaggggttcttcaacttggctgattagcagaattacttgggggagctttcaaatggcccaaccctgggatatgtggaccttggtaaaaggagaccctttaagagtctgtgaccactaatggtttgaaggtaatttccagatccgcgatgtctatgagtgcccttttctaagaaactgcttgtggtgaaggtgtcccgtctcatacaacccttttcttactaatgtaagaaaggcggacttttctcctgtacaggctcttacctg

SEQ ID NO: 61415 - DNA, 885 bp, Homo sapiens
caaggaaataaaatacttcaattctcaatgtttctaatgttttaaattaccatctactatataaatattagttttactctttttttcatttccctatatatttataattgacagtaagagagtttttaacattttgaaaaaaaactcttaattttcattattttagagactgggttttgctttgtcacccaggttagagagcagtggcatgatcatggctcactgcagcctcagactcctgggctcaagtgattctcctgcctcagcctcccaagcagcggacgacaggcgcgtgccaccacatccagctaatttttaaattattttgtaaagacagggtctcgctatattgcctaggctggcctcaaactcctggctcgaatgatcttcctgtcttggcctcccaaaggaaaggcataaactaccatgtccagtctgaaaaaaaaagtttaaatatcataaaagaaatgtaacttttctcattgatgagtaagactgcttagcatggtttcagcttgcacagtcattttgatggtcctgtgctgctgtgcaaatcaaggactgcctatatgaagggtgatgtaggatttatgaagatgtataaaggagaacctgtagttgagtgagattaaaaacagacaacaggaagcttggctcctccctctgccacttctggggaaagcaaatatgaacacctgcgcccctccaatgccacatgtgagaggaatctatggaaaactatttcaattctttctgaaggttaatcctctcctaagaatttccttaaggtctgtgctgtgaaytgttacatctgcttccacagaatcatcagcttctagagttgcaggcagaattgggttgaaagtccacctataaagtatatgc

SEQ ID NO: 61416 - DNA, 744 bp, Homo sapiens
tcccagcatctccccacaccaccatatgcctgtgtgagggctggctggcgttcgaccacagagaggctttgtgactttgaggcctggtataattcctaagaccaaaacattgcaaacattccactgatttgttgcttcttcacccctgggcctggcccactctgtagcatttctgctgcttagtctactcacaacacawggctgcctaagtagtcctcaccttggtagtactcaccccttccctaagtgtctacagcttcgggcagtgctggctgcactgtaagccccacagaaggactccaggctccaggtcaacctgcagcagcagatgaggctggagccagggagtgaaattcactcaggcctctctgcagtggtcctgtttccccttccaggaaataatccagtttctcaagagcttaagtgtctccatcaaaactagctcaaacaccatcttcctgtggttttatgagggagtttcttggagaaactgctcctaaccttatatccttgagcacttctcatccagttccagatgaccttcagaaggtggtcccacaaaagccagggccatctcacagctcgcctctgccagggtggtagatttgaggacctccatggtggtgccaggttggcctcctccctctctggcagtcatgatgaaggcattcacctgtcttgtgtctgagctgaaagtggctcctctgccttaaacatcctgggtgggactcagaaccatagccc

SEQ ID NO: 61417 - DNA, 744 bp, Homo sapiens
tcccagcatctccccacaccaccatatgcctgtgtgagggctggctggcgttcgaccacagagaggctttgtgactttgaggcctggtataattcctaagaccaaaacattgcaaacattccactgatttgttgcttcttcacccctgggcctggcccactctgtagcatttctgctgcttagtctactcacaacacaaggctgcctaagtagtcctcaccttggtagtactcaccccttccctaagtgtctacagcttcgggcagtgctggctgcactgtaagccccacagaaggactccaggctccaggtcaacctgcagcagcagatgaggctggagccagggagtgaaattcactcaggcctctctgcagtggtcctgtttccccttccaggaaataatccagtttctcaagagcttaagtgtctccatcaaaactagctcaaacaccatcttcctgtggttttatgagggagtttcttggagaaactgctcctaaccttatatccktgagcacttctcatccagttccagatgaccttcagaaggtggtcccacaaaagccagggccatctcacagctcgcctctgccagggtggtagatttgaggacctccatggtggtgccaggttggcctcctccctctctggcagtcatgatgaaggcattcacctgtcttgtgtctgagctgaaagtggctcctctgccttaaacatcctgggtgggactcagaaccatagccc

SEQ ID NO: 61418 - DNA, 761 bp, Homo sapiens
caggctggtcgcaaactcccgacctcaggtgatccgcctgccttggcctcctaaagtgtggggattacaagtgtgagccactgcacctggcctattttttatttttaaatgcaggggccatgctaatcttgcctatattgttccaattttagtatatgtactgccgaagcaagcatgctatctgctttttaaatttatttttatttatttatttttgagatgagtttcattcttgtctcccaggttggagtgcaacagcgcgatctcggctcactgcagactccatctcccaggttcaagagattctcttgcctcagtctcccaagtagccgggattgcaggcggctgcctccacgcccaactaatttttgtatttttagtagagatgggatttcactatgttgaccaggctggtcttgacctcctgatttcagttgatccgccggccttggcctcccaaagtactgggattacaggcatgagccaccgcacccagccctgcttttgaagtaacctaaactgcttctttctcccattccccattcccytctctcccttcctcttttgttcctccctccctccctccttcctgaagtaggaactgagagctcttatgggacatttggagggggcataaggagtgtggagagtgtaagatttaggttcatgatttcaatgatgattgtaagtcatggccaacttccatctgcttttggagaagacaagccttgaacacagaattataatttaaagggcctgca

SEQ ID NO: 61419 - DNA, 1439 bp, Homo sapiens
atcctgtctcaatcaatcaatcaatcaatatgtgaaagactatatgccaccataaaaagtcataatccatgggaagtgagatcacgagagaygtttacttttaaggttatacatttctataatgattgaatgtttattaacagaaatgggttaagattttttaaaatctacttcgtagaaatggaggtgtcatttagatttaaaattccacctgaggcctccctcagaaagaaaggagggaagaggggaaagaagagagggaaggagggaggggaggggaaaggaaacagggaggaagagagaaggactacattaagctcctcctttaatgtagaatcgtaaccactaggattattttcaactacctgcataaaccaaaactatcaaaggctaactttttaaagttggagatgaaatgcagcaatgtcctgaaatataaaaggccctatatccagacacagcctctctccctaagtgcctgggggaattggattcctcctatagcctctctttcccacctctctgaggttcctgagctccgcctgtgtatgtcaagacacacttttcagtgttccggtgcagccctgtggcctagcagagctcacatggcttcagtatttccatttcccgcctccccgccgggatgacagcgaattctctccctacacccctgatatttccaactgttgtatcttgaaagagacactcagactatttggcccaaccatcatggtcaatggaaacgggcttctttgacatcttttctctccagattacttctcctctgatcactcctcatgccactggatcccttcggcccttggacgacaatcaggcctcaccttgagcccctcggggagccatcccagggcaatctcctcatggccatctgtcacatcttcagacagggcagaaagttgttcttccatcaagtggactattcattcccctccacaaattaactctctgctcctctcatccaggtccccgctgtgttattgttgtgacgcgctccatccttccagtcgaggtgacttttcatggttttcctagaaaccttggtttgctaccatgtatgccttgattaaaaatgtgctgtcgggtgaaacatactattcaggggagggttatttgttaattagtaaaacaaatcaggtcaaatatttctcataaagattttgcacatctgcaattctgaaatggcttacatttagcttcttaagtgattttttttataaagaataaacacaaaagaaaatctactttttttagacaagttctagaagtagtaacaacagagaccttatttgttcctgtatcaatattttttcacacaatcatgcatcaaaaaaatcattatttttaaactattgcttttgtttttgtttgaatttaaaagtaggggcggtagggtgtaatggttcatgcctgtaatccta

SEQ ID NO: 61420 - DNA, 984 bp, Homo sapiens
taattaaatgaagatctagaaggctcctctaaagggcagtacattgaagagcaataagaatcagagagtgacaaagtactatctatgtccactgccatcttcctagtcttagacagagtttgtatttaattcattttcagtttgcataaattgatagcttactttctgtaaacttgtttgtatgtgtttgagtccataaagtaaattttcaactagtgttaggttcaattgagaaagtaacatatcttgatgggggctccaggcaggttataatacacgaaaataggacttatatctctttaagataaattattaaatacttaacaaggtttacatttaggaactagaaaacctaattttaaaacaattttaactgtatttaaccaaccattctgatcagctatttcaacattatggtatctaatacttcccataccgaattctagttacttttttttttttctaactacaactacattttcaaaatcctctacaattcagacctgtatttacctaagtagcccaggagaataagttcagacataaggtagccaaattaaatattcatggttaaaagaaaagagtttataaagttacatgcacacacacatacacatacactgtgacaaagatgaaatcattcttttttagtttctttgaattatatattttttaaaaatacgtacttctaaaagatagaaaatattttatttgaaatgtaagagtttcctgctgctttgacaaaagttgtattttgtaaaagacatgtgattattgaaagatgtgaatatgttttaactttccagggatgaactgaatagtaaaaaataaaataggtgcaataaaacagcactgtaattcttaccttcgatacaactaaaacctttgggarcatttttttaaaagcatgaatatttatattcacttcagccagtttttccttctctaagtaatttagaaaacattcattttgcgggcttcaaa

SEQ ID NO: 61421 - DNA, 572 bp, Homo sapiens
aaaaagcgttggccgggtgcggtggctcacgcctgggatcctggcactttgggaggccgaggcgggtggatcacgaggtcaggagttcaagaccagcctggccaacatggagaaaccccrtctctaataaaaatacaaaaattacagtgtgtctgtaaccccagccactcgggaggctgaggcaggagaattgcttgaacctgggggacagaggttgcagtgagccaagatcacgccactgcactccagcctgggcgacagagggagactccatctcaaaaaaaaaaaaaagtgttaaacttttttatttaaaatcttttgacatgtttttatgtcttcataggattaaatcggaagattttatactcactgattgactctgctgatgggcagttctccattaacgaattatctggaattattcagttagaaaaacctttggacagagaactccaggcagtatacaccctctctttgaaagctgtggatcaaggcttgccaaggaggctgactgccactggcactgtgattgtatcagttcttgacataaatgacaacccccctgtgtttga

SEQ ID NO: 61422 - DNA, 556 bp, Homo sapiens
ttttaacatcctcattgaatgtccttagcccagggtatctggcacccacccacaccaggctaattcaacaggcagaactacttaactcttccacttcctttcccacaagggcatgcacacccgccacacgactcgactccgcacaccacctcacctgggcgatcaagccttgctttgttggtggtgatctcttaatatccasaggaaaattaacacaccatgtgactctttaaaaagactaccgcactcacaagcccattagaagatctcatacctactttttcccatcacccaaatgaagggaaagagtaactttcctatcattttttctcaggttttagtagccccttcctcagttactattcaattacattttccctatccctataggatagctacaaataaacaaaaaacatgttactgcattgcgttacagaaaagtgtagtagaattcaaagctgtatttctctaaaaagaaacattttaaaaagaagagcaaacacttgagactacagagataaattatacttgttaggcatgaagccgttatctcaag

SEQ ID NO: 61423 - DNA, 569 bp, Homo sapiens
agcgcagccatgcccattcggctcaccaaaaaaagcttggaagcactgctgcaaagaacagcgcggattactcacatcacctctaggttcactaaagtcaggcactttggggggagttgagagtcagacttccgtgtgctgctgggaatccaggggcgggatcgtcacctcttcgaagtggccgtcktccccgctctcatagtcactcatcatgacctcggactccacttcgcagcaggctgacacgtcagagcaggaggcggtggaggcgtacacagacatgggcatgctctcgacagcgggcgcctcgaagtgtctttgataccctggcgggtaaggggcatggggttctctacaagtactattctcaccagtgccttttgtttgaggttcagacatatcgaggggataaaaattgggcaaatactgattcaagttgaacctctgccggtttcttgatgaagaacccaagctacccgcggcaggcatgtctctaggagggtggatggattcaaactgattgctgaattcgggcggtaacggtggtagctcatcagctgcggggaagt

SEQ ID NO: 61424 - DNA, 1494 bp, Homo sapiens
ctcttggtttgctgaggtcaggagcagccaaagattcttttggtggcagagtagaaaaaaaagaaaacatttgtaattaaaacagtcggctgaaaaggcaataaaggtaagtacacagaacaatgaaaactgcttacagaggcccaatcagccatacagcatgtccttacgccagtatctatgacaattccaaatggctgagaaatgtatgtaccacaaataaaatggaatatggaagtggaggaaagtgactgcggaatgaggaaccagaaatttggccagaaaactcaaatattactttcttttccttgtttctgacaatcacagcctgaaaacacaraatttccttaggaataatgaaaacaaaacaaacaggctctaataaaatataaactgatcagattacataggtgataatccaaatacatctacagctacataatgcacacactttatagcacactgcaacttcaaaggacattaaattcagaggaattcataggcaaacttagatacttaaagacagatgtacaagctgaagatctctccaaactgtatgtattttgaatatgctttaatattgacactgtgagccattccctaaagagaccacggctacacttaccccatgtctgtaattacacttgccctgccagggccccgcatctatacacagaagcccagcaggaagtgtaaccaaacgcatgtaaatcccactatcagttagggccatgagacgcctgcccaggccctggctaaccttcaggttctctctttgaaatggggtgaaaatccgttagagttgttatgaggattaaacaggatcatgcaggttaagcactgttagaaactatcaataactgtgaaagtagacatcacagcagaaaaacggtcacatccgtgattttttaaacaaggctttctatgcattcaacagtgttataatttgggacaaatatttgattgatagttcacttctagaaatttcagtaattttaaaagactgtggtgtctctaaaacatgaatacgccggcatttaggtaacatgtatctacagaatcatttttaagtctagtaacaaaagcagcaattcctttaaacaaaaaaagatcaacaacttttgttacgtaggcactagtaatagctttcaactttaaattccatgtgcacttcttggatatgccaaaaaatatttgtcaatgaaggagactgcaatgaaggaactgttgaaattctgcttctataagcttcaataatatttaaaatgctgaaggtcatcagtttaacactaaaacttcactagacaaaatacaggtatgtttctgatttgcccagtgaaaacatggtacttcttaggaaaagaagtgtaggcgtcatcagtaactataaccatgaacactggagtatctaagcctcttctgcctgatagcaaatggggcccagagctatcctccctcctcctgaaccttgacagcatcatgtcctagcataaa

SEQ ID NO: 61425 - DNA, 994 bp, Homo sapiens
tgcattaggagaaaatctgtatttggtatacattcatakaaaaaataccatttaaatgataatttgaaaatcaatgaaagtagagtagatattttgtttagggaaggctgaaacacactttgtgatgtgaaaaatattcaggtgaaactgattttaaaaaaaggtaatggaaggacattgtctttaggtggactgaatgggcacgaagaaagagaggggtgattcaaagattttgccagagatggtgggtgaaaagggcattaaaattcagggaaggatttagaagtgcaaatctcaccacaggttaaattaactaatggtactgtatataaatttcaaaaaaataaaaacattggcccatgaaatttaattgaaatactaggttgtatataataatgcttaaatattattttgtaaagacacagttgaaaaattctaaataactgacagttaaaagaagttaagagtattaacaattaaatacatacacattatatggagacatgcttctaacagaatctgaaggtttagccatttcaaaaactaaatatttggaaacatttaaatatataaaagtatgtatatgtttcaatatatagtctgcatatattttaaccataatgttattcatcgagatagcacttgagaaaaagcgtgctgtgtggtttaaaatgatacagcttgcctttcactccacttcactagactatctataattttaagaaataatgtcaaattgattaatcatttggaatacaattttcttaatataatagctttcacctattattgtgatgattctaattataaatctatagacaagtgtgcaatagagcagacgttatttttttacttaagggtgatgtgataaaatgcaatatttcatgttaattatattataaaattgttcttaacataataaatgacataagaaatacattaaatttagaaatgctttaattacagtcacggcatatggggatactgaaatgca

SEQ ID NO: 61426 - DNA, 948 bp, Homo sapiens
cacatgattatatttgtgaatttttttgaaattccttgttattgatttccagttttgtagcattgttattagaaaaggttctttatatgatctcaatcttcttaaattttctaatacttaccttgtgacctgacatayaatttatcctggataatattttttgtgtacttgagaaaattgtgtattccattgctattggaagaaatattctgcaaatgtctgttaggttcatttgttctaaagtattgttcaagtccagtttttccttattaattttctgtttggatgatatttttattgttgaatgtatttgttattgaagtgcttttctattattgtattgaaatctacctcttctttttagatttttgaatatctgctttatatggtaggtgtttccgtattgggagaaacagtcaaccctttgtatctgagggctctgcatccacagatctaccaatcaaaactactttttaacagacaataaaaagatgaataaaaacgatacaaatagaaaacaatagagtataattactgtttgtgatagtatttacattgtataggtattataaataatttagagatgatttaaattatatgggaaggtatgaattagttttatgcaagtactattcaattttatataagatacttgagcattcaccaagttgtgtattttcagaaggttctgaaatgaatgcctgatagcaaggggtgacttcacataacaatttttatactattttgaagaattgatccatttatcattatataatgtactccttttttttctatttacagattttgacttaacgtttattttgtctgatataagtatagctacttttgctttcttttggttttcatttatgtggaatgcctttttccatacctacactttcaatctgtcaatgtccttaaaagcaaggtaaatttttgtaagcagca

SEQ ID NO: 61427 - DNA, 948 bp, Homo sapiens
cacatgattatatttgtgaatttttttgaaattccttgttattgatttccagttttgtagcattgttattagaaaaggttctttatatgatctcaatcttcttaaattttctaatacttaccttgtgacctgacatacaatttatcctggataatattttttgtgtacttgagaaaattgtgtattccattgctattggaagaaatattctgcaaatgtctgttaggttcatttgktctaaagtattgttcaagtccagtttttccttattaattttctgtttggatgatatttttattgttgaatgtatttgttattgaagtgcttttctattattgtattgaaatctacctcttctttttagatttttgaatatctgctttatatggtaggtgtttccgtattgggagaaacagtcaaccctttgtatctgagggctctgcatccacagatctaccaatcaaaactactttttaacagacaataaaaagatgaataaaaacgatacaaatagaaaacaatagagtataattactgtttgtgatagtatttacattgtataggtattataaataatttagagatgatttaaattatatgggaaggtatgaattagttttatgcaagtactattcaattttatataagatacttgagcattcaccaagttgtgtattttcagaaggttctgaaatgaatgcctgatagcaaggggtgacttcacataacaatttttatactattttgaagaattgatccatttatcattatataatgtactccttttttttctatttacagattttgacttaacgtttattttgtctgatataagtatagctacttttgctttcttttggttttcatttatgtggaatgcctttttccatacctacactttcaatctgtcaatgtccttaaaagcaaggtaaatttttgtaagcagca

SEQ ID NO: 61428 - DNA, 948 bp, Homo sapiens
cacatgattatatttgtgaatttttttgaaattccttgttattgatttccagttttgtagcattgttattagaaaaggttctttatatgatctcaatcttcttaaattttctaatacttaccttgtgacctgacatacaatttatcctggataatattttttgtgtacttgagaaaattgtgtattccattgctattggaagaaatattctgcaaatgtctgttaggttcatttgttctaaagtattgttcaagtccagtttttccttattaattttctgtttggatgatatttttattgttgaatgtatttgttattgaagtrcttttctattattgtattgaaatctacctcttctttttagatttttgaatatctgctttatatggtaggtgtttccgtattgggagaaacagtcaaccctttgtatctgagggctctgcatccacagatctaccaatcaaaactactttttaacagacaataaaaagatgaataaaaacgatacaaatagaaaacaatagagtataattactgtttgtgatagtatttacattgtataggtattataaataatttagagatgatttaaattatatgggaaggtatgaattagttttatgcaagtactattcaattttatataagatacttgagcattcaccaagttgtgtattttcagaaggttctgaaatgaatgcctgatagcaaggggtgacttcacataacaatttttatactattttgaagaattgatccatttatcattatataatgtactccttttttttctatttacagattttgacttaacgtttattttgtctgatataagtatagctacttttgctttcttttggttttcatttatgtggaatgcctttttccatacctacactttcaatctgtcaatgtccttaaaagcaaggtaaatttttgtaagcagca

SEQ ID NO: 61429 - DNA, 948 bp, Homo sapiens
cacatgattatatttgtgaatttttttgaaattccttgttattgatttccagttttgtagcattgttattagaaaaggttctttatatgatctcaatcttcttaaattttctaatacttaccttgtgacctgacatacaatttatcctggataatattttttgtgtacttgagaaaattgtgtattccattgctattggaagaaatattctgcaaatgtctgttaggttcatttgttctaaagtattgttcaagtccagtttttccttattaattttctgtttggatgatatttttattgttgaatgtatttgttattgaagtgcttttctattattgtattgaaatctacctcttctttttagatttttgaatatctgctttatatggtaggtgtttccgtattgggagaaacagtcaaccctttgtatctgagggctctgcatccacagatctaccaatcaaaactactttttaacagacaataaaaagatgaataaaaacgatacaaatagaaaacaatagagtataattactgtttgtgatagtatttacattgtataggtattataaataatttagagatgatttaaattatatgggaaggtatgaattagttttatgcaagtactattcaattttatataagatacttgagcattcaccaagttgtgtattttcagaaggttctgaaatgaatgcctgatagcaaggggtgacttcrcataacaatttttatactattttgaagaattgatccatttatcattatataatgtactccttttttttctatttacagattttgacttaacgtttattttgtctgatataagtatagctacttttgctttcttttggttttcatttatgtggaatgcctttttccatacctacactttcaatctgtcaatgtccttaaaagcaaggtaaatttttgtaagcagca

SEQ ID NO: 61430 - DNA, 948 bp, Homo sapiens
cacatgattatatttgtgaatttttttgaaattccttgttattgatttccagttttgtagcattgttattagaaaaggttctttatatgatctcaatcttcttaaattttctaatacttaccttgtgacctgacatacaatttatcctggataatattttttgtgtacttgagaaaattgtgtattccattgctattggaagaaatattctgcaaatgtctgttaggttcatttgttctaaagtattgttcaagtccagtttttccttattaattttctgtttggatgatatttttattgttgaatgtatttgttattgaagtgcttttctattattgtattgaaatctacctcttctttttagatttttgaatatctgctttatatggtaggtgtttccgtattgggagaaacagtcaaccctttgtatctgagggctctgcatccacagatctaccaatcaaaactactttttaacagacaataaaaagatgaataaaaacgatacaaatagaaaacaatagagtataattactgtttgtgatagtatttacattgtataggtattataaataatttagagatgatttaaattatatgggaaggtatgaattagttttatgcaagtactattcaattttatataagatacttgagcattcaccaagttgtgtattttcagaaggttctgaaatgaatgcctgatagcaaggggtgacttcacataacaatttttatactattttgaagaattgatccatttatcattatataatgtactccttttttttctatttacagattttgacttaacgtttattttgtctgatataagtatagctactyttgctttcttttggttttcatttatgtggaatgcctttttccatacctacactttcaatctgtcaatgtccttaaaagcaaggtaaatttttgtaagcagca

SEQ ID NO: 61431 - DNA, 948 bp, Homo sapiens
cacatgattatatttgtgaatttttttgaaattccttgttattgatttccagttttgtagcattgttattagaaaaggttctttatatgatctcaatcttcttaaattttctaatacttaccttgtgacctgacatacaatttatcctggataatattttttgtgtacttgagaaaattgtgtattccattgctattggaagaaatattctgcaaatgtctgttaggttcatttgttctaaagtattgttcaagtccagtttttccttattaattttctgtttggatgatatttttattgttgaatgtatttgttattgaagtgcttttctattattgtattgaaatctacctcttctttttagatttttgaatatctgctttatatggtaggtgtttccgtattgggagaaacagtcaaccctttgtatctgagggctctgcatccacagatctaccaatcaaaactactttttaacagacaataaaaagatgaataaaaacgatacaaatagaaaacaatagagtataattactgtttgtgatagtatttacattgtataggtattataaataatttagagatgatttaaattatatgggaaggtatgaattagttttatgcaagtactattcaattttatataagatacttgagcattcaccaagttgtgtattttcagaaggttctgaaatgaatgcctgatagcaaggggtgacttcacataacaatttttatactattttgaagaattgatccatttatcattatataatgtactccttttttttctatttacagattttgacttaacgtttattttgtctgatataagtatagctacttttgctttcttttggttttcatttatgtggaatgcctttttccatacctacastttcaatctgtcaatgtccttaaaagcaaggtaaatttttgtaagcagca

SEQ ID NO: 61432 - DNA, 1958 bp, Homo sapiens
agcgaaagcactgaaagattaccaacaaaaatatttgtcaatcttaccaaagtaaaaaacaattttgaatacacaaaataatatttcaattatgatatttaatattgtttttacagaattacattatataattacagcacttggtttgtgtcttttcaaaattaatagaaatatgtttgaattaaaattatgaaatataaataatatatagcagaaaaaagtgacagtttagaaagaacactaatcaaataaccagattaaaaatcaatattttagatgttttcaggtttttaaagatatagtgtcaaaatgaaacccataaaattcacaagacaaacaggaaaccaaccaaccattagatgtaattttagaaaattatatttacctggtttcttaaatttcaatgaatagacaaagctgttaggaacaaaaataaaattcctttaattttttattactatgtgttagggctgaggaaagatattataatgtattctgtgttctcgtgagaaaaaagtcatcagaaatctgcagaattaaacatactgtgttttgcaaggctttcaatacacagtgagtgctcactaaagggcacataataatcactacagtaacgatcatactgatcataactcagtcagacacatgtttatagaacatatttaaatgctaatttaaattcayttaaaattgaaattggaactttcccttttttcaaaataaaatattgccttagcggttcctcattagtggaattttaatgaatgtaatagtcttggactatgattaaatctttggtttgtactgaatatagtttagtgttgatgctaaacaattgttacataataggaagactttcagaatctaccttaactcccaaatgctgtaaacttgcaaagctttcaatgtttgtatactttgtcaaaaatgtgagataaattttaaatatatacacatgcaaagatattaatagtatttgcaggcttggtagaagaacgaagcacatagcaccctcatttgtgtttttcaggttcttaaaaaacacataacttagtacagtgtttataaattattctgatgatgtgactgaggtcactgtctgtctatgcatataggtgtcacttttaagagaagataaaataatgaaaaaccttattagcaggaccagattaggtggtaattgtcagtttccttgctttaaagtatctgaatgaaaacttactattttctatatagtaactatgacataccttatatacttctttggataattttatgctgtactatttcaaattatactaccttcctaaaattttcatgtcttttcctttctgggaagctgatatgttgattgctatactatggaacacattaaacacaaaaggagaaaatctcatttgatccctataatagccctgtgagggatcctataatccacattttatagatgaagaatgataggttaaataattttcccaggatcagacattaacaggtacttaaacagagatcagaagtgtgagactggctctcgggccacactctgtaacagcatgctgtgccgctctcagagcaccatgtgggagctagggcagcccacaaaacccactcccatcatccaggccacatttaccttcgttaggcctgagccatccggaaaaatccaaagctgagacgaggacttggaataaacgatgaggggaaatgtgtgatttttttggaaagattgcttagtaacttaaaaaaattccctcctacattcccgtttgcagctacatgtttgagaattagtgttcatctccatcttattcatttggggattactttaaatgccaaatgattcaagtctctcactaaatatattccaatacacactcttaaaggattttatctcttgtttgtccccagtttgtcctctttttcacagaagttaataagctgtttattttctctgaact

SEQ ID NO: 61433 - DNA, 1958 bp, Homo sapiens
agcgaaagcactgaaagattaccaacaaaaatatttgtcaatcttaccaaagtaaaaaacaattttgaatacacaaaataatatttcaattatgatatttaatattgtttttacagaattacattatataattacagcacttggtttgtgtcttttcaaaattaatagaaatatgtttgaattaaaattatgaaatataaataatatatagcagaaaaaagtgacagtttagaaagaacactaatcaaataaccagattaaaaatcaatattttagatgttttcaggtttttaaagatatagtgtcaaaatgaaacccataaaattcacaagacaaacaggaaaccaaccaaccattagatgtaattttagaaaattatatttacctggtttcttaaatttcaatgaatagacaaagctgttaggaacaaaaataaaattcctttaattttttattactatgtgttagggctgaggaaagatattataatgtattctgtgttctcgtgagaaaaaagtcatcagaaatctgcagaattaaacatactgtgttttgcaaggctttcaatacacagtgagtgctcactaaagggcacataataatcactacagtaacgatcatactgatcataactcagtcagacacatgtttatagaacatatttaaatgctaatttaaattcacttaaaattgaaattggaactttcccttttttcaaaatraaatattgccttagcggttcctcattagtggaattttaatgaatgtaatagtcttggactatgattaaatctttggtttgtactgaatatagtttagtgttgatgctaaacaattgttacataataggaagactttcagaatctaccttaactcccaaatgctgtaaacttgcaaagctttcaatgtttgtatactttgtcaaaaatgtgagataaattttaaatatatacacatgcaaagatattaatagtatttgcaggcttggtagaagaacgaagcacatagcaccctcatttgtgtttttcaggttcttaaaaaacacataacttagtacagtgtttataaattattctgatgatgtgactgaggtcactgtctgtctatgcatataggtgtcacttttaagagaagataaaataatgaaaaaccttattagcaggaccagattaggtggtaattgtcagtttccttgctttaaagtatctgaatgaaaacttactattttctatatagtaactatgacataccttatatacttctttggataattttatgctgtactatttcaaattatactaccttcctaaaattttcatgtcttttcctttctgggaagctgatatgttgattgctatactatggaacacattaaacacaaaaggagaaaatctcatttgatccctataatagccctgtgagggatcctataatccacattttatagatgaagaatgataggttaaataattttcccaggatcagacattaacaggtacttaaacagagatcagaagtgtgagactggctctcgggccacactctgtaacagcatgctgtgccgctctcagagcaccatgtgggagctagggcagcccacaaaacccactcccatcatccaggccacatttaccttcgttaggcctgagccatccggaaaaatccaaagctgagacgaggacttggaataaacgatgaggggaaatgtgtgatttttttggaaagattgcttagtaacttaaaaaaattccctcctacattcccgtttgcagctacatgtttgagaattagtgttcatctccatcttattcatttggggattactttaaatgccaaatgattcaagtctctcactaaatatattccaatacacactcttaaaggattttatctcttgtttgtccccagtttgtcctctttttcacagaagttaataagctgtttattttctctgaact

SEQ ID NO: 61434 - DNA, 693 bp, Homo sapiens
aaatctcatgcacatggaatattatttttctcaattttagttttgaaagatttctgttagtaaagagagaccactgaagaattgccatgaactcaatatagatgcttagaagactgttctgactcaaaatgtgtgtatctttcttattttcaaaggtgtagcctttccagtaccagtttcactgactaaggtccaatggaatatttttctcagaaagaattagatattttaatgtcctacagattgaggtatcttatgtaccaaatactttggcccctatactttgtttagtcaatttctacttctgtgctttcacaatcctgagtaataattctctaaaattatttagctatgtttaatgttgatagcagtacgttattctgttaaactaaatttggcctgaggatgccttcatattgtgagttcttatgtaaaaactgcaacctaacttagtacataaactaactgaaagcgtactttaggactacacttttgtaacaaatagctgagcctcagccaatcacagtagttaagcttaggtcaagcacaggtggccaactgatcagaccatgttcaaattaggcaaacgtggagctgtaactaaccaaattgtttcyctacctcatgttttgttttctgttcatgaatgctgccagcccatgttgtggagcagaattctctgaacctcttccg

SEQ ID NO: 61435 - DNA, 1068 bp, Homo sapiens
tcaattggtgatgtttattagaatgtaaccctattacaagtcaaggagcatctgtatatgtagaaaattctctctcaatgtctttaaaatatatctgtaacaaaattcttttaaaatcatatgttaaacmatttatattgatatttcttttaatatcatttataatttggagtttttatatgcagtagcaaataatttgaatataaaagatgatctaagctaaaaaatacatactatatatttctatattttcctagaaacatttcaataccttaaacagaaacaagtataaattgaaaccacacaattatataacatttaagtgaaaaatacaatgttcaccttggaaaataacaatggagatgtttttcaatccatttaaaattcgtaaaatatttcctgaaacacctgaaaagctaatccaagtggacaatgacctcaggtctttcttttcaactagtaggaaggtcattcatgtgtagttcttgtgttctcttttttgttgaattgcataagttcaagggaggcaaacaatttgatttagtctttcctacttttagaattaacattatttcccagtttggaaatttcactttgctgctggaaataaaaagaagaagagttttcagcaacctgttttcatggttatccaactcttcaatttactcccttcatgcagccttatgtaactgccattttcttcctcaaaagtcagactttcactcacatttgattgcatagttaccaatttaataggtactaattgaacatttacttggaggaattttaaaacaatgtaaaagagtatttctatccttagtaatcttgtaccatgactgaaaacaaaaagagtagactaacattttacctagcatggttctaatatttaggaacataactgtctctacaaattatgttaggttttaaaagaaagggtagataacaaagttacatagttattaaagatactacaattagatcattttattgtcttagatctacactcaatagattttgaagtgtacaataaaaaattgttttctgcaggcacaatgtttgtacagcaga

SEQ ID NO: 61436 - DNA, 1068 bp, Homo sapiens
tcaattggtgatgtttattagaatgtaaccctattacaagtcaaggagcatctgtatatgtagaaaattctctctcaatgtctttaaaatatatctgtaacaaaattcttttaaaatcatatgttaaacaatttatattgatatttcttttaatatcatttataatttggagtttttatatgcwgtagcaaataatttgaatataaaagatgatctaagctaaaaaatacatactatatatttctatattttcctagaaacatttcaataccttaaacagaaacaagtataaattgaaaccacacaattatataacatttaagtgaaaaatacaatgttcaccttggaaaataacaatggagatgtttttcaatccatttaaaattcgtaaaatatttcctgaaacacctgaaaagctaatccaagtggacaatgacctcaggtctttcttttcaactagtaggaaggtcattcatgtgtagttcttgtgttctcttttttgttgaattgcataagttcaagggaggcaaacaatttgatttagtctttcctacttttagaattaacattatttcccagtttggaaatttcactttgctgctggaaataaaaagaagaagagttttcagcaacctgttttcatggttatccaactcttcaatttactcccttcatgcagccttatgtaactgccattttcttcctcaaaagtcagactttcactcacatttgattgcatagttaccaatttaataggtactaattgaacatttacttggaggaattttaaaacaatgtaaaagagtatttctatccttagtaatcttgtaccatgactgaaaacaaaaagagtagactaacattttacctagcatggttctaatatttaggaacataactgtctctacaaattatgttaggttttaaaagaaagggtagataacaaagttacatagttattaaagatactacaattagatcattttattgtcttagatctacactcaatagattttgaagtgtacaataaaaaattgttttctgcaggcacaatgtttgtacagcaga

SEQ ID NO: 61437 - DNA, 1068 bp, Homo sapiens
tcaattggtgatgtttattagaatgtaaccctattacaagtcaaggagcatctgtatatgtagaaaattctctctcaatgtctttaaaatatatctgtaacaaaattcttttaaaatcatatgttaaacaatttatattgatatttcttttaatatcatttataatttggagtttttatatgcagtagcaaataatttgaatataaaagatgatctaagctaaaaaatacatactatatatttctatattttcctagaaacatttcaataccttaaacagaaacaagtataaattgaaaccacacaattatataacatttaagtgaaaaatacaatgttcaccttggaaaataacaatggagatgtttttcaatccatttaaaattcgtaaaatatttcctgaaacacctgaaaagctaatccaagtggacaatgacctcaggtctttcttttcaactagtaggaaggtcattcatgtgtagttcttgtgttctcttttttgttgaattgcataagttcaagggaggcaaacaatttgatttagtctttcctayttttagaattaacattatttcccagtttggaaatttcactttgctgctggaaataaaaagaagaagagttttcagcaacctgttttcatggttatccaactcttcaatttactcccttcatgcagccttatgtaactgccattttcttcctcaaaagtcagactttcactcacatttgattgcatagttaccaatttaataggtactaattgaacatttacttggaggaattttaaaacaatgtaaaagagtatttctatccttagtaatcttgtaccatgactgaaaacaaaaagagtagactaacattttacctagcatggttctaatatttaggaacataactgtctctacaaattatgttaggttttaaaagaaagggtagataacaaagttacatagttattaaagatactacaattagatcattttattgtcttagatctacactcaatagattttgaagtgtacaataaaaaattgttttctgcaggcacaatgtttgtacagcaga

SEQ ID NO: 61438 - DNA, 1068 bp, Homo sapiens
tcaattggtgatgtttattagaatgtaaccctattacaagtcaaggagcatctgtatatgtagaaaattctctctcaatgtctttaaaatatatctgtaacaaaattcttttaaaatcatatgttaaacaatttatattgatatttcttttaatatcatttataatttggagtttttatatgcagtagcaaataatttgaatataaaagatgatctaagctaaaaaatacatactatatatttctatattttcctagaaacatttcaataccttaaacagaaacaagtataaattgaaaccacacaattatataacatttaagtgaaaaatacaatgttcaccttggaaaataacaatggagatgtttttcaatccatttaaaattcgtaaaatatttcctgaaacacctgaaaagctaatccaagtggacaatgacctcaggtctttcttttcaactagtaggaaggtcattcatgtgtagttcttgtgttctcttttttgttgaattgcataagttcaagggaggcaaacaatttgatttagtctttcctacttttagaattaacattatttcccagtttggaaatttcactttgctgctggaaataaaaagaagaagagttttcagcaacctgttttcatggttatccaactcttcaatttactcccttcatgcagccttatgtaactgccattttcttcctcaaaagtcagactttcactcacatttgattgcatagttaccaatttaataggtactaattgaacatttacttggaggaattttaaaacaatgtaaaagagtatttctatccttagtaatcttgtaccatgactgaaaacaaaaagagtagactaacattttacctagcatggttctaatatttaggaacataactgtctctacaaattatgttaggttttaaaagaaagggtagataacaaagttacatagttattaaagatactacaattagatcattttattgtcttagatctacactcaatagattttgaagtgtacaataaaaaattgttttctrcaggcacaatgtttgtacagcaga

SEQ ID NO: 61439 - DNA, 924 bp, Homo sapiens
ttcttgattttgtcaaatggactttaagggtcccttctggttttgatatacttttttcattcactaggaaatgaggaaaaatgaataaacaaggcctgagacaaacttgagctatgtgtaatgaagatctacctttaggactgcggatcataataataggccccctcagcttctttatttgccaccattttccttctccggcatctacacccttctgcctgcaatccacaagactccactcccttactcatttctttgtcctccagccgacagtgcctttctcctctttatccactcagccttcttggtccaaatcaaatttcacgttccctgctaagctgtttctatgcctacctctccctcaaggcagaatcaatcactcctagctctgtgattctatggtgagcttgttcatgctgttataacacttccacatgttttctaattggttacttacatttctgtttctttggtgttccaaattcttgtttttcctctgtcaaaatatttgtcarcccacactgagctggatacctttataaggctttggcattttggccccaactctccttggggaaggagcactatctagagcagtggttatcaaccggagtcattttgctcccccaggggaaatttgataacatctggagacatttttgtttctttgtttatttttatttttaattgacaaataataattatatatatttatgggatacaatgtggtgtttcaatatatgcacacattgtggagtgaccaaatcagacattttgattatcatgacaggtggtcctattgacatctactaagcagagaccagggatattgttaaatgtcctacaaagcacatgtcagcctccacaatgaagaattatctagtcctaagtatcagcagtaccaagattgagaaatctcagtct

SEQ ID NO: 61440 - DNA, 894 bp, Homo sapiens
tgaatgacaaggagaattgtcaaaggagagcatgtgctattcaatcagatgatcccttctaaatatcaccggcaaacagccttgcctgccctatattctggtgccaacttaactcagtgagactgacagaacgcccatgagctctttaccaaacatctgtcttcacgggtgtgtgcaacatcttctgtgtgctaagaaccagtttcaagttcaggattgatttttccagcttagtgcagaagataaataatgaacgagagtacagtcagggtaatcacacattttagaattagaaagatgctgcaactacttgagatttggtatctgatatctggaaataatatgctgttcataacaagagcatctaattggataacaatttgatatttaatggtgcagctcatcctgctgttaatcctctcctctacagttcctgttctaatgaggttagcactaaatcagtatgctggctcccctaatctcttgagaatcaacgagtggtcttcatcattaagacttccacaaggtaatgagaaaattttcctgaatatttgattaaaatacaaataaaacaaatggaacaaatcaatatttgctggtaacagtactgtagaggatttgaacagttcatgggcctcactctctcctatacgttgtgattgccttgctgagaatggggctctctgcccatgtacaagactggaggagctcaaacctggactaaggatctcacacaaactttctaccctataagaaatttgctgggagtaatgatgaatagcactcacaacactcataactctgacactctacctgcaacgatttaaacatttttcatattttgacccatctaattatgataayagtattgggaaggtgctgtcattatcccca

SEQ ID NO: 61441 - DNA, 2229 bp, Homo sapiens
tgcattgtgttttagaagcaaccatgatttgaacatataacagattaattaaggttctggaataggagtttaaagagaatactatgggagtggaaggctgtgacagaaggtagagggaaaatatgaaattgaacacaacatggtttctgtcctagaaaggaaataaagaatcttagcagagggacaagcacagcatatccctatcccaaatgttccatggcctacctaaagtaactttacgtaactatgagatccctactatgtgccggctttaaagtattcctgattaactaagaccctaagactgagaacttctcctcaagaaactcattatctagatttgaataggaactttcaatgatgatatccaaggatcttgcatttgtcttaaaccactcttattagctttgcttaaagccaacttgaaatctgaaaagctagagtgaccttgggcaagttatttaatcgctccaagactccagatctgagaaatagaaatgatagcacctttgttggggtttgttaggattaaattacctaatacacaggagggatagcacaatgcctagtataaaataaacactcaatatagtggctctgctactgattttcacataattggacttttgttctttcccaaatattgcccaatagttttcaaatttccaaataactttgaattttccaaataactttgctcatcttattcctctttcacagtgaagtccattacttatatctgccaaacttgtacttaccctttaaagaccacaatgggctctcagatatggtaaacaaaatttaatgtacctctgccaataagaaatgaatatttattcttaaagcagctctaagataactttgaagaagctatcttgcttatttgttattaagatgtgacatcgacatctactcaggagaaaagggagaatttaccaaatgtttgaggtgtcccaataatgtaggggcactcaagaagacacaaccaaaatacctgatgctctaagaagtttcaattatacatactctatcaagatatcagctagttatgttatgaaatagaaattagggattaagtaaaatgatatttttgctagtattctctctcaaakaccaaacttttcttttgcaaaaagaaggccttctgtagaagtgagatgatgcttaggaatagtggctttggttgaatattaggattacaagaaactggagaaatggagagattaatgggtgaactaacatttattgattgactatgaagtgtcatgcataatttcactaaattctcagccttaaaacatggaaattatcatctctggtttcatatatttagaaactgaagttaatagaatataaaggtctgccaaggcttgttgtcagatctaggaatgagaagatttgaacctgtgtcagtaagactctgaacccatactttttgtactatctcatttcttcctcttgttttcaacaactcagaaatgaagaatcaatttctattctctgtccttatactatattttctttgtaccttcagagtaaaatgggatgtggctcacaggagggaaagaggaggtttaagtggcactgtgtgggtcagaagcactctcaaggtgtccttatcctttttgcatttcccccaatcttttcattggaatgtgatttgaaaggaattagagtagtcctcctgtactaatttttattgctcactgcagggctacagggatgtttactctacacagtatgcctcttccctgatgcccttcatatctttttttttttttttgagatggagttttgctcttgttgcccaggctggagtgcaatggcaccgtcttggctcaccacaaactctgcctcctgggttcaagcaattctcctgcctcagcctcctgactagcttggactacaggcatgtgccaccacacccagctaatttttgtatttttagtagagatggtgattcaccatgttggccagtgtggtcttgatgtcttgacctcgtgatccacacacctcgacctcccaaagtgctgggatcacaggtgtgagccactgttcctggcctcttcatctcttttttttttcttttttttttttttgagacagggtctcactctgtcactcaggctggagtgcagtggcatgatcatggcttactacagcctcgacctcctgggctcaagtgatcctcctgcctcagcatcttgagtagctgggactacagatgca

SEQ ID NO: 61442 - DNA, 2229 bp, Homo sapiens
tgcattgtgttttagaagcaaccatgatttgaacatataacagattaattaaggttctggaataggagtttaaagagaatactatgggagtggaaggctgtgacagaaggtagagggaaaatatgaaattgaacacaacatggtttctgtcctagaaaggaaataaagaatcttagcagagggacaagcacagcatatccctatcccaaatgttccatggcctacctaaagtaactttacgtaactatgagatccctactatgtgccggctttaaagtattcctgattaactaagaccctaagactgagaacttctcctcaagaaactcattatctagatttgaataggaactttcaatgatgatatccaaggatcttgcatttgtcttaaaccactcttattagctttgcttaaagccaacttgaaatctgaaaagctagagtgaccttgggcaagttatttaatcgctccaagactccagatctgagaaatagaaatgatagcacctttgttggggtttgttaggattaaattacctaatacacaggagggatagcacaatgcctagtataaaataaacactcaatatagtggctctgctactgattttcacataattggacttttgttctttcccaaatattgcccaatagttttcaaatttccaaataactttgaattttccaaataactttgctcatcttattcctctttcacagtgaagtccattacttatatctgccaaacttgtacttaccctttaaagaccacaatgggctctcagatatggtaaacaaaatttaatgtacctctgccaataagaaatgaatatttattcttaaagcagctctaagataactttgaagaagctatcttgcttatttgttattaagatgtgacatcgacatctactcaggagaaaagggagaatttaccaaatgtttgaggtgtcccaataatgtaggggcactcaagaagacacaaccaaaatacctgatgctctaagaagtttcaattatacatactctatcaagatatcagctagttatgttatgaaatagaaattagggattaagtaaaatgatatttttgctagtattctctctcaaagaccaaacttttcttttgcaaaaagaaggccttctgtagaagtgagatgatgcttaggaatagtggctttggttgaatattaggattacaagaaactggagaaatggagagattaatgggtgaactaacatttattgattgactatgaagtgtcatgcataatttcactaaattctcagccttaaaacatggaaattatcatctctggtttcatatatttagaaactgaagttaatagaatataaaggtctgccaaggcttgttgtcagatctaggaatgagaagatttgaacctgtgtcagtaagactctgaacccatactttttgtactatctcatttcttcctcttgttttcaacaactcagaaatgaagaatcaatttctattctctgtccttatactatattttctttgtaccttcagagtaaaatgggatgtggctcacaggagggaaagaggaggtttaagtggcactgtgtgggtcagaagcactctcaaggtgtccttatcctttttgcatttcccccaatcttttcattggaatgtgatttgaaaggaattagagtagtcctcctgtactaatttttattgctcactgcagggctacagggatgtttactctacacagtatgcctcttccctgatgcccttcatatctttttttttttttttgagatggagttttgctcttgttgcccaggctggagtgcaatggcaccgtcttggctcaccacaaactctgcctcctgggttcaagcaattctcctgcctcagcctcctgactagctkggactacaggcatgtgccaccacacccagctaatttttgtatttttagtagagatggtgattcaccatgttggccagtgtggtcttgatgtcttgacctcgtgatccacacacctcgacctcccaaagtgctgggatcacaggtgtgagccactgttcctggcctcttcatctcttttttttttcttttttttttttttgagacagggtctcactctgtcactcaggctggagtgcagtggcatgatcatggcttactacagcctcgacctcctgggctcaagtgatcctcctgcctcagcatcttgagtagctgggactacagatgca

SEQ ID NO: 61443 - DNA, 2229 bp, Homo sapiens
tgcattgtgttttagaagcaaccatgatttgaacatataacagattaattaaggttctggaataggagtttaaagagaatactatgggagtggaaggctgtgacagaaggtagagggaaaatatgaaattgaacacaacatggtttctgtcctagaaaggaaataaagaatcttagcagagggacaagcacagcatatccctatcccaaatgttccatggcctacctaaagtaactttacgtaactatgagatccctactatgtgccggctttaaagtattcctgattaactaagaccctaagactgagaacttctcctcaagaaactcattatctagatttgaataggaactttcaatgatgatatccaaggatcttgcatttgtcttaaaccactcttattagctttgcttaaagccaacttgaaatctgaaaagctagagtgaccttgggcaagttatttaatcgctccaagactccagatctgagaaatagaaatgatagcacctttgttggggtttgttaggattaaattacctaatacacaggagggatagcacaatgcctagtataaaataaacactcaatatagtggctctgctactgattttcacataattggacttttgttctttcccaaatattgcccaatagttttcaaatttccaaataactttgaattttccaaataactttgctcatcttattcctctttcacagtgaagtccattacttatatctgccaaacttgtacttaccctttaaagaccacaatgggctctcagatatggtaaacaaaatttaatgtacctctgccaataagaaatgaatatttattcttaaagcagctctaagataactttgaagaagctatcttgcttatttgttattaagatgtgacatcgacatctactcaggagaaaagggagaatttaccaaatgtttgaggtgtcccaataatgtaggggcactcaagaagacacaaccaaaatacctgatgctctaagaagtttcaattatacatactctatcaagatatcagctagttatgttatgaaatagaaattagggattaagtaaaatgatatttttgctagtattctctctcaaagaccaaacttttcttttgcaaaaagaaggccttctgtagaagtgagatgatgcttaggaatagtggctttggttgaatattaggattacaagaaactggagaaatggagagattaatgggtgaactaacatttattgattgactatgaagtgtcatgcataatttcactaaattctcagccttaaaacatggaaattatcatctctggtttcatatatttagaaactgaagttaatagaatataaaggtctgccaaggcttgttgtcagatctaggaatgagaagatttgaacctgtgtcagtaagactctgaacccatactttttgtactatctcatttcttcctcttgttttcaacaactcagaaatgaagaatcaatttctattctctgtccttatactatattttctttgtaccttcagagtaaaatgggatgtggctcacaggagggaaagaggaggtttaagtggcactgtgtgggtcagaagcactctcaaggtgtccttatcctttttgcatttcccccaatcttttcattggaatgtgatttgaaaggaattagagtagtcctcctgtactaatttttattgctcactgcagggctacagggatgtttactctacacagtatgcctcttccctgatgcccttcatatctttttttttttttttgagatggagttttgctcttgttgcccaggctggagtgcaatggcaccgtcttggctcaccacaaactctgcctcctgggttcaagcaattctcctgcctcagcctcctgactagcttggactacaggcatgtgccaccacamccagctaatttttgtatttttagtagagatggtgattcaccatgttggccagtgtggtcttgatgtcttgacctcgtgatccacacacctcgacctcccaaagtgctgggatcacaggtgtgagccactgttcctggcctcttcatctcttttttttttcttttttttttttttgagacagggtctcactctgtcactcaggctggagtgcagtggcatgatcatggcttactacagcctcgacctcctgggctcaagtgatcctcctgcctcagcatcttgagtagctgggactacagatgca

SEQ ID NO: 61444 - DNA, 2229 bp, Homo sapiens
tgcattgtgttttagaagcaaccatgatttgaacatataacagattaattaaggttctggaataggagtttaaagagaatactatgggagtggaaggctgtgacagaaggtagagggaaaatatgaaattgaacacaacatggtttctgtcctagaaaggaaataaagaatcttagcagagggacaagcacagcatatccctatcccaaatgttccatggcctacctaaagtaactttacgtaactatgagatccctactatgtgccggctttaaagtattcctgattaactaagaccctaagactgagaacttctcctcaagaaactcattatctagatttgaataggaactttcaatgatgatatccaaggatcttgcatttgtcttaaaccactcttattagctttgcttaaagccaacttgaaatctgaaaagctagagtgaccttgggcaagttatttaatcgctccaagactccagatctgagaaatagaaatgatagcacctttgttggggtttgttaggattaaattacctaatacacaggagggatagcacaatgcctagtataaaataaacactcaatatagtggctctgctactgattttcacataattggacttttgttctttcccaaatattgcccaatagttttcaaatttccaaataactttgaattttccaaataactttgctcatcttattcctctttcacagtgaagtccattacttatatctgccaaacttgtacttaccctttaaagaccacaatgggctctcagatatggtaaacaaaatttaatgtacctctgccaataagaaatgaatatttattcttaaagcagctctaagataactttgaagaagctatcttgcttatttgttattaagatgtgacatcgacatctactcaggagaaaagggagaatttaccaaatgtttgaggtgtcccaataatgtaggggcactcaagaagacacaaccaaaatacctgatgctctaagaagtttcaattatacatactctatcaagatatcagctagttatgttatgaaatagaaattagggattaagtaaaatgatatttttgctagtattctctctcaaagaccaaacttttcttttgcaaaaagaaggccttctgtagaagtgagatgatgcttaggaatagtggctttggttgaatattaggattacaagaaactggagaaatggagagattaatgggtgaactaacatttattgattgactatgaagtgtcatgcataatttcactaaattctcagccttaaaacatggaaattatcatctctggtttcatatatttagaaactgaagttaatagaatataaaggtctgccaaggcttgttgtcagatctaggaatgagaagatttgaacctgtgtcagtaagactctgaacccatactttttgtactatctcatttcttcctcttgttttcaacaactcagaaatgaagaatcaatttctattctctgtccttatactatattttctttgtaccttcagagtaaaatgggatgtggctcacaggagggaaagaggaggtttaagtggcactgtgtgggtcagaagcactctcaaggtgtccttatcctttttgcatttcccccaatcttttcattggaatgtgatttgaaaggaattagagtagtcctcctgtactaatttttattgctcactgcagggctacagggatgtttactctacacagtatgcctcttccctgatgcccttcatatctttttttttttttttgagatggagttttgctcttgttgcccaggctggagtgcaatggcaccgtcttggctcaccacaaactctgcctcctgggttcaagcaattctcctgcctcagcctcctgactagcttggactacaggcatgtgccaccacacccagctaatttttgtatttttagtagagatggtgattcaccatgttggccagtgtggtcttgatgtcttgacctcgtgatccacacacctygacctcccaaagtgctgggatcacaggtgtgagccactgttcctggcctcttcatctcttttttttttcttttttttttttttgagacagggtctcactctgtcactcaggctggagtgcagtggcatgatcatggcttactacagcctcgacctcctgggctcaagtgatcctcctgcctcagcatcttgagtagctgggactacagatgca

SEQ ID NO: 61445 - DNA, 784 bp, Homo sapiens
tttcaaccccaaagaaaatggcctcttgagggaatagtggtttgggtgaataagagaaaatgatagtttgatgaaatacaacctctgaatggatgcctgccgcaaggctcgccaagtattgcttgctgtgacattacattcacttcctctgctttttttttttttttttttttaaaaagggaaagaaaaactaaaatctctactgaggacagggagctgaatgtgtctggcacaaaggacaagaaaggagcctctgagactgtccaaggtttcttaggaaagggaacagtaactgctgtcggatcacaaacacaacagtctcaggtacttctcctgcttccttaggaggcatgccagaccagcgctggccccctagccagcatccaaaccagactagccttcctggcctcacacagagctgtagggtgtcttggaaggagctattttgggtgaggtctattttggtttgtttacctatgtgcacactgaatgcagtcctgattggagagggatgggatgtcagactccctgtcccagacacaactaagagaaggtcatttcccctaagtcatgtttcagcttcccacagaccttcacattaagatacaaggtygcagctcatgacacggaaggaaacttccaaaagatgtaacaagagttatgaaactgacccagacccttattttagacaaattgtttttctgtcactttagcttcccagtaaataaaaactttacaagctgtgaatgtgtttgcttctcttaactggcatgcccaaattagt

SEQ ID NO: 61446 - DNA, 762 bp, Homo sapiens
tgctatattgcctaggctggtctcaaactccggagctcaagtgattcttccacctcagccttgcaaagtgctgggattacaggcgtgagccccagtatccagctggaatgtatgaatcataaatggtttttttaaagtactttttaaattgtgttaaatataccataaacttacattttaactatkttaagcgtacaattcaatggcattacgtacattcacaaagttgtgtgaccatcaccactatccattttcagaactttttcatcatcccaaacaaaaactctatatccattaagtaactctccatttttcccagcccctggtaaccatcataatgacttcttgaaaatatcaagtcagcttacatccctgatctaataaaccatgttgacaatcaccttcattacttgtgttctaatgtcactccttctcaaccctggctgcatagtgtaatcacccgctaaggtgaatgctcagggcaccacggctaaacaattcaatcaggattgctgtccctgggatctaagtatttgcagcttttaaatgctccccaagtgattctcatgaacatctaggtgagagccgctgttctatgccaactgttctcaattttcactgtgcctaagaatcatcagagaagcttgctaaaaacctagattcctggcctctttgccctataattctggctcagctggtgcaaacagggccctggattttacattttaaaaaaatatatcttggcaggtcacactttgagta

SEQ ID NO: 61447 - DNA, 1536 bp, Homo sapiens
aaacacataatgtacagctgcaaaatgggctgcaggtgacatgttttacagtctttagctgcttcttattagcagtaaattatataataccaacgctattgaagtcaggcagatacctctcttaaatgcttttatgcactttttgccctggtgtgtttttaaatcaacagaacatctaaatgataagcaactcaatggaaaactgtgacgtctaggacaagtagcggcaagttcttggttccacacttctcttttcctacgtggttaaatctgagaaaagcttagagcatattttccacccttttaagtaaagcaaattttgcaaaccgctccttttataagcttcagagcatccccaccatagaaaactccagactggatgaactgctggacttaaacaatatggattgtattatgctgttataactttaggacaacaaatgcagtatctaacaaactgcttttcagtatgcctatgccagtgatcactaaacaggatgcatagagaactacggggaggtccacatgggcagtaaggaaacagcaagtctccgtacyggacaggggatccaagactcatcctgctgatttatgtgggtgccatctaccagcctagtcctacccatcccctggagtcacatggcctaaaaaagaaccagccaaccaagctgacactccaatttgtacttgtgcctctgatccacacccaagctgttgtagaaaaccagacatagactttgataaacctatcaagctctattttaaattgggcaactattaagtttgtgggtggatgtgaatgaaagaatgatgacttatttcccaggtgtggctgcctgtgggaacaggcagctagatgtcctgagacttctctgtcttgtgccattgccaccatggaactggcaagatgatgaaagcctgggggcatgtaatcagattgtcctgtgagttatgggtacaggtaatactggtgaaattggtaagaaaaccattcctgtgggctactgtactgtaaatggtaatttttacagtctatctgcaatcttcataaaaaccttccaacagtttatatcagaaataacccaatttcagccagatgcagtggctcacacctacactcccaatactttgggaggccaagctgagaggaccatttgaggccaggagttaaagaccagcccaggctaatgaggccctttctctattaaaaaaaaaaaaaaattttttttaagtagccagatgtggtggcatatgcttgtatacccagctacttagggggctgaggtgggaggatggcttgagccatccatccaattgaggttgaagctgcagtgagccatgactttgccaccgttcacatcagtgcactgcagcctgggtgacaggctgagaccctgcctcaaagaaaaaaaaaaagaaaagaaaaaagaaataacctaatttgtatcacactgccacagtattctgctttattcacaacctcttattctctagtcccccagaagaatagccctcagacaagtaaaatagcaggaa

SEQ ID NO: 61448 - DNA, 925 bp, Homo sapiens
accatataaagactttcaaaaatgcattaggaaaatttaacaacttagggtccttaatgaaaggaccattaacagagatccaaggattgtgatgaaacaaaacaaaacaaaaaccccaagagaaactaatcttcttgaaatgctgttttatttaattaaccatggacactatttccacacccacacacacaaacacagcacagacatcaaaattccaggcaagaataccaaggaagaaggtggagtagggatgagggttcttatgagattgggtaggagaaggttgatagaaatatttaagtaattccagaccagtgtttctccaattttggcatgcgtcagaatcacttggaacacacaggttgtgtacccacccatagaatttctgattcattaggtctggggtgggacctgagaatctgcatttctaacagttcccaggtgatgctaaggctgctgctctggggtctatgctttgggaaccactcctgctgactttactggaaagactaagtatgtagkaaaaaaaaaaaaacctgagtgaccattaaaagaataggaactatgtatagcttaaaaccacaaaggaaaataaatggactatatatgtgtgaaccccaaatatctgagacaggtctcaataaatttagaaagtttattttgccaaggttaaggacacgtatctgtgacagcctcaggacatcctgatgacatgtgcccaaggtggtcggggcacagcttggttttatacattttcagggagacttgagacatcaatcaatatgtataaagatgtatattgttttggtccagaaaggtgggacaactcaaagcggggagggggcttccaggtcataggtaaataataagcaacaaatggttgcatttttttgagtttctgattagcctctccaaagtaagcaag

SEQ ID NO: 61449 - DNA, 925 bp, Homo sapiens
accatataaagactttcaaaaatgcattaggaaaatttaacaacttagggtccttaatgaaaggaccattaacagagatccaaggattgtgatgaaacaaaacaaaacaaaaaccccaagagaaactaatcttcttgaaatgctgttttatttaattaaccatggacactatttccacacccacacacacaaacacagcacagacatcaaaattccaggcaagaataccaaggaagaaggtggagtagggatgagggttcttatgagattgggtaggagaaggttgatagaaatatttaagtaattccagaccagtgtttctccaattttggcatgcgtcagaatcacttggaacacacaggttgtgtacccacccatagaatttctgattcattaggtctggggtgggacctgagaatctgcatttctaacagttcccaggtgatgctaaggctgctgctctggggtctatgctttgggaaccactcctgctgactttactggaaagactaagtatgtagtwaaaaaaaaaaaacctgagtgaccattaaaagaataggaactatgtatagcttaaaaccacaaaggaaaataaatggactatatatgtgtgaaccccaaatatctgagacaggtctcaataaatttagaaagtttattttgccaaggttaaggacacgtatctgtgacagcctcaggacatcctgatgacatgtgcccaaggtggtcggggcacagcttggttttatacattttcagggagacttgagacatcaatcaatatgtataaagatgtatattgttttggtccagaaaggtgggacaactcaaagcggggagggggcttccaggtcataggtaaataataagcaacaaatggttgcatttttttgagtttctgattagcctctccaaagtaagcaag

SEQ ID NO: 61450 - DNA, 857 bp, Homo sapiens
ttttaaacaagctttccaggtgattctatgtcctttaatgtttgattatttatttatttattgagatggagttttgatctgtcaccaggctggagtgctgtggcacgatctcagctcagtgcatcctctgtctcccagattcaagcaattctcctgcctcagcctcccaaatagctgggattacagrcatgcactaccatgcctagctaattttcttatttttagaagagatggggtttcaccatcttgtccaggctggtctcaaactcctgacctcggtaatccgcccaccttggcctcccaaagtgctgggattacaggcgtgagccaccgtgcccggcctaatgtttgacaatttagattagttggagtattacccccttttccaggcttattgagatatagttggtgtattagtctgttctcacacttctttatagaaagaactacctgaggctggataatgtatttttaaaaagtggtttaattggctcacggttccacacactatacaggaaacatggctggggtgccctccgaaaacttacaatcatggcgaaggcagacgggaagcagcaagtcctatgtggctggagcaggaggaagagagagaatggggcagggggagcgggggtggtgccacacatttaaacaatcatatctcatgagacctcacttactgtcacgagtagaacaagggggaaatcctcccccatgatccaatcacctcccaccaggccctacctccaacactggggattacaactggacatgagatttgggcaaggacacaaatccaaacgatatcaattggtgtacaaaaaagttgctttggtatacaaaactgcacataattg

SEQ ID NO: 61451 - DNA, 857 bp, Homo sapiens
ttttaaacaagctttccaggtgattctatgtcctttaatgtttgattatttatttatttattgagatggagttttgatctgtcaccaggctggagtgctgtggcacgatctcagctcagtgcatcctctgtctcccagattcaagcaattctcctgcctcagcctcccaaatagctgggattacaggcatgcactaccatgcctagctaattttcttatttttagaagagatggggtttcaccatcttgtccaggctggtctcaaactcctgacctcggtaatccgcccaccttggcctcccaaagtgctgggattacaggcgtgagccaccgtgcccggcctaatgtttgacaatttagattagttggagtattacccccttttccaggcttattgagatatagttggtgtattagtctgttctcacacttctttatagaaagaactacctgaggctggataatgtatttttaaaaagtggtttaattggctcacggttccacacactatacaggaaacatggctggggtgccctccgaaaacttacaatcatggcgaaggcaracgggaagcagcaagtcctatgtggctggagcaggaggaagagagagaatggggcagggggagcgggggtggtgccacacatttaaacaatcatatctcatgagacctcacttactgtcacgagtagaacaagggggaaatcctcccccatgatccaatcacctcccaccaggccctacctccaacactggggattacaactggacatgagatttgggcaaggacacaaatccaaacgatatcaattggtgtacaaaaaagttgctttggtatacaaaactgcacataattg

SEQ ID NO: 61452 - DNA, 857 bp, Homo sapiens
ttttaaacaagctttccaggtgattctatgtcctttaatgtttgattatttatttatttattgagatggagttttgatctgtcaccaggctggagtgctgtggcacgatctcagctcagtgcatcctctgtctcccagattcaagcaattctcctgcctcagcctcccaaatagctgggattacaggcatgcactaccatgcctagctaattttcttatttttagaagagatggggtttcaccatcttgtccaggctggtctcaaactcctgacctcggtaatccgcccaccttggcctcccaaagtgctgggattacaggcgtgagccaccgtgcccggcctaatgtttgacaatttagattagttggagtattacccccttttccaggcttattgagatatagttggtgtattagtctgttctcacacttctttatagaaagaactacctgaggctggataatgtatttttaaaaagtggtttaattggctcacggttccacacactatacaggaaacatggctggggtgccctccgaaaacttacaatcatggcgaaggcagasgggaagcagcaagtcctatgtggctggagcaggaggaagagagagaatggggcagggggagcgggggtggtgccacacatttaaacaatcatatctcatgagacctcacttactgtcacgagtagaacaagggggaaatcctcccccatgatccaatcacctcccaccaggccctacctccaacactggggattacaactggacatgagatttgggcaaggacacaaatccaaacgatatcaattggtgtacaaaaaagttgctttggtatacaaaactgcacataattg

SEQ ID NO: 61453 - DNA, 857 bp, Homo sapiens
ttttaaacaagctttccaggtgattctatgtcctttaatgtttgattatttatttatttattgagatggagttttgatctgtcaccaggctggagtgctgtggcacgatctcagctcagtgcatcctctgtctcccagattcaagcaattctcctgcctcagcctcccaaatagctgggattacaggcatgcactaccatgcctagctaattttcttatttttagaagagatggggtttcaccatcttgtccaggctggtctcaaactcctgacctcggtaatccgcccaccttggcctcccaaagtgctgggattacaggcgtgagccaccgtgcccggcctaatgtttgacaatttagattagttggagtattacccccttttccaggcttattgagatatagttggtgtattagtctgttctcacacttctttatagaaagaactacctgaggctggataatgtatttttaaaaagtggtttaattggctcacggttccacacactatacaggaaacatggctggggtgccctccgaaaacttacaatcatggcgaaggcagacgggaagcagcaagtcctatrtggctggagcaggaggaagagagagaatggggcagggggagcgggggtggtgccacacatttaaacaatcatatctcatgagacctcacttactgtcacgagtagaacaagggggaaatcctcccccatgatccaatcacctcccaccaggccctacctccaacactggggattacaactggacatgagatttgggcaaggacacaaatccaaacgatatcaattggtgtacaaaaaagttgctttggtatacaaaactgcacataattg

SEQ ID NO: 61454 - DNA, 857 bp, Homo sapiens
ttttaaacaagctttccaggtgattctatgtcctttaatgtttgattatttatttatttattgagatggagttttgatctgtcaccaggctggagtgctgtggcacgatctcagctcagtgcatcctctgtctcccagattcaagcaattctcctgcctcagcctcccaaatagctgggattacaggcatgcactaccatgcctagctaattttcttatttttagaagagatggggtttcaccatcttgtccaggctggtctcaaactcctgacctcggtaatccgcccaccttggcctcccaaagtgctgggattacaggcgtgagccaccgtgcccggcctaatgtttgacaatttagattagttggagtattacccccttttccaggcttattgagatatagttggtgtattagtctgttctcacacttctttatagaaagaactacctgaggctggataatgtatttttaaaaagtggtttaattggctcacggttccacacactatacaggaaacatggctggggtgccctccgaaaacttacaatcatggcgaaggcagacgggaagcagcaagtcctatgtggctggagcaggaggaagagagagaatggggcagggggagcgggggtggtgccacacatttaaacaatcakatctcatgagacctcacttactgtcacgagtagaacaagggggaaatcctcccccatgatccaatcacctcccaccaggccctacctccaacactggggattacaactggacatgagatttgggcaaggacacaaatccaaacgatatcaattggtgtacaaaaaagttgctttggtatacaaaactgcacataattg

SEQ ID NO: 61455 - DNA, 661 bp, Homo sapiens
tgagccatcaggtagggcaggaacggaagagaaagggcaggtgtggcaggccatccgtctccctgagcccagtgcaaacagtgggctctgcctgggacgaggccagagagggcagccctggccctgcaggtgaggctctgccctcctcctcacccacccccaccgaagtgagtcactagcaagcatagccctcccagcgctgtctcagtggctgcctggkgaggccccatggcctctcctgtgggctctttctctgggcagcaacagcccaggggcccaaaccctaggtgacagggtctgatcctgctttcccacccaagaaaataacaaatgctggttcccagtcatgcactgggggccctctggggtgcagagtccccagctcccctgaagacaagagccacacctggcccctcgcctcaaccacagagtcagaatgtggagcaggaggttttattgtaaagaggccgattgtacagagcaaagattgttctgacacggggggctgggtggtgggacccagaggccagagctgggtgaaggatgaggggtggcatcgccccatccaggcagtgggcagggcagggaggactaaacggctgcctcccagttcccttccctgcccctcattactgggtaagagggagccaggctatttcca

SEQ ID NO: 61456 - DNA, 727 bp, Homo sapiens
ccaggacaaggaaaattcttagaaacttctcttcatgaaattgaatttgtcttgcttccaattctttctaacatctcaagcccttttgatgtggccacattaaagactgaagaagaaacaatgaaaaccttagggtagcaaatactagaccctttcttctccaaatgagcccattcactgttgtccattctttttgtgacctctcttgtactgagcatttatcatccaaagcttgttaatatttgagagccacttttttaccgtatattagtctttaacaaaaatcatattagcaatttaatcccatctctaagacatcttttaaaggttttgttaaaggatttgtttgcagcctgctcactggagatggctcttaaggattaacaatcaccattcaggaactgtgatgagtcagtaaatcagactttttctctctgctcagaagcaagtaagcatcagctggggataggtaagttaaatgatatccttcccctagccactgcttcacttactgatcttgtttgaatatttgcccacaacattttccctggatgcctctgaaaagattttaaataatgaagcttttctctgagccatctggcagcttcttggaaagcagcagtgcaagatgtccctactaacagagattaatgagattcccagaggaacctttcaaaactgatcattgacaacaagatgctcactgygggccaaacttgcttttagg

SEQ ID NO: 61457 - DNA, 386 bp, Homo sapiens
taacaaaatcaactctatgtttctgacatcttgtggtactctgggtctgaattgcccttattgtgagaatccrttcatcagagaactttaagtataatggtagcactgccattcgcatttttctcaatgcttttgtgaaggttgtgtccaaggaacctctttgggaatggatgtgcgaggtgaatgtcttaaatctaccacactatttctctctctaagtcttcagaatcctttctctacgttattccagggaacttttgatacatcagcctcattcaatatagggcattgctgaatccaaatttcaatcaacaaactgagtcaaatgacaaagccacttttagctaagtgaaatcacacattacttctgcaaactctaatatgta

SEQ ID NO: 61458 - DNA, 627 bp, Homo sapiens
ttacccttagcatttattgatacatattatctagtttctgctgatatagattagaaaattcttgcaaactttttggagaatatttcctcttatgtagacattgtactactgatcccactaaagcatactgggatctgaccctggtgtgtttagcgacaatgaacgayggttatagtaggtcatgacaagaaagagcaccccttgcaagacaactgccccagccaaggttacagcagggtcttcaaagaaggaaacattggcttcttcagacatagaatagcaggcctcttccacagacaaggaaagctctaagtaactcagggttacaagattttcagctgcatgtcagtccaaccagatattctttttccatatctcagggtcgcactccttcctaaacaaagctctattttgtacatgagcaacttgtgaggctgaaaagtaaaactttcttttttattttacaatatataaaatcaaactgggtgtgattttcaatgaggtcagttccaagcttgcaataaaaaagagagtcttttaggaccacccataaaactccctgattctgtgatcttgattgagctgagactgaagaaaggagctcatcaggttttcttctgcaagctc

SEQ ID NO: 61459 - DNA, 627 bp, Homo sapiens
ttacccttagcatttattgatacatattatctagtttctgctgatatagattagaaaattcttgcaaactttttggagaatatttcctcttatgtagacattgtactactgatcccactaaagcatactgggatctgaccctggtgtgtttagcgacaatgaacgacggttatagtaggtcatgacaagaaagagcaccccttgcaagacaactgccccagccaaggttacagcagggtcttcaaagaaggaaacattggcttcttcagacatagaatagcaggcctcttccacagacaaggaaagctctaagtaactcagggttacaagattttcagctgcatgtcagtccaaccagatattctttttccawatctcagggtcgcactccttcctaaacaaagctctattttgtacatgagcaacttgtgaggctgaaaagtaaaactttcttttttattttacaatatataaaatcaaactgggtgtgattttcaatgaggtcagttccaagcttgcaataaaaaagagagtcttttaggaccacccataaaactccctgattctgtgatcttgattgagctgagactgaagaaaggagctcatcaggttttcttctgcaagctc

SEQ ID NO: 61460 - DNA, 663 bp, Homo sapiens
cctgaagatcactgttactttgttctctttcaaggtgcactgatttcatattgttcaaacacacatgttttacaatcagttgtacagataacataatagtggtcctaaggtgacatacattctcagcttgtgaagataacaggattaagagattaaagtaaagacaggcataagaaattataaaagtattaattttgggaactgataaatgtccatattaaaatgaaatcttcacaatttatgttcagagatcgcaataaagacaggcgtaagaaattataaaagtattaattttgggaactgataaatgtccatattaaaatgaaatcttcacaatttatgttcagagattgcaataaagacaggtgtaagaaattataaaagtattaatttggggaactgatatacgtccatactgaaatgaaatcttcacaatttatgttcctttgccacagctccagccagcccctctgtttgggctccctgacttcccacaacagctaattgcaatacccaatctaaagattaagaattcagactccagaaacagtgcctgagttygaatcttggctattaaaattgctgctaaatatccttgctataattatggctcctcatcagaaaacaacaatagcatatttcctatcagattatgttacagtt

SEQ ID NO: 61461 - DNA, 1670 bp, Homo sapiens
ttcaacctggtttacattgaaaatgttaataaataatcatgctggggacctagcctagattattttaatcagaatatgaaacctcagagcctgaggttaaaaaatatttttaatgtgatttaggtgattattatgtgcatccagggttaagaactaactagtctagatgttataatgcacctgggaggctcttaagatattttgggttaggtcatatagcaggccattttgaaatcatgaatagcaatggagactccatctatttttttttttttttaccccaagagtgttttaagacaaacaccaaagaagattcattgtaagaaagcaaaggtattctttcttgtacaggaagaaagagttgttatcgtcatgaccttgaataatcttttatagatgggtgtgggagtatgatttattttctcaaactcagagaagtaaaagcatctgtgtactgatctaaaagaatgtgtggaaaacataggatgaggagaagaattactacatagcttggatcagaaatgtcaaggcgggcagacgtgggatggtggaaaaggagtgtgtcatgaatacatcctaagtgggcccctccttcacatttgttagcatcatttataataggatgaataatagtgttaagatgtatgctccatgatgtgcccctttatccagacaaatacaaagcagctccaataaaggtattaaccaaggtcagcatatgcaaactagagatagggtgctagtgatttcagccccagtcccagtgggagggcaattcatagaaataactgcctcagttccccaactttattctgaagatggagacttataaacaaggcattgattcttccaatcgttatrcctattaattctatttcctagggtcactttctagaagggcattaaattaagggactgatgttatgtgcagaaataggggctgtggctagagaaggatgctttgaccaatttaaacacgtaaaaatataaccaaattatgtcaaaggccaccaagctcaagaaagccttactgtgaaacagccaccataatatcatttatattattatgtaaacataatttacataattatacaaattatataattatatgttataattatataattatataaatataatcctcaagttaaaggaaacactcaaattgttagtgttagtgaactaaagaccagtctccatagatattggtgatagatattagtgtaaactgtctactttgttctgaaaaagaatatcttcattatgttaaccaaaactatcaaggatcctagaatttttctctaacagcatcaaaatagtggcctaattcatgataatgtgtaaggaaccatgacgtggtaaaaagaatgtagatttttgactcagaattgtttgaattcaattttggtttctactaacaatctattcttgggcaagtaacttagtgtattagaacctaatactttttatctgtgaaatgagaataatatttaccatttaggtttattctgaggcttatagatagtatctgtgaagcagcaagtacaatatatctagaaattattccatcgataatgatcattattctattatattttcattgttggaagtcaactcactctcctaacatcttgtcaaggacctgtgctttcatatcctggaactcagcc

SEQ ID NO: 61462 - DNA, 1670 bp, Homo sapiens
ttcaacctggtttacattgaaaatgttaataaataatcatgctggggacctagcctagattattttaatcagaatatgaaacctcagagcctgaggttaaaaaatatttttaatgtgatttaggtgattattatgtgcatccagggttaagaactaactagtctagatgttataatgcacctgggaggctcttaagatattttgggttaggtcatatagcaggccattttgaaatcatgaatagcaatggagactccatctatttttttttttttttaccccaagagtgttttaagacaaacaccaaagaagattcattgtaagaaagcaaaggtattctttcttgtacaggaagaaagagttgttatcgtcatgaccttgaataatcttttatagatgggtgtgggagtatgatttattttctcaaactcagagaagtaaaagcatctgtgtactgatctaaaagaatgtgtggaaaacataggatgaggagaagaattactacatagcttggatcagaaatgtcaaggcgggcagacgtgggatggtggaaaaggagtgtgtcatgaatacatcctaagtgggcccctccttcacatttgttagcatcatttataataggatgaataatagtgttaagatgtatgctccatgatgtgcccctttatccagacaaatacaaagcagctccaataaaggtattaaccaaggtcagcatatgcaaactagagatagggtgctagtgatttcagccccagtcccagtgggagggcaattcatagaaataactgcctcagttccccaactttattctgaagatggagacttataaacaaggcattgattcttccaatcgttatgcctattaattctatttcctagggtcactttctagaagggcattaaattaagggactgatgttatgtgcagaaataggggctgtggctagagaaggatgctttgaccaatttaaacacgtaaaaatataaccaaattatgtcaaaggccaccaagctcaagaaagccttactgtgaaacagccaccataatatcatttatattattatgtaaayataatttacataattatacaaattatataattatatgttataattatataattatataaatataatcctcaagttaaaggaaacactcaaattgttagtgttagtgaactaaagaccagtctccatagatattggtgatagatattagtgtaaactgtctactttgttctgaaaaagaatatcttcattatgttaaccaaaactatcaaggatcctagaatttttctctaacagcatcaaaatagtggcctaattcatgataatgtgtaaggaaccatgacgtggtaaaaagaatgtagatttttgactcagaattgtttgaattcaattttggtttctactaacaatctattcttgggcaagtaacttagtgtattagaacctaatactttttatctgtgaaatgagaataatatttaccatttaggtttattctgaggcttatagatagtatctgtgaagcagcaagtacaatatatctagaaattattccatcgataatgatcattattctattatattttcattgttggaagtcaactcactctcctaacatcttgtcaaggacctgtgctttcatatcctggaactcagcc

SEQ ID NO: 61463 - DNA, 531 bp, Homo sapiens
attgtaaaatttgctagcagaagtccctctagatttattcctttatcctttcaacattgtccctgatattcttggaaaccgtattgctactatgtcactcagagtacagtatcatagagttggacaaagaaaggtggactgggggtgagagacaataaattggtaattggcasatatatccctatgttgtactgatccaaaatttgtattccattacatggcaaggtgtgcttgttccttttggtggataagagctttaaaacagcataaaatttaggcaatgggggacacggtaattttattataatagtgagcagaagtgctgctgttaggcagcaactctatcttagcagtgatagagctggaaaacatacttcaattttatgagtttacatttctcatttttgttcatcttataattcaactaattccaattaatgttttaaaattaagtatataggtggattatattaaccacatttccaacattttattatgaacattttcaagcataaagttgaaagaatatta

SEQ ID NO: 61464 - DNA, 531 bp, Homo sapiens
attgtaaaatttgctagcagaagtccctctagatttattcctttatcctttcaacattgtccctgatattcttggaaaccgtattgctactatgtcactcagagtacagtatcatagagttggacaaagaaaggtggactgggggtgagagacaataaattggtaattggcacatatatccctatgttgtactgatccaaaatttgtattccattacatggcaaggtgtgcttgttccttttggtggataagagctttaaaacagcataaaatttaggcaatgggggacacggtaattttattataatagtgagcagaagtgctgctgttaggcagcaactctatcttagcagtgatagagctggaaaacatacttcaattttatgagtttacatttctcatttttgttcatcttataattcaactaattccaattaatgttttaaaattaagtatataggtggattatattaaccacatttccaacattttattatgaacattttcaagcataaagttgaaagaatwtta

SEQ ID NO: 61465 - DNA, 696 bp, Homo sapiens
ggatgaggcagcgccggaagtatgacgctcatttctttaagccactagaagctcaccgtgagtccattcacagggccagagttccaagtgtgcggcgtgggcggggcctgcagaaagggacggggcctgcagaaagggacggggctggcaaaggcctggtctacctcaccgatccgggtcgcgggggctcctagggggttccttccacagctggtgcgcgtgcgcaagagtgcgtcgaggttgttccgcggcaatttatgaaactcggagccggcagtgagttgagggttcggcgaggtcagggattcctagttgcagcgtgattaccaacgccagctcccttcactgtccaagacagcgattccgcggctcctctgagaactggcgcttgtgagtgactgaacgggccactggagaggagcggtgctcacgggtatcgttctcgtcagcgggcggtggggacgcggggtcttggaattgggaatcacgcttgagggcgtccatgcggaacgtgcagctyacctcagcttgcttgcagttacccagtttccacgctgccctccaaggtctgtgccggaaaacctggaggagggcgcgagctgacgggagggatggaaacgtgggctgcggaagtaagacaagcgttgagagcagcgacagagggcgagggggtgggcggcgggacggctggggtca

SEQ ID NO: 61466 - DNA, 1382 bp, Homo sapiens
acagctcccactgtaagaaaacatctttcctcttttcctcaatttaacagctttttgctactaatacattttatttttagatataggaaacagtgacatacttcttacctgagtttcagactagatatgtaggttacagaaaatgcctcataatatcttaaaactgcttagtaggtaaaacctttactctgacctggcctcctaacarctgaactcaacctatgtttgagaattatccaacaactttccagatatgctgtaagtgaattccatcttataaaaaccgataagagtttttaaaacgtcaaagaaagtcttattccagacttcatttatttttcctacacctggattataatttgcttcctacaaatacagatctactttggcccttcatgcatcaagcttcagtcttggccaccctgaactgagtccagggcttataaaaacttctaatgcaaaacttactgtaactatttgttttgtctggttttgtcagaaacctatttcattgactttcattgaaaaataagatctttcttaaaacctgtcacacaatgtggagaacagtatgactgctaatcctttcactttcatcggccaaagaagagtcaccactcagatcaatagtgtgtggtagccagcaagcaccttgaaagaggaccatttccatgctcttctttctcagccttctgggctggtcactgagttgaagttctaaattgagggggagtcaccaacaaaaatcaaataatagtgagtctgccccagcactgcccccagttacattaaagaacatcccccactgtattattttctacgagagttcaaagatacaacgaatctattgcagcacttaaatattagaagtgttaaatatttataattctgaatctgctcttattcccaccaccagcagatttaggagatggagacacagagaactacacaatgagaaatcttcctggggagatgggaggaatgagaagtcctaccaggatgaaatcagcttgattctacagatgcttgctaccccatatcatgaaagtagatttaagccggtcctatgaatagcaaatccaggctgtaagagtctacttggatagacaaaagcctcaattataaaaacaaaacaagacaaaacaattcaaagcttacctgagagtctgtagtttacactctgggtgtttcaaggcctcacacaatgactttactccattatcccctatatcactcccttttaggtcaagatgcatcagattcttgttatgaatcaaagaagtagagatatcctgacaaccatcagggaaagtgataaatttcaaccttcagaagaaaaatatgcaggaggtattacaaaaccatttctctccttggttaca

SEQ ID NO: 61467 - DNA, 1382 bp, Homo sapiens
acagctcccactgtaagaaaacatctttcctcttttcctcaatttaacagctttttgctactaatacattttatttttagatataggaaacagtgacatacttcttacctgagtttcagactagatatgtaggttacagaaaatgcctcataatatcttaaaactgcttagtaggtaaaacctttactctgacctggcctcctaacaactgaactcaacctatgtttgagaattatccaacaactttccagatatgctgtaagtgaattccatcttataaaaacygataagagtttttaaaacgtcaaagaaagtcttattccagacttcatttatttttcctacacctggattataatttgcttcctacaaatacagatctactttggcccttcatgcatcaagcttcagtcttggccaccctgaactgagtccagggcttataaaaacttctaatgcaaaacttactgtaactatttgttttgtctggttttgtcagaaacctatttcattgactttcattgaaaaataagatctttcttaaaacctgtcacacaatgtggagaacagtatgactgctaatcctttcactttcatcggccaaagaagagtcaccactcagatcaatagtgtgtggtagccagcaagcaccttgaaagaggaccatttccatgctcttctttctcagccttctgggctggtcactgagttgaagttctaaattgagggggagtcaccaacaaaaatcaaataatagtgagtctgccccagcactgcccccagttacattaaagaacatcccccactgtattattttctacgagagttcaaagatacaacgaatctattgcagcacttaaatattagaagtgttaaatatttataattctgaatctgctcttattcccaccaccagcagatttaggagatggagacacagagaactacacaatgagaaatcttcctggggagatgggaggaatgagaagtcctaccaggatgaaatcagcttgattctacagatgcttgctaccccatatcatgaaagtagatttaagccggtcctatgaatagcaaatccaggctgtaagagtctacttggatagacaaaagcctcaattataaaaacaaaacaagacaaaacaattcaaagcttacctgagagtctgtagtttacactctgggtgtttcaaggcctcacacaatgactttactccattatcccctatatcactcccttttaggtcaagatgcatcagattcttgttatgaatcaaagaagtagagatatcctgacaaccatcagggaaagtgataaatttcaaccttcagaagaaaaatatgcaggaggtattacaaaaccatttctctccttggttaca

SEQ ID NO: 61468 - DNA, 1382 bp, Homo sapiens
acagctcccactgtaagaaaacatctttcctcttttcctcaatttaacagctttttgctactaatacattttatttttagatataggaaacagtgacatacttcttacctgagtttcagactagatatgtaggttacagaaaatgcctcataatatcttaaaactgcttagtaggtaaaacctttactctgacctggcctcctaacaactgaactcaacctatgtttgagaattatccaacaactttccagatatgctgtaagtgaattccatcttataaaaaccgataagagtttttaaaaygtcaaagaaagtcttattccagacttcatttatttttcctacacctggattataatttgcttcctacaaatacagatctactttggcccttcatgcatcaagcttcagtcttggccaccctgaactgagtccagggcttataaaaacttctaatgcaaaacttactgtaactatttgttttgtctggttttgtcagaaacctatttcattgactttcattgaaaaataagatctttcttaaaacctgtcacacaatgtggagaacagtatgactgctaatcctttcactttcatcggccaaagaagagtcaccactcagatcaatagtgtgtggtagccagcaagcaccttgaaagaggaccatttccatgctcttctttctcagccttctgggctggtcactgagttgaagttctaaattgagggggagtcaccaacaaaaatcaaataatagtgagtctgccccagcactgcccccagttacattaaagaacatcccccactgtattattttctacgagagttcaaagatacaacgaatctattgcagcacttaaatattagaagtgttaaatatttataattctgaatctgctcttattcccaccaccagcagatttaggagatggagacacagagaactacacaatgagaaatcttcctggggagatgggaggaatgagaagtcctaccaggatgaaatcagcttgattctacagatgcttgctaccccatatcatgaaagtagatttaagccggtcctatgaatagcaaatccaggctgtaagagtctacttggatagacaaaagcctcaattataaaaacaaaacaagacaaaacaattcaaagcttacctgagagtctgtagtttacactctgggtgtttcaaggcctcacacaatgactttactccattatcccctatatcactcccttttaggtcaagatgcatcagattcttgttatgaatcaaagaagtagagatatcctgacaaccatcagggaaagtgataaatttcaaccttcagaagaaaaatatgcaggaggtattacaaaaccatttctctccttggttaca

SEQ ID NO: 61469 - DNA, 1382 bp, Homo sapiens
acagctcccactgtaagaaaacatctttcctcttttcctcaatttaacagctttttgctactaatacattttatttttagatataggaaacagtgacatacttcttacctgagtttcagactagatatgtaggttacagaaaatgcctcataatatcttaaaactgcttagtaggtaaaacctttactctgacctggcctcctaacaactgaactcaacctatgtttgagaattatccaacaactttccagatatgctgtaagtgaattccatcttataaaaaccgataagagtttttaaaacgtcaaagaaagtcttattccagacttcatttatttttcctacacctggattataatttgcttcctacaaatacagatctactttggcccttcatgcatcaagcttcagtcttggccaccctgaactgagtccagggcttataaaaacttctaatgcaaaacttactgtaactatttgttttgtctggttttgtcagaaacctatttcattgactttcattgaaaaawaagatctttcttaaaacctgtcacacaatgtggagaacagtatgactgctaatcctttcactttcatcggccaaagaagagtcaccactcagatcaatagtgtgtggtagccagcaagcaccttgaaagaggaccatttccatgctcttctttctcagccttctgggctggtcactgagttgaagttctaaattgagggggagtcaccaacaaaaatcaaataatagtgagtctgccccagcactgcccccagttacattaaagaacatcccccactgtattattttctacgagagttcaaagatacaacgaatctattgcagcacttaaatattagaagtgttaaatatttataattctgaatctgctcttattcccaccaccagcagatttaggagatggagacacagagaactacacaatgagaaatcttcctggggagatgggaggaatgagaagtcctaccaggatgaaatcagcttgattctacagatgcttgctaccccatatcatgaaagtagatttaagccggtcctatgaatagcaaatccaggctgtaagagtctacttggatagacaaaagcctcaattataaaaacaaaacaagacaaaacaattcaaagcttacctgagagtctgtagtttacactctgggtgtttcaaggcctcacacaatgactttactccattatcccctatatcactcccttttaggtcaagatgcatcagattcttgttatgaatcaaagaagtagagatatcctgacaaccatcagggaaagtgataaatttcaaccttcagaagaaaaatatgcaggaggtattacaaaaccatttctctccttggttaca

SEQ ID NO: 61470 - DNA, 1382 bp, Homo sapiens
acagctcccactgtaagaaaacatctttcctcttttcctcaatttaacagctttttgctactaatacattttatttttagatataggaaacagtgacatacttcttacctgagtttcagactagatatgtaggttacagaaaatgcctcataatatcttaaaactgcttagtaggtaaaacctttactctgacctggcctcctaacaactgaactcaacctatgtttgagaattatccaacaactttccagatatgctgtaagtgaattccatcttataaaaaccgataagagtttttaaaacgtcaaagaaagtcttattccagacttcatttatttttcctacacctggattataatttgcttcctacaaatacagatctactttggcccttcatgcatcaagcttcagtcttggccaccctgaactgagtccagggcttataaaaacttctaatgcaaaacttactgtaactatttgttttgtctggttttgtcagaaacctatttcattgactttcattgaaaaataagatctttcttaaaacctgtcacacaatgtggagaacagtatgactgctaatcctttcactttcatcggccaaagaagagtcaccactcagatcaatagtgtgtggtagccagcaagcaccttgaaagaggaccatttccatgctcttctttctcagccttctgggctggtcactgagttgaagttctaaattgagggggagtcaccaacaaaaatcaaataatagtgagtctgccccagcactgcccccagttacattaaagaacatcccccactgtattattttctacgagagttcaaagatacaacgaatctattgcagcacttaaatattagaagtgttaaatatttataattctgaatctgctcttattcccaccaccagcagatttaggagatggagacacagagaactacacaatgagaaatcttcctggggagatgggaggaatgagaagtcctaccaggatgaaatcagcttgattctacagatgcttgctaccccatatcatgaaagtagatttaagccggtcctatgaatagcaaatccaggctgtaagagtctacttggatagacaaaagcctcaattataaaaacaaaacaagacaaaacaattcaaagcttacctgagagtctgtagtttacactctgggtgtttcaaggcytcacacaatgactttactccattatcccctatatcactcccttttaggtcaagatgcatcagattcttgttatgaatcaaagaagtagagatatcctgacaaccatcagggaaagtgataaatttcaaccttcagaagaaaaatatgcaggaggtattacaaaaccatttctctccttggttaca

SEQ ID NO: 61471 - DNA, 1382 bp, Homo sapiens
acagctcccactgtaagaaaacatctttcctcttttcctcaatttaacagctttttgctactaatacattttatttttagatataggaaacagtgacatacttcttacctgagtttcagactagatatgtaggttacagaaaatgcctcataatatcttaaaactgcttagtaggtaaaacctttactctgacctggcctcctaacaactgaactcaacctatgtttgagaattatccaacaactttccagatatgctgtaagtgaattccatcttataaaaaccgataagagtttttaaaacgtcaaagaaagtcttattccagacttcatttatttttcctacacctggattataatttgcttcctacaaatacagatctactttggcccttcatgcatcaagcttcagtcttggccaccctgaactgagtccagggcttataaaaacttctaatgcaaaacttactgtaactatttgttttgtctggttttgtcagaaacctatttcattgactttcattgaaaaataagatctttcttaaaacctgtcacacaatgtggagaacagtatgactgctaatcctttcactttcatcggccaaagaagagtcaccactcagatcaatagtgtgtggtagccagcaagcaccttgaaagaggaccatttccatgctcttctttctcagccttctgggctggtcactgagttgaagttctaaattgagggggagtcaccaacaaaaatcaaataatagtgagtctgccccagcactgcccccagttacattaaagaacatcccccactgtattattttctacgagagttcaaagatacaacgaatctattgcagcacttaaatattagaagtgttaaatatttataattctgaatctgctcttattcccaccaccagcagatttaggagatggagacacagagaactacacaatgagaaatcttcctggggagatgggaggaatgagaagtcctaccaggatgaaatcagcttgattctacagatgcttgctaccccatatcatgaaagtagatttaagccggtcctatgaatagcaaatccaggctgtaagagtctacttggatagacaaaagcctcaattataaaaacaaaacaagacaaaacaattcaaagcttacctgagagtctgtagtttacactctgggtgtttcaaggcctcacacaatgactttactccattatcccctatatcactcccttttaggtcaagatgcatcagattcttgttatgaatcaaagaagtagagatatcctgacaaccatcagggaaagtgataaatttcaaccttcagaagaaaaatatgcaggaggtattacaaaaycatttctctccttggttaca

SEQ ID NO: 61472 - DNA, 1126 bp, Homo sapiens
gaaaaataggggtcacaggtgcatctgtggctgttttttctgtagcggatctgaagaggtttagtatttatacattttcctttaaaaaggggacgtgtcagtgaaattaatgattatatagttttcagactttagtgcccagtaaatctacattttatataaggtgaacatttgaagaaaaaaggaataaagtaagcagatgtctcaggagtgaaggaataattaatctttgtctttttggtgcacctggggaagataagctagttgttgacattattggtgtggagccttttgaaagggctggtttctgtttagcctgtagggaagaaagcctaagggtagttaactaaggggagggagtaatgtggtgtgtctgacctcccgtctctcctgacatgaatgggaactcagcttccaaggtttttccagggttccgttggccaactggggatccattcagtcagttggggactttggattttattatttctcaagcctaatagcactatcacgaaatttaaagatgaatgtcacttaygactatgcaaagacctagtattaaaatttttgaaaatttcaacatttaattaaaatatactatgattattgtgacttagaagtgcaagagtgggctgataggaggaatattataatttatcacattaattggatgatgcagaaaaaccaattatctcaatttacattgaaaaggcgtttaataaaattcagtctctttgtgaggtagttttataacatgatgaggaatgtttatcttaaactgatagcaatacgcttagaagcattagcatttaaatattaaaaacatgcctggtggtataactgagcctatattacaaaaatcattatgtgttcattttacttattatttgtctttgttcttttcttcctccatgcaagtaagcatggagtatacagtcattttgagggaatatagtcactagtaattgtttaacttcatatcctaaattctggggcacctgcagaattaatgactcattttcttttaaagaacaatgatccttaggtcatgcagacctccttgatgcacgccagaagtttgatcaccctagagatgcagatagctttgatcatcgggatctcccct

SEQ ID NO: 61473 - DNA, 1615 bp, Homo sapiens
tgctaacttgagcccagatttccgaccagcagaaactgggatgatacatgttgtttgtcttaagctgctatgtttggggataatttgctatgcagtggcaagtaactaaaayggattggtttatgtgtttcagttatatgaacagtttataaacagatcagtgtatcaacccattttactgactgaatgactgtgtgattgggattttaggaaaaaaatcttaaaatctgaccagattttggacagaatttcatttggaccagaatgatgttccactggcaatgatctgactaagaacaatcatttcaactaactcctttaaatattgcaatgaaattcctcacaaatcttcagtgactctttcagaaatgattcttcaaggaagaatatttttctcttaggtctttgaaattaatatttttaaatgatctaagatattaatactaggctactttttaggctctcaataatacatagggttggcatagttaagatgagctaatttgtgtatgttcaaggatgctagccaagctatacatttagtaatattaaaatagtttagtaggaaaaagtattaatatttttaaatgatcttagataatgcattttacattctttttccctctccccaaagagatttggaaatgtttcatatttgtcaaatatatctcaatataaaaaagcatggctgctctaattagatacatttgttttaaggcaatttttctttattagtatagttaatacagttttcaaattaaaaataaaaaattgctatttctccaatgtctaacttaatttcaagagaatattcaggaagtgtacactgagaaatgttatgaaattttatgtataaaataaaataaaactcatttagcacatgttgtctctttggagcaggaatgatcttttgagataaaataaggtggtgtaaataagcacacattgcaaactataatgctggtgccacataaatacaaacacaatactgtttattattttcaacattccagatgcactacttataacctataggtgtctgaggcttgaaaaagtggaaaattgggtttgctgtttctcaaatttacttgataattgatatttcaaacacctttttaaaggctacttttaaagctctcaaaaaaacatagggttggcatagttaagatgagctaacttgtgtatgttcaaggatgctagccaagctatacatttagtaatattagaagagtttagtaggaaaaagcatgctaattagcatgatcccacatttctagaataaacatggaacgttattaggatatttcacaactgaggtattttccttttattacatattttgtggatttgatagaatttcaagaacttggattgtatcttggtatagcgctaaggggttcggagagaatatacacacaccacaaatatatttgctcagtactaaatgtacgcagatcaccctgtgctgggtcctctgaggtggggacagataggagataaaaagacctgtccctgtctttgagtatctgacaatataaaaatggacaaattaaattagtctatgccaaacaactgggaaatgatataacattgcaattagtctgaataaatgaga

SEQ ID NO: 61474 - DNA, 1615 bp, Homo sapiens
tgctaacttgagcccagatttccgaccagcagaaactgggatgatacatgttgtttgtcttaagctgctatgtttggggataatttgctatgcagtggcaagtaactaaaacggatyggtttatgtgtttcagttatatgaacagtttataaacagatcagtgtatcaacccattttactgactgaatgactgtgtgattgggattttaggaaaaaaatcttaaaatctgaccagattttggacagaatttcatttggaccagaatgatgttccactggcaatgatctgactaagaacaatcatttcaactaactcctttaaatattgcaatgaaattcctcacaaatcttcagtgactctttcagaaatgattcttcaaggaagaatatttttctcttaggtctttgaaattaatatttttaaatgatctaagatattaatactaggctactttttaggctctcaataatacatagggttggcatagttaagatgagctaatttgtgtatgttcaaggatgctagccaagctatacatttagtaatattaaaatagtttagtaggaaaaagtattaatatttttaaatgatcttagataatgcattttacattctttttccctctccccaaagagatttggaaatgtttcatatttgtcaaatatatctcaatataaaaaagcatggctgctctaattagatacatttgttttaaggcaatttttctttattagtatagttaatacagttttcaaattaaaaataaaaaattgctatttctccaatgtctaacttaatttcaagagaatattcaggaagtgtacactgagaaatgttatgaaattttatgtataaaataaaataaaactcatttagcacatgttgtctctttggagcaggaatgatcttttgagataaaataaggtggtgtaaataagcacacattgcaaactataatgctggtgccacataaatacaaacacaatactgtttattattttcaacattccagatgcactacttataacctataggtgtctgaggcttgaaaaagtggaaaattgggtttgctgtttctcaaatttacttgataattgatatttcaaacacctttttaaaggctacttttaaagctctcaaaaaaacatagggttggcatagttaagatgagctaacttgtgtatgttcaaggatgctagccaagctatacatttagtaatattagaagagtttagtaggaaaaagcatgctaattagcatgatcccacatttctagaataaacatggaacgttattaggatatttcacaactgaggtattttccttttattacatattttgtggatttgatagaatttcaagaacttggattgtatcttggtatagcgctaaggggttcggagagaatatacacacaccacaaatatatttgctcagtactaaatgtacgcagatcaccctgtgctgggtcctctgaggtggggacagataggagataaaaagacctgtccctgtctttgagtatctgacaatataaaaatggacaaattaaattagtctatgccaaacaactgggaaatgatataacattgcaattagtctgaataaatgaga

SEQ ID NO: 61475 - DNA, 1615 bp, Homo sapiens
tgctaacttgagcccagatttccgaccagcagaaactgggatgatacatgttgtttgtcttaagctgctatgtttggggataatttgctatgcagtggcaagtaactaaaacggattggtttatgtgtttcagttatatgaacagtttataaacagatcagtgtatcaacccattttactgactgaatgactgtgtgattgggattttaggaaaaaaatcttaaaatctgaccagattttggacagaatttcatttggaccagaatgatgttccactggcaatgatctgactaagaacaatcatttcaactaactcctttaaatattgcaatgaaattcctcacaaatcttcagtgactctttcagaaatgattcttcaaggaagaatatttttctcttagstctttgaaattaatatttttaaatgatctaagatattaatactaggctactttttaggctctcaataatacatagggttggcatagttaagatgagctaatttgtgtatgttcaaggatgctagccaagctatacatttagtaatattaaaatagtttagtaggaaaaagtattaatatttttaaatgatcttagataatgcattttacattctttttccctctccccaaagagatttggaaatgtttcatatttgtcaaatatatctcaatataaaaaagcatggctgctctaattagatacatttgttttaaggcaatttttctttattagtatagttaatacagttttcaaattaaaaataaaaaattgctatttctccaatgtctaacttaatttcaagagaatattcaggaagtgtacactgagaaatgttatgaaattttatgtataaaataaaataaaactcatttagcacatgttgtctctttggagcaggaatgatcttttgagataaaataaggtggtgtaaataagcacacattgcaaactataatgctggtgccacataaatacaaacacaatactgtttattattttcaacattccagatgcactacttataacctataggtgtctgaggcttgaaaaagtggaaaattgggtttgctgtttctcaaatttacttgataattgatatttcaaacacctttttaaaggctacttttaaagctctcaaaaaaacatagggttggcatagttaagatgagctaacttgtgtatgttcaaggatgctagccaagctatacatttagtaatattagaagagtttagtaggaaaaagcatgctaattagcatgatcccacatttctagaataaacatggaacgttattaggatatttcacaactgaggtattttccttttattacatattttgtggatttgatagaatttcaagaacttggattgtatcttggtatagcgctaaggggttcggagagaatatacacacaccacaaatatatttgctcagtactaaatgtacgcagatcaccctgtgctgggtcctctgaggtggggacagataggagataaaaagacctgtccctgtctttgagtatctgacaatataaaaatggacaaattaaattagtctatgccaaacaactgggaaatgatataacattgcaattagtctgaataaatgaga

SEQ ID NO: 61476 - DNA, 745 bp, Homo sapiens
ggatcctctttgccatcttctgtgaggttggaaccatgcagagtcctgcattttcctccatctacccctaagtccttgtgttaattatgatctgtgttggcttttatcacctttgtggaaagagaagagccaccaataatgaagactgagtaaatgagccagtgaaacagagacggggatgtgcaccccccaggctcctggatgattattgacggacacgtgtcagctgctaaatgttatttaaaacttgttcttgccatcctatcatcatttgctgtcctcctgaatatggaaatacaatgattagaaggctgttttaccatcctgagatatgtgcaccattgattttgtaatttgttgctaccttctacttatagtaaatggtccatgatacataaaagaaatttatgtcagagcttttcacagtgaataaatattaggaagaaaatacatttagacaatagaaggaagcagtgtaatgggagatcctgcagtcatgtatgtgtsgtttattttctcccaatattttttatagtagctgtgtgaatatcttactttttacggtgctcaattccacattggcctgatatttgacatattttaaggcacagtgggagaaggaaccaatcctgacctttctctaggcacttttctgatgtcagtagatgaactgaataattaatatctgacttcttctggaacttatttgaggtggcttacagaatcctcccctggcttcctattg

SEQ ID NO: 61477 - DNA, 1455 bp, Homo sapiens
ttatatttgtgaggttcattcatgctgtgcatgtagtcagaggttgtgatttgcatggctatatggcattctgttacatggaatacaccactctggtagacagaccaatgacaccccatgaagatgtccgtatcccattccctggtacctgtgactatgttagcttccctgacaaaggagactaaggttacaggtgaataaagatagtaagattactcatcaattgcctctctgcagccaatcatttctctgatgctatttgtttttccattatactggattatgtgaaaattctgatactaggctaatagctgtttaacatggatctaatgaatagattccattctaggccagctatagtttaaaaatactacagctttctttttgagtaatttgatacctaaaatagtgaagacctcaggaagagcccatcctctttgagacccgtgaacattctgccgtgccaactgtcttggctggcatttgcttccccttaaattagcttcctcctgtcacagaggggcccatactacaaggctggtggatgatgacaaatttgattcttgaaaatctgttaaggtaattgcaaaattccactcagtttccctgggaaaataactctacctgctagtagaatcaccagccttttcaaagaaaatgtatacatcaaattagcaaattagttattttaaaattgtaaaccaaaggccaggtgtggtggttcatgcctgtaattccagcactttgagaggctgaggtgggcggatcccttgagtccaggagttcaagatcagcctggccaacatggcgaaacccagtctctgctaaaaatacaaaaattagctggacacggtggtggacgcctgtaatccgygttacttgggaggctgaggcagggagaaatgtttgaacccaggaggcagagattgtagtgagccaagatcacgccactgcactccagcctggatgacagtgagactccatctgaaaaaataacataaaaataaaataaaactaaattaaattgtaaaccaagagtgttgttggaatttccacctagtcttcgagtgtaagtgtagctagaatatgccgcagacacaggagcatacccctcaggaaccagggagcaggcgctggatgaagcatcaatgcttgctgtacattcggcttttgtttttgagtttcagaaacccactcaaattagtttaagtaaaatggaaaatgaaatatctcctaaaggctgggcactgtggcaaatgcctgtaatcccagaactttgggaggccaaggagggtggatcacaaggtcaggagatcgagaccatcctggctgacacggtgaaaccccgtctcgactaaaaaaatacaaaaaaattagccgggcgtggtggcgggagcctgtagtcccagctactcaggaggctgagtcaggagaacggcgtgaacccaggaggcg

SEQ ID NO: 61478 - DNA, 1455 bp, Homo sapiens
ttatatttgtgaggttcattcatgctgtgcatgtagtcagaggttgtgatttgcatggctatatggcattctgttacatggaatacaccactctggtagacagaccaatgacaccccatgaagatgtccgtatcccattccctggtacctgtgactatgttagcttccctgacaaaggagactaaggttacaggtgaataaagatagtaagattactcatcaattgcctctctgcagccaatcatttctctgatgctatttgtttttccattatactggattatgtgaaaattctgatactaggctaatagctgtttaacatggatctaatgaatagattccattctaggccagctatagtttaaaaatactacagctttctttttgagtaatttgatacctaaaatagtgaagacctcaggaagagcccatcctctttgagacccgtgaacattctgccgtgccaactgtcttggctggcatttgcttccccttaaattagcttcctcctgtcacagaggggcccatactacaaggctggtggatgatgacaaatttgattcttgaaaatctgttaaggtaattgcaaaattccactcagtttccctgggaaaataactctacctgctagtagaatcaccagccttttcaaagaaaatgtatacatcaaattagcaaattagttattttaaaattgtaaaccaaaggccaggtgtggtggttcatgcctgtaattccagcactttgagaggctgaggtgggcggatcccttgagtccaggagttcaagatcagcctggccaacatggcgaaacccagtctctgctaaaaatacaaaaattagctggacacggtggtggacgcctgtaatccgtgttacttgggaggctgaggcagggagaaatgtttgaacccaggaggcagagaytgtagtgagccaagatcacgccactgcactccagcctggatgacagtgagactccatctgaaaaaataacataaaaataaaataaaactaaattaaattgtaaaccaagagtgttgttggaatttccacctagtcttcgagtgtaagtgtagctagaatatgccgcagacacaggagcatacccctcaggaaccagggagcaggcgctggatgaagcatcaatgcttgctgtacattcggcttttgtttttgagtttcagaaacccactcaaattagtttaagtaaaatggaaaatgaaatatctcctaaaggctgggcactgtggcaaatgcctgtaatcccagaactttgggaggccaaggagggtggatcacaaggtcaggagatcgagaccatcctggctgacacggtgaaaccccgtctcgactaaaaaaatacaaaaaaattagccgggcgtggtggcgggagcctgtagtcccagctactcaggaggctgagtcaggagaacggcgtgaacccaggaggcg

SEQ ID NO: 61479 - DNA, 1455 bp, Homo sapiens
ttatatttgtgaggttcattcatgctgtgcatgtagtcagaggttgtgatttgcatggctatatggcattctgttacatggaatacaccactctggtagacagaccaatgacaccccatgaagatgtccgtatcccattccctggtacctgtgactatgttagcttccctgacaaaggagactaaggttacaggtgaataaagatagtaagattactcatcaattgcctctctgcagccaatcatttctctgatgctatttgtttttccattatactggattatgtgaaaattctgatactaggctaatagctgtttaacatggatctaatgaatagattccattctaggccagctatagtttaaaaatactacagctttctttttgagtaatttgatacctaaaatagtgaagacctcaggaagagcccatcctctttgagacccgtgaacattctgccgtgccaactgtcttggctggcatttgcttccccttaaattagcttcctcctgtcacagaggggcccatactacaaggctggtggatgatgacaaatttgattcttgaaaatctgttaaggtaattgcaaaattccactcagtttccctgggaaaataactctacctgctagtagaatcaccagccttttcaaagaaaatgtatacatcaaattagcaaattagttattttaaaattgtaaaccaaaggccaggtgtggtggttcatgcctgtaattccagcactttgagaggctgaggtgggcggatcccttgagtccaggagttcaagatcagcctggccaacatggcgaaacccagtctctgctaaaaatacaaaaattagctggacacggtggtggacgcctgtaatccgtgttacttgggaggctgaggcagggagaaatgtttgaacccaggaggcagagattgtagtgagccaagatcacgccactgcactccagcctggatgacagtgagactccatctgaaaaaataacataaaaataaaataaaactaaattaaattgtaaaccaagagtgttgttggaatttccacctagtcttcgagtgtaagtgtagctagaatatgccgcagacacaggagcatacccctcaggaaccagggagcaggcgctggatgaagcatcaatgcttgctgtacattcggcttttgtttttgagtttcagaaacccactcaaattagtttaagtaaaatggaaaatgaaatatctcctaaaggctgggcactgtggyaaatgcctgtaatcccagaactttgggaggccaaggagggtggatcacaaggtcaggagatcgagaccatcctggctgacacggtgaaaccccgtctcgactaaaaaaatacaaaaaaattagccgggcgtggtggcgggagcctgtagtcccagctactcaggaggctgagtcaggagaacggcgtgaacccaggaggcg

SEQ ID NO: 61480 - DNA, 2495 bp, Homo sapiens
ccaccaattgctagttacttttcatgtgcaatatatctagtgctttgcatttaaaatatgccactcatctcattttcctgtgtacctatgcgattcttcaagctgaaaatattacagaaatggaaaaaaattgcattggtagctaggactaggaagatgattccttttttgttttttttttcaaactgatataacaataacaaattattttttctaactctctcaacaattagataaaatgccagttatttactcatagtatcatagatcagctgattttatatgttgtttacttttgcttgacaataatgcatttttaaaaaggcttttgaagaccatgcgtatgttaaaaatttaaataatgttatggcatcttatggtactgtagattcattaacaattgagctaacaaatctcattactaagtgtaatttatatatgctgtttggttttgaagagtacattaatccctgattgtataaatatcacaaagaatccctacatagtaatagattttaatttctgaaacaaagagtatacacaatgaatgtagtaaatttaatttttctcctatcatcttcttttagttttaaataactagcaatagaaacagtgttctattatttattttatttctatctataatttacttgtatttatgtatgttctgataacaaatagcatacaacatacacatatcttaagacagtcaacatcaatattatggtcataaaatattaatctgtaatctccagtatccacactgcagtctagaaataccatttcccactaaatgaaacccagattctctctgtaaatggctaattccatgtctgtgataggcaatatctgagcccaaaggtcaaagtttattaggaccatgtcaaaatgactcagaagccatcttggagaggctcccactggccaagaataaaacaattggagcattgataaaactaataactgcaaaagattgaagctcatcgactatgcataagttcttgaacttaaaatgatacttaaaaaacaaacagatttggaggtttatttactattctttctactttaacattttctattaacatttacagttcaagaagttttaaaaacatcatgcagctataacgtaaataaaggtctgttgcacctgtctttcatttcatcccttttgggcttctgcagtaatttgtgtttatagaattaatctgatatttcrgttgcaggctattagtgattgtgttttcaccatgtttctccaataatcactgggccacaagctccaattctgaaatttttcgctgcaaagtcaggagctgggagcctatgaactcacagcagccaaatgaaggtcttcagtccagatgtagatacactgcctctcatgaagagtgatttttcctttggctcttaagcaataaggtgtgtatggcaagttataagaagaatcaaaaatgattagaaagctgacattaattcctactgccagtttctttcaggaaacatgagtcaaatgcaaatattttagttggaccatatttataatctagaactgtactgctaatatgtagcctctagccacatgtttccattaatattaaaattaattaaaattaaataacattaaaaatttagctcctcatttatactagacacatttcaagttctcagtaaccacatatagctggtgggtactgtgttggatgctgtgggtatagaatatttccaatactgtagaaagttcttttggacagcactatctacgaggttatattaagtgattatgtttcatttggaatgtcttagtttacaccacagcctatctttcacctggaaaaatcacccttctcaggccatggctatggaagagaacaccaaaggtggtgagcagacctccagaccttcctcttgccaataatgtcttcagtgttaaagatattatcttaaagataaagaagacaaccactgtgggacaaaataggaaatctttaaatagttaaaaacaaattccagcataacccaaatgtcacaagaccttaaaaaagaatgcaggcttatattgtagcaggagcctcagtaatcgtcatcagaatcaatggattaaaaagtaggagtttgaatgccatggaaatgccaaagcctcttctggtttttaggttttgttaaaactcatgatatttttaaaaagtacgcaacatgataactacatccttttctttgggattatgagaactgcacacagccctttagcatatcaaggaaatactacacatagagacggtgaggaaatgtaaaagaaattatgtgcattctgcttaaagtagatcagtaactcatttgcatgagaatatgcttagaaaaggtaggtgtttccaaaaagagaaatgataggtacaagaagcaaaactcaaaaaaaaaaacacaacaaaacaacaaaaccaatagacattttatgcattaaaaaatatttacaatgtacgggatgctctgctagatat

SEQ ID NO: 61481 - DNA, 2495 bp, Homo sapiens
ccaccaattgctagttacttttcatgtgcaatatatctagtgctttgcatttaaaatatgccactcatctcattttcctgtgtacctatgcgattcttcaagctgaaaatattacagaaatggaaaaaaattgcattggtagctaggactaggaagatgattccttttttgttttttttttcaaactgatataacaataacaaattattttttctaactctctcaacaattagataaaatgccagttatttactcatagtatcatagatcagctgattttatatgttgtttacttttgcttgacaataatgcatttttaaaaaggcttttgaagaccatgcgtatgttaaaaatttaaataatgttatggcatcttatggtactgtagattcattaacaattgagctaacaaatctcattactaagtgtaatttatatatgctgtttggttttgaagagtacattaatccctgattgtataaatatcacaaagaatccctacatagtaatagattttaatttctgaaacaaagagtatacacaatgaatgtagtaaatttaatttttctcctatcatcttcttttagttttaaataactagcaatagaaacagtgttctattatttattttatttctatctataatttacttgtatttatgtatgttctgataacaaatagcatacaacatacacatatcttaagacagtcaacatcaatattatggtcataaaatattaatctgtaatctccagtatccacactgcagtctagaaataccatttcccactaaatgaaacccagattctctctgtaaatggctaattccatgtctgtgataggcaatatctgagcccaaaggtcaaagtttattaggaccatgtcaaaatgactcagaagccatcttggagaggctcccactggccaagaataaaacaattggagcattgataaaactaataactgcaaaagattgaagctcatcgactatgcataagttcttgaacttaaaatgatacttaaaaaacaaacagatttggaggtttatttactattctttctactttaacattttctattaacatttacagttcaagaagttttaaaaacatcatgcagctataacgtaaataaaggtctgttgcacctgtctttcatttcatcccttttgggcttctgcagtaatttgtgtttatagaattaatctgatatttcagttgcaggctattagtgattgtgttttcaccatgtttctccaataatcactgggccacaagctccaattctgaaatttttcgctgcaaagtcaggagctgggagcctatgaactcacagcagccaaatgaaggtcttcagtccagatgtagatacactgcctctcatgaagagtgatttttcctttggctcttaagcaataaggtgtgtatggcaagttataagaagaatcaaaaatgattagaaagctgacattaattcctactgccagtttctttcaggaaacatgagtcaaatgcaaatattttagttggaccatatttatartctagaactgtactgctaatatgtagcctctagccacatgtttccattaatattaaaattaattaaaattaaataacattaaaaatttagctcctcatttatactagacacatttcaagttctcagtaaccacatatagctggtgggtactgtgttggatgctgtgggtatagaatatttccaatactgtagaaagttcttttggacagcactatctacgaggttatattaagtgattatgtttcatttggaatgtcttagtttacaccacagcctatctttcacctggaaaaatcacccttctcaggccatggctatggaagagaacaccaaaggtggtgagcagacctccagaccttcctcttgccaataatgtcttcagtgttaaagatattatcttaaagataaagaagacaaccactgtgggacaaaataggaaatctttaaatagttaaaaacaaattccagcataacccaaatgtcacaagaccttaaaaaagaatgcaggcttatattgtagcaggagcctcagtaatcgtcatcagaatcaatggattaaaaagtaggagtttgaatgccatggaaatgccaaagcctcttctggtttttaggttttgttaaaactcatgatatttttaaaaagtacgcaacatgataactacatccttttctttgggattatgagaactgcacacagccctttagcatatcaaggaaatactacacatagagacggtgaggaaatgtaaaagaaattatgtgcattctgcttaaagtagatcagtaactcatttgcatgagaatatgcttagaaaaggtaggtgtttccaaaaagagaaatgataggtacaagaagcaaaactcaaaaaaaaaaacacaacaaaacaacaaaaccaatagacattttatgcattaaaaaatatttacaatgtacgggatgctctgctagatat

SEQ ID NO: 61482 - DNA, 2272 bp, Homo sapiens
aagtttatgatgcatcttttatattcatttccacttttaaattataatattttccctctcaccctagaacagcttaatacactgcagggaacactttcccttgatgatgaaaacaatatttttaaggtaagtggggctaatagtttaagtataaccagaggactcattaaagaatgtgttcaatgtcccagtacctggaatctcacttctaaaccactactatttgtgcttcagtttaaaatactgttgattgataatttctggagggaaataaagcatttgtgtaaggttaataaaaatcagttagtaactcctgctagctaacccctacaaagcttcaaatgatgacattatcttggtgaagttagatgatccagaatctgagctttgagacttacagcctctgaaacccgatttgtcattacatagagagaagtattattctctcaaagtcagatttatattaactgggcatatcaagattgttatataaattgccaatatyagttgatcaatttttaaaaagaaatgtagttatcatttgccctggaataattgtgtatcaggaatcagcacattctttccctccgtgaagacctacaggtgaaaccaaattataagcagaagattgtagcatgatcatagaatctgtataaagagattaaatttattccaatgtcaggctaagattacctgacacagtggtgattctccactctggctatgtctctgggactattggagtctacgaaattttcagaagcttgggatccatttcagacctacgattagggcaagacatttgtatttgttttctcttaaaaaccatatgtgattctcttggttatcagggttgagataattggtctgaagcatttgtctccactacaggaatgattttgcaatggtgccatattattcaaagtccactgggcaagattctctccctcttggatagtatgtagaatcacagcaccaacatttgctttgtacgtaagtaagtaagtagtcacagggacaatcagttctctctttagataggtttatgcatctagacaaatgcatactctggccagattcctttcaatttttggtaactttctccatctctgctctcatccggcttgcctggaacatacaattaaatcttcagaaaatattgtttctttctttgcaagctttgagagacccctgttattttaatcccacgttccactttgtcaaccaagaaaaatcagtgggcaaaagatatttttccagctaagtaagtttatgcaaagataagatattccacggaagtatgtacttgttttcataaggaccacatccagaggctttcggcccttccccatgttgtagctagatcatctttcttttaaacataaggttttttttgtttgttttttgttttgtctaaactctgaaaactacttccaaggcagcaggaagtacgatctgtgcactgcttacttctctcatcgcatccctctccctcatctcctcagtcatgcttcagccatttttgaactttgttcagttccttgaatgtgcaattcttacattttctctgcctagaacactatcatcctcttcttcatccattagctcttctcttcctttggttcctcaatgtcacttgctctgtgaggccttccctgatttcctcacttgatttagaaatcttaaccatgtactctcatggtacccttgatctccatggtcaaaactcatatcatgtttcttaaaattgctcagtgacttgccattgcttttaggataaagtccaaatttagcctactatttaatcaacagtccacctcttggggtcttattcctctgtcctctggaccattctttctcaaggatgctttattttagccattcgtggttacttcttagccatctattaagtatctttattattgggtcgatacattagaaagatatcttggctttttatgttggatccatattgcgattagaattaagcatatgttctttgcaaatcattatagacaaaagagtagagaggtgtgatgttttcaaggtagatttagttaaaaaattttaagatattctctttctttactacttctgagtttaatttctggaggcaaccactcttgttaatcactgcgcccatgtgctacccatgtctatgtctttactgaattgaataagggggaaagaatctttttgtaagcatagagtcacagtcaatcacatttcccaggcttaattgagaggaagctagcatatcaatgtgtttgct

SEQ ID NO: 61483 - DNA, 2272 bp, Homo sapiens
aagtttatgatgcatcttttatattcatttccacttttaaattataatattttccctctcaccctagaacagcttaatacactgcagggaacactttcccttgatgatgaaaacaatatttttaaggtaagtggggctaatagtttaagtataaccagaggactcattaaagaatgtgttcaatgtcccagtacctggaatctcacttctaaaccactactatttgtgcttcagtttaaaatactgttgattgataatttctggagggaaataaagcatttgtgtaaggttaataaaaatcagttagtaactcctgctagctaacccctacaaagcttcaaatgatgacattatcttggtgaagttagatgatccagaatctgagctttgagacttacagcctctgaaacccgatttgtcattacatagagagaagtattattctctcaaagtcagatttatattaactgggcatatcaagattgttatataaattgccaatatcagttgatcaatttttaaaaagaaatgtagttatcatttgccctggaataattgtgtakcaggaatcagcacattctttccctccgtgaagacctacaggtgaaaccaaattataagcagaagattgtagcatgatcatagaatctgtataaagagattaaatttattccaatgtcaggctaagattacctgacacagtggtgattctccactctggctatgtctctgggactattggagtctacgaaattttcagaagcttgggatccatttcagacctacgattagggcaagacatttgtatttgttttctcttaaaaaccatatgtgattctcttggttatcagggttgagataattggtctgaagcatttgtctccactacaggaatgattttgcaatggtgccatattattcaaagtccactgggcaagattctctccctcttggatagtatgtagaatcacagcaccaacatttgctttgtacgtaagtaagtaagtagtcacagggacaatcagttctctctttagataggtttatgcatctagacaaatgcatactctggccagattcctttcaatttttggtaactttctccatctctgctctcatccggcttgcctggaacatacaattaaatcttcagaaaatattgtttctttctttgcaagctttgagagacccctgttattttaatcccacgttccactttgtcaaccaagaaaaatcagtgggcaaaagatatttttccagctaagtaagtttatgcaaagataagatattccacggaagtatgtacttgttttcataaggaccacatccagaggctttcggcccttccccatgttgtagctagatcatctttcttttaaacataaggttttttttgtttgttttttgttttgtctaaactctgaaaactacttccaaggcagcaggaagtacgatctgtgcactgcttacttctctcatcgcatccctctccctcatctcctcagtcatgcttcagccatttttgaactttgttcagttccttgaatgtgcaattcttacattttctctgcctagaacactatcatcctcttcttcatccattagctcttctcttcctttggttcctcaatgtcacttgctctgtgaggccttccctgatttcctcacttgatttagaaatcttaaccatgtactctcatggtacccttgatctccatggtcaaaactcatatcatgtttcttaaaattgctcagtgacttgccattgcttttaggataaagtccaaatttagcctactatttaatcaacagtccacctcttggggtcttattcctctgtcctctggaccattctttctcaaggatgctttattttagccattcgtggttacttcttagccatctattaagtatctttattattgggtcgatacattagaaagatatcttggctttttatgttggatccatattgcgattagaattaagcatatgttctttgcaaatcattatagacaaaagagtagagaggtgtgatgttttcaaggtagatttagttaaaaaattttaagatattctctttctttactacttctgagtttaatttctggaggcaaccactcttgttaatcactgcgcccatgtgctacccatgtctatgtctttactgaattgaataagggggaaagaatctttttgtaagcatagagtcacagtcaatcacatttcccaggcttaattgagaggaagctagcatatcaatgtgtttgct

SEQ ID NO: 61484 - DNA, 2272 bp, Homo sapiens
aagtttatgatgcatcttttatattcatttccacttttaaattataatattttccctctcaccctagaacagcttaatacactgcagggaacactttcccttgatgatgaaaacaatatttttaaggtaagtggggctaatagtttaagtataaccagaggactcattaaagaatgtgttcaatgtcccagtacctggaatctcacttctaaaccactactatttgtgcttcagtttaaaatactgttgattgataatttctggagggaaataaagcatttgtgtaaggttaataaaaatcagttagtaactcctgctagctaacccctacaaagcttcaaatgatgacattatcttggtgaagttagatgatccagaatctgagctttgagacttacagcctctgaaacccgatttgtcattacatagagagaagtattattctctcaaagtcagatttatattaactgggcatatcaagattgttatataaattgccaatatcagttgatcaatttttaaaaagaaatgtagttatcatttgccctggaataattgtgtatcaggaatcagcacattctttccctccgtgaagacctacaggtgaaaccaaattataagcagaagattgtagcatgatcatagaatctgtataaagagattaaatttattccaatgtcaggctaagattacctgacacagtggtgattctccactctggctatgtctctgggactattggagtctacraaattttcagaagcttgggatccatttcagacctacgattagggcaagacatttgtatttgttttctcttaaaaaccatatgtgattctcttggttatcagggttgagataattggtctgaagcatttgtctccactacaggaatgattttgcaatggtgccatattattcaaagtccactgggcaagattctctccctcttggatagtatgtagaatcacagcaccaacatttgctttgtacgtaagtaagtaagtagtcacagggacaatcagttctctctttagataggtttatgcatctagacaaatgcatactctggccagattcctttcaatttttggtaactttctccatctctgctctcatccggcttgcctggaacatacaattaaatcttcagaaaatattgtttctttctttgcaagctttgagagacccctgttattttaatcccacgttccactttgtcaaccaagaaaaatcagtgggcaaaagatatttttccagctaagtaagtttatgcaaagataagatattccacggaagtatgtacttgttttcataaggaccacatccagaggctttcggcccttccccatgttgtagctagatcatctttcttttaaacataaggttttttttgtttgttttttgttttgtctaaactctgaaaactacttccaaggcagcaggaagtacgatctgtgcactgcttacttctctcatcgcatccctctccctcatctcctcagtcatgcttcagccatttttgaactttgttcagttccttgaatgtgcaattcttacattttctctgcctagaacactatcatcctcttcttcatccattagctcttctcttcctttggttcctcaatgtcacttgctctgtgaggccttccctgatttcctcacttgatttagaaatcttaaccatgtactctcatggtacccttgatctccatggtcaaaactcatatcatgtttcttaaaattgctcagtgacttgccattgcttttaggataaagtccaaatttagcctactatttaatcaacagtccacctcttggggtcttattcctctgtcctctggaccattctttctcaaggatgctttattttagccattcgtggttacttcttagccatctattaagtatctttattattgggtcgatacattagaaagatatcttggctttttatgttggatccatattgcgattagaattaagcatatgttctttgcaaatcattatagacaaaagagtagagaggtgtgatgttttcaaggtagatttagttaaaaaattttaagatattctctttctttactacttctgagtttaatttctggaggcaaccactcttgttaatcactgcgcccatgtgctacccatgtctatgtctttactgaattgaataagggggaaagaatctttttgtaagcatagagtcacagtcaatcacatttcccaggcttaattgagaggaagctagcatatcaatgtgtttgct

SEQ ID NO: 61485 - DNA, 1101 bp, Homo sapiens
taaatactgtcagatagctctcctgaagcactgtgctaccaccactccccatcagcagtggatggtcctacatccctcatcttcatttatacttggcactttccagctttctaattaccaccagtataaaatgggtgatgcgacaactcatttgttttaattcattttttaaaattactaatatatgtgagcaaaacttcaaatacggatattttgggttttcttttccagaaattgcctgttcatgtcctttgcccaattctattcctgggtatatgttccaaatagattctcaaatgtgaacataaagagtagtgcctaagagtagtcattgctgttatttgtagtggcagggagctggagacagcatacaaatccttcacycagagaattaagtggtaaaggtggcgaattcatatcctgagatactgtgcagcagttctaagagatgaactagatatatgagtagtgcacagatgattcttaaaaatatagagatgtatgctaaaagaaacaatactattcatatgtaagttacacttctgtgcatgtaaaacacttgtgtgtgtgagcatgtgtatattttttaaagaatatattaaacacattacagtgattaatagaagcaggtagtgttggcagggaatagaggtaaagaaagggaaccaaaaagaataaagaagtaaattaaataagagaaaggaccttgcacagtctagtgatgataacatgtaaagaatggagaagtaaaagaaattcaatcctatgtacctgagatctgaaaataataacagttgttaataatcataaatataatgatataatgctttctatttctatggttttttgaatctttcaaagcattttatagctattttatttggtggtggaaatagagaagacatccttctccccggtgtagatagagagaaggaaaccagagtttgatttttccagggaagacgctaggacccaggagcttcccctgcgaacctgtcttttttctgctacagtggattggtcagctgctgtcaccaggctccctaaaggctagtgaaatttgaataaaacccttcatttatctttcttcatgttccttcc

SEQ ID NO: 61486 - DNA, 687 bp, Homo sapiens
  misc_feature (1)...(687): n = A,T,C or G
cnnnnnnnnnnnnnnnnnnnnnnnnnnnnnnnnnnnnnnnnnnnnnnnnnnnnnnnnnnnnnnnnnnnnnnnnnnnnnnnnnnnnnnnnnnnnnnnnnnnntttttttaaaaatttactaaaatgaacaaatagaaatattattttcatcttcagtgagccaaactgttaaacagccaaaagaatttaacatcttgattgcaatggactcttgggcaaccttggtgaaactgttcacacatacatcatgagccattaaaaatcataagtgatttataggaagtcgaattatccatgcttcctcagagcctaatactggacattctaagtagtttctattaaacttattgtctcaataattatttccaggcctgttgttttctatgaatcattaatttgtcatccatatagattattatgagatatcatactgtcctcatggttatattatactgaaaaattatatctttttctataaggttcattcagaaagatgaaatatttgattttagttttagtatctaggtagacaaaagtagtatattataatacattctttgttcttctttcttctaagtgctatattctgattgaacttgttttgttgaactaaaaatggagrgaagaaaatccaatttaaaaaatctactttagatgtgccccttccaggagaaggggttagattcaa

SEQ ID NO: 61487 - DNA, 570 bp, Homo sapiens
tagctctaataatcttatgaactagttactactgttatctcaattttatggaagagaaagctgacactcacagataaaaatttccgtgctttaagtcgcacaatgagtcactggtggagtgtgaatttgracatgggcatgtttgactccaaaaccttttgatttaaaccactacactcttagaagaaaataaagatgaattgttgcagattggtattttatgcagcacaaattctcagctgtactttgttacactacatttgccataaattcaacttccttagattgtactggtgagtgtgtaatgtagtgaacttatctagagaaacctaaaaagtgcttagagacctgggaattctattgttaaacaaaagtcactttcttttacagctgatcaccattatgatgtttggtatttaggaaaggatagttcccataatagaggctttgatgaaaaagcgaccgtgaaatggtggtgtacttgctctgaatgttatattggaaaaaatattttgagacacacatacattccttagatatgacatgtatcattccttatggtcttttttt

SEQ ID NO: 61488 - DNA, 1142 bp, Homo sapiens
tgagagcagagcttgagacctaattgcataacaagaagataatcctgttgaaatttcaccacaaacattttgtttgcttcctcagtggtgggctccttcctattttcaaaataataactacatttttccaaggcccaccatattgcacaactgctggtggactattcatattgcagtctatgaaaatggtgcccagaactgttcagcatacagtttgagcaatcattcacaacagycctggccaagggcttggccaactttgtctatggttctcagagacaaggcaatgatagtgtgtgtacatgtgtaggcatatatgtgtgtactttggtgtatctgatggccttatgcctacaatccctttatacagctatctttggatctcagtgcatctgcaaaatgagtctcagaggatcattttgtggaagtgactcaacagaatgctattggggctcctattttccttccacttagatataacaaagtagcataattcatatccttgaaaattaggcaaacagcaccagagtaagctggacaaggttaaagtgacttcaccaaatgagtgctcaagggctcttcccagagtgacttctaatttgaggtctaaaactggagttcccaaacctggcaaacttagctgactatcaaacagactgaggcaaaatattgggcaatacaacttaggaatctgtcatgtaacaagtttcctaggtcatctcaaagaagccagtgcatgaactgatattttagagtaatccattcatgtaggagatgacatggagctgtttgtggcaagcatttggtctcaattatgcaattcgatgctcttagcagtgtttagtcaatacttagagctttagatctgatcatcacagaaattaaatttgctcaaggctgtcttaattgagaatgaggggaaagggacagagagggtagtacacagagagtaggagatcccagataaacataccaggcttccttgggtcaggtccagatctacaaaggtattcacttgatgtatctccagcaagaatggtctgagtttctctacaaccgcaagatatcatttaatttttgtttcctcacttgtttggatatagccaagataatagaaaggcttattacactgatatatcctg

SEQ ID NO: 61489 - DNA, 1142 bp, Homo sapiens
tgagagcagagcttgagacctaattgcataacaagaagataatcctgttgaaatttcaccacaaacattttgtttgcttcctcagtggtgggctccttcctattttcaaaataataactacatttttccaaggcccaccatattgcacaactgctggtggactattcatattgcagtctatgaaaatggtgcccagaactgttcagcatacagtttgagcaatcattcacaacagtcctggccaagggcttggccaactttgtctatggttctcagagacaaggcaatgatagtgtgtgtacatgtgtaggcatatatgtgtgtactttggtrtatctgatggccttatgcctacaatccctttatacagctatctttggatctcagtgcatctgcaaaatgagtctcagaggatcattttgtggaagtgactcaacagaatgctattggggctcctattttccttccacttagatataacaaagtagcataattcatatccttgaaaattaggcaaacagcaccagagtaagctggacaaggttaaagtgacttcaccaaatgagtgctcaagggctcttcccagagtgacttctaatttgaggtctaaaactggagttcccaaacctggcaaacttagctgactatcaaacagactgaggcaaaatattgggcaatacaacttaggaatctgtcatgtaacaagtttcctaggtcatctcaaagaagccagtgcatgaactgatattttagagtaatccattcatgtaggagatgacatggagctgtttgtggcaagcatttggtctcaattatgcaattcgatgctcttagcagtgtttagtcaatacttagagctttagatctgatcatcacagaaattaaatttgctcaaggctgtcttaattgagaatgaggggaaagggacagagagggtagtacacagagagtaggagatcccagataaacataccaggcttccttgggtcaggtccagatctacaaaggtattcacttgatgtatctccagcaagaatggtctgagtttctctacaaccgcaagatatcatttaatttttgtttcctcacttgtttggatatagccaagataatagaaaggcttattacactgatatatcctg

SEQ ID NO: 61490 - DNA, 518 bp, Homo sapiens
ttttaagcgccacggtcaggtgccatttcttcttgcactggttggaaaacaggactccagtggtggaggttcattttagggcaaaagaaaaaaaagtctctgtctgcccttggcctgctttgctgaccctggttcctggtgggctgtcttcactttgaaaaagcttgttgggtctttgctgtctgtgttttcccatttgaaagaaacatgctaagaaacacacatacatgtatgtactcatgtgtacatgtttatgtatatgtgctgtgtgttttaattaacaaaataatacatggttgtaacaaattaaaagaaagcagaaacataaatggtgaaaaacaaaaactttcgcctttgggttctatagacacacaaacataaatatatacatttacatatacatatgtagaattttaaaactttaccaaataggatcaaatatgacacatttgatttttktttttttttacactttgtttttttatccttaatgtcatattgtggccatcttttcaagt

SEQ ID NO: 61491 - DNA, 984 bp, Homo sapiens
tgcttttaaatatccatttgcataaatggaagtgtgtttagggcaagctaatagcaaattattttgaaaagtatttatccttcctactttatctgaatgtgggtttcccagatacttgaacttcagtatggaaatgaagtaattaaaagaccttttaaagactttgaaggactgtgatttctcggatgcctaacgtatgttgagttcagggccaacacaagttcagagaaagactttttcaactatccctgaaatgtgggtggtagtagtaatgtttctaggtatcaaaggttttcttactgcttgaaaaaaataggtataaataagttggtaaggtccactagacacattattaaagagtgtgtatccttgagaaagaataaacataatgtatattatttcactcagcctcataacaactctgtgaaatcacaataatccttactcatgaggctttacagaggagaaaactttggcaaaggtcagctattaaatgataatgtcaaatggaatccaaattccctggaattcatagagatataaacacttaaagaacagagacttccattttagtctctctcygacctacccataaggggttagatttatcagatatccttggaaatggagtcctggttgagatcatgtacctgaattaattgaaaatttttggtacttacaaataaaaataaaacagaaggcttttcctttaaatttagggaatgagtttatgttttgtttttgttttttagacgaaacacttgctttatctctttgtatttatttatattctatattctgggtaggtaatgttacaggaaatatacatatttaagggagtctaaataaataactcaataaatttctgaataaacattattgtacataaaatatttattagacacatatttatgtcacagaccttgtaccaaacaagacatgaccttttgatgctatcagttggaaaaataatgttggtaacag

SEQ ID NO: 61492 - DNA, 992 bp, Homo sapiens
ttaaacaggagaaaaagtacttattcaattagataaacaaatatttattaattttttkgggggagtacttgaatatttacatgcagggcagggtgtcatcagaagagacatcatttctactcccatcaagcctacagttcagcaggacaaaagagacagcctgtgaagaggcttcaggcacaagagagctttacccgaaaaacttcaagtatgactggaacagactatgaagctaccccaaggaaaagccagaggggcatatatccttgaggtcctgttactgcttttagagaaagatctttaccctggaagctatggactttttaaaaaagacagcaagaaaatcagttagcaagcgaaatgcagtactacgcacagatggggactcaaactggccattatattccaaaatgcgtttcagaaacctacagattgatgtcctcatctccaacctctccagctgtctctatattgtcagttactttgtgctcccatttaccactctcctaaagctatctcctctttgaacatgtacctctgtatctgttttgcagagaaaatggagactgttaggaaggcaacttccatgtcagcttgctgttattgcagctagaaatctatcagaagccatgttactattaatactgaattcttttttttaccgctttagtggaaatggcatcagtttctctcttaaaagtctcattccacagccagagctctaaattcccatctaagcttaccctttttattacctctttttcctcttaaaataagcccttctacaatcccacatctctatttatcagttcttttacagtctcctgcttcttcattaacgaactcctttgctttccccctgtttactccatagtggaattagctttctagagacacaactttattgaaccattcgtatcaagtacaatgaatgtattcataagtgccttaatttcctgatatgatatgacctttacattgcacattctttt

SEQ ID NO: 61493 - DNA, 670 bp, Homo sapiens
ttataggtacatttcacatgaatacttgattcttttagctgcttcagaatagcttgagctaattctacatcaatctcatatcatcagtgtagcatcctgtgttattccagtgacacttggtaagaaccagtgtatctcctctagagccatctgctattaattttgaagctaagcctcccagaatttcactcatctggaacctaggggcaacacacacacacacacacacacacacacacacacacacacacagacaaacacacactcttttccaaatattggagtgttaaagtattaaactagtcatctataaagtagagtgtttcctgtgcagcaagtagaagtgtaattaattatacatgtactgtattttgaagtccatttggaagtacatgagttgactgatttgtcaagggtcttaaacacaatcattaatctaatcatttatctcctggaaatctgtttgagtgagacattattaaaaatgtttggtataagaaaatgtattgcagtgctactaatagaaaacataaatccaaaatatagtaatggtaacaataataacaaattattaatatttattgagctctatatgaytgacccacgtctatgccttgctctgtattatttaatcttgtcaacaacctaataagttaggttcaagtattat

SEQ ID NO: 61494 - DNA, 1391 bp, Homo sapiens
  misc_feature (1)...(1391): n = A,T,C or G
acactgcatgttctcactcataagcaggaggtgaacaatgagaacacatggacacagggaggggaacatcacacactggggcctgtcggggcttggggggctagggaagggatagcattgggaaaaatacctaatgtagatgacaggttgattggtgcagcaaaccaccatggcacatgtatacgtatataacaacctgcacgttctgcacttgtaccccagaacttaaagtataataaaaaaataaataaaataaaattccattttatagaaaatataatgcatcttaagaaaaaaagaaacaaaaaggaaaataaaaaatacacagattgggaaatacgaaacacatttttgttgttgttttgttttgtttttcttctacagaagtcatcgtttacgtaaaaaattccaaagaatcaacgcttcctttaaacctatagtatccaaaatacattggtatttgcaaaataataggcaaatagatcaaggggacaaaagaggtggcccagaaatagacccmcaccaatatagtcaactgatctttgacagaaatgcaaggccaattcaatgaagaaaggacagtcatttttttgaaaggaacaactagacatgtacagaaaaaaattaatctannnnnnnnnnnnnnnnnnnnnnnnnnnnnnnnnnnnnnnnnnnnnnnnnnnnnnnnnnnnnnnnnnnnnnnnnnnnnnnnnnnnnnnnnnnnnnnnnnnntttttagtagagacgggtttcaccgtgttagccaggatggtctcgatctcctgaccttgtgatccgcccgcctcggcctcccaaagtgctgggattacaggcttgagccaccgcacccgacctcaaccattttttaaacacattctttcttacttttagtttcaacaaaaataaaagcgtaatataatctagaatatcttttcttattttacttcacatttataatgtctctggaaatttgtagttttatttgtagtcaaatgttttattgtatttgtccagatacacagagtcacatggatgaaagaacccaagaaatcaaatagcatctggtgacattcaacagtcataatttagtgcattttcagaagctacctaagactcagatgttcatattggatgttatattatataaaatgaaatctcagctgttagtcttcttcctgaatactaggacagatggtccccaacttatgatttcttgactttatgagggtatgaaaatgataagcattcattagaaaccatacttcaatacactattcaataaattacatgaggtattcaaatgttagattattttgtccaactttaggctaatgtaactgttctgagcatatttatggtaggcttggtgaagctatgatattcagtagatt

SEQ ID NO: 61495 - DNA, 1137 bp, Homo sapiens
tgcaaaatctgagcccattataaagagacaccttgaggctgagatcaagtccttgttttcttttgcctttggcctttccatgcctttgcttctccactgccaaccctcctcttcctacaacacatacatctacagtctcctgtgaaactggacagcaagccgatagaaatgagtcaagtcaacctcagctgagggcttttggacctatgagagttaactagtctgagttcatcttactcattgagcctggtcaaaattccctaaatgccatatggcagcagtgagagtccagtgtggagcctgtgtattccctgaaagaatgaattgtgcagatctagttttttaaaaaaataaaaagaacaagaaagaaaacatcccaaatcacacagtagtatgaggcaaaatatctgattacagagtctaaaactgctttgtgtgtgtaatttttgagaagaaaaaaattacaagccagcagcaatgaagtgcttagtgcaagatttcagttttcaaccttgcagctattacatttcaatctaagcagaaggaagattctgctgatcctaagctaacgaatgtcaagaaggaaatggctgctttcttcttttagcaggtggttattgttttaaaaatgaagagccttaaacctggctggaatccaaggcatgtcacataatcttgatctggagatctgcagtgagactccccaacccccgaatatttgattagagcatatgwaaatcgtcctatgttcttggcatgggctgaaccaggaatgacaatgtagattatgatgttcttatataatcaaaggttattattactattttttccccaaaggaagtaaaacttgtttagtcaggggatctgatgctgcttggtatggcagataatttctgcctatatacaataaggaaataaacaatgaatggagcagttcatgacattttataaatataatttagatttcttgaaaaattaataacaatgctaacactgaaatatgtagtcattcaaagaactatcagcagttttctttattgaccccaatttctaaggactatcataactgaccataagccctgaatcagaaaattagatttttgataaaatatatagcaaacccatttagaaattgtg

SEQ ID NO: 61496 - DNA, 1137 bp, Homo sapiens
tgcaaaatctgagcccattataaagagacaccttgaggctgagatcaagtccttgttttcttttgcctttggcctttccatgcctttgcttctccactgccaaccctcctcttcctacaacacatacatctacagtctcctgtgaaactggacagcaagccgatagaaatgagtcaagtcaacctcagctgagggcttttggacctatgagagttaactagtctgagttcatcttactcattgagcctggtcaaaattccctaaatgccatatggcagcagtgagagtccagtgtggagcctgtgtattccctgaaagaatgaattgtgcagatctagttttttaaaaaaataaaaagaacaagaaagaaaacatcccaaatcacacagtagtatgaggcaaaatatctgattacagagtctaaaactgctttgtgtgtgtaatttttgagaagaaaaaaattacaagccagcagcaatgaagtgcttagtgcaagatttcagttttcaaccttgcagctattacatttcaatctaagcagaaggaagattctgctgatcctaagctaacgaatgtcaagaaggaaatggctgctttcttcttttagcaggtggttattgttttaaaaatgaagagccttaaacctggctggaatccaaggcatgtcacataatcttgatctggagatctgcagtgagactccccaacccccgaatatttgattagagcatatgaaaatcgtcctatgttcttggcatgggctgaaycaggaatgacaatgtagattatgatgttcttatataatcaaaggttattattactattttttccccaaaggaagtaaaacttgtttagtcaggggatctgatgctgcttggtatggcagataatttctgcctatatacaataaggaaataaacaatgaatggagcagttcatgacattttataaatataatttagatttcttgaaaaattaataacaatgctaacactgaaatatgtagtcattcaaagaactatcagcagttttctttattgaccccaatttctaaggactatcataactgaccataagccctgaatcagaaaattagatttttgataaaatatatagcaaacccatttagaaattgtg

SEQ ID NO: 61497 - DNA, 616 bp, Homo sapiens
ttccgaagtatataaaaatacatgtttattagagaaagacttataatgtacagggaaatataaatgcataaataaaaacaacctgatactccattattacaaaggtccttgttaacagtattttatccctgatatttgtacatttacaatctatgtgtttatttttttttattttcaaaacatgtgcagtactggctattcaatattctattcagtattttttctgtttgacattatactgtaagcctgtaatcccagcattttgggaggccgaggcaggcggatcacttgaggtcaggagttygagaccagcctggacaacatgctgaaaccatgcccctactaaaaaaaaaaaaaaaaaaaaaaaaaaaaaaattagctgggcatgtaatcccagctacttgggaggcagaggcaggagactcacttgagctcgggaggtggaggtttcagtgagccaagattgtgccgctgcactccagcctaggtgaaagagtgagacttcatcaaagaaaaaaaaaaagcattttatcatttcactaatattatttctaaatatatttttaaatctatagtatagatacattatattgtatttaccaatcctataagatca

SEQ ID NO: 61498 - DNA, 616 bp, Homo sapiens
ttccgaagtatataaaaatacatgtttattagagaaagacttataatgtacagggaaatataaatgcataaataaaaacaacctgatactccattattacaaaggtccttgttaacagtattttatccctgatatttgtacatttacaatctatgtgtttatttttttttattttcaaaacatgtgcagtactggctattcaatattctattcagtattttttctgtttgacattatactgtaagcctgtaatcccagcattttgggaggccgaggcaggcggatcacttgaggtcaggagtttgagaccagcctggacaacatgctgaaacyatgcccctactaaaaaaaaaaaaaaaaaaaaaaaaaaaaaaattagctgggcatgtaatcccagctacttgggaggcagaggcaggagactcacttgagctcgggaggtggaggtttcagtgagccaagattgtgccgctgcactccagcctaggtgaaagagtgagacttcatcaaagaaaaaaaaaaagcattttatcatttcactaatattatttctaaatatatttttaaatctatagtatagatacattatattgtatttaccaatcctataagatca

SEQ ID NO: 61499 - DNA, 616 bp, Homo sapiens
ttccgaagtatataaaaatacatgtttattagagaaagacttataatgtacagggaaatataaatgcataaataaaaacaacctgatactccattattacaaaggtccttgttaacagtattttatccctgatatttgtacatttacaatctatgtgtttatttttttttattttcaaaacatgtgcagtactggctattcaatattctattcagtattttttctgtttgacattatactgtaagcctgtaatcccagcattttgggaggccgaggcaggcggatcacttgaggtcaggagtttgagaccagcctggacaacatgctgaaaccatgcccctactaaaaaaaaaaaaaaaaaaaaaaaaaaaaaaattagctgggcatgtaatcccagctacttgggaggcagaggcaggagactcacttgagctcgggaggtggaggtttcagtgagccaagattgtgccrctgcactccagcctaggtgaaagagtgagacttcatcaaagaaaaaaaaaaagcattttatcatttcactaatattatttctaaatatatttttaaatctatagtatagatacattatattgtatttaccaatcctataagatca

SEQ ID NO: 61500 - DNA, 616 bp, Homo sapiens
ttccgaagtatataaaaatacatgtttattagagaaagacttataatgtacagggaaatataaatgcataaataaaaacaacctgatactccattattacaaaggtccttgttaacagtattttatccctgatatttgtacatttacaatctatgtgtttatttttttttattttcaaaacatgtgcagtactggctattcaatattctattcagtattttttctgtttgacattatactgtaagcctgtaatcccagcattttgggaggccgaggcaggcggatcacttgaggtcaggagtttgagaccagcctggacaacatgctgaaaccatgcccctactaaaaaaaaaaaaaaaaaaaaaaaaaaaaaaattagctgggcatgtaatcccagctacttgggaggcagaggcaggagactcacttgagctcgggaggtggaggtttcagtgagccaagattgtgccgctgcactccagcctaggtgaaagagtgagacttcatcaaagaaaaaaaaaaagcattttatcatttcactaatattatttctaaatatatttttaaatctrtagtatagatacattatattgtatttaccaatcctataagatca

SEQ ID NO: 61501 - DNA, 588 bp, Homo sapiens
acgttcagaaatgatggcaacactaactggaagtagaatgtaagaacaatgtactcaatttgattatcaaactgaatgacattaagatctgtttcttactagagttatacagcatggtaaaataatcagaacagtgtggccaacaaattggcttggctactctatgaaatagaaagaaaaattggcaaaatgtctttttcaaagacaattgggttcataagttagattttctgtagtggaaaaaaagcaattgcacagcttctagactatatgacaatctagcagaataatatgccttcactctctccctccttccttccctcccttcctgccttgctcccacccttccttcctttgctacagcatgaaaatcatagaggctaaaattatttggcttaattgcacaaagagggctctatgattttacttttatctttcagatttcagtcatttatatttagcacttatatayacttgatgtatttaatctccaaaagaaatagactatattcccacaactcctttctgacatttttaatgcattgttgcccataatttttcattccataagccacaagagagagacca

SEQ ID NO: 61502 - DNA, 588 bp, Homo sapiens
acgttcagaaatgatggcaacactaactggaagtagaatgtaagaacaatgtactcaatttgattatcaaactgaatgacattaagatctgtttcttactagagttatacagcatggtaaaataatcagaacagtgtggccaacaaattggcttggctactctatgaaatagaaagaaaaattggcaaaatgtctttttcaaagacaattgggttcataagttagattttctgtagtggaaaaaaagcaattgcacagcttctagactatatgacaatctagcagaataatatgccttcactctctccctccttccttccctcccttcctgccttgctcccacccttccttcctttgctacagcatgaaaatcatagaggctaaaattatttggcttaattgcacaaagagggctctatgattttacttttatctttcagatttcagtcatttatatttagcacttatatatacttgatgtatttaatctccaaaagaaatagactatattcccacaactcctttctgacatttttaatgcaytgttgcccataatttttcattccataagccacaagagagagacca

SEQ ID NO: 61503 - DNA, 1683 bp, Homo sapiens
  misc_feature (1)...(1683): n = A,T,C or G
gtgatgggttgataggtgcagcaaaccaccatggcacacgtttacctatgtaacaaacctgcacattctgcacatgtattccagaacctaaaataaaataaaatttaaaaaaaccatgattataaggaggaaatctattgaaagaaaatacatattgccaataaaaatatagaaatctttctgatcattagggaaatgaaaattaaagcaccaattaagaaatactttctaggctatcatattggcaaaaattagaaaactgataagattgaagagtgccaagtatatggagaaattcatgtcctgttagtgagaacagaaaggctcgcaacaacatttttggaaagtaatctgacaatacctatttaaataaaaatgtatgatccattttgtcctccattcttaattatgggattctaaaaccaacaaaaactatttaataccactttgcatgtcctttggcaatacatatcctttgctcaacaatggattatgtaatntgttgcttcttatctgtaacattaatcacaacttttctttcattntgatatttataattgttattttttataantaaagaaaaataactttgaagtattatcaacaaaacttaaaaacaatttacaagaaaaaaatcctatatataggacatttgagaaagtgggcttaaatatttaatagtaactagtgaattgcaactaaatgtcagaaaaacaaacaaggaaacatgtatctcttctatttggtgacttctttgaattgatgatattcccaatmttgcttaaagaactaaagtaaaatttagcatagctcctcctaattttggcacagctggtcttctctactctcggaaaagtaagtagagtaaaaaaactccttccttagacagtgttctccattcttttcctgtctctttgagctcttctctgtctttgtctttgccttctgcatgcataacaatcataacaggattcctatttaaataaacacaatttttttgtcagactgagggcaggcctcttaaagtgaagtctcttagtgaggaacccaagaatattccttgcagcaaattttctctgagtgagccttatgcacagtaaagtttgagacttgttacctgaaatgatgagctacttcagggttcctgcatacatctgtttcagacacaccaaatttatccctgctgttgaaaagggcattgaacttcttctggtctctatattttgagtcagttccaatctcattcctgactctcagacttttatctccccttggaggactcacaaatacctcaaagccccttgagcctactcttcctcctgattttcctctttccgtgactggcattgcacctgacagctgccagaaccagaaactgggaggtaaccccaatttctgttctttcccactgtattcattcactaatgagctcctgtttattctgccttctaaatatccacattccactcaattctcaatagtaccactgtcactagccttagtctggcccacatcatctctcattgaaattattataactgtaattttcatgtttcccctgtctctattaaagtcccattgtaactgagtacccccatttttctaagaggaagagagtgaattattttttaaattaatttcttctctctttccttgttctctcctgttttccacttcccactt

SEQ ID NO: 61504 - DNA, 582 bp, Homo sapiens
ataaatagaattaacaggcaggtattttcagatagctttagcacagtgttagtcaatgtcagggaaatttttttaagtttatgggagctttaaaaaacaaaacagtaaaattacttttgacacattctttgttactttgactttcaccacagtctatagtcctgaaaaagactgtttataaagtaacgtacrtaacttaatttccccagggtaaaataagtgtcagccacaagtatttttgtgattaagaaagagccacttaacttaggttggtgttccatatcagttagagatttcttctgtcaatttctagcatttctaccacaagtttttttctaaaaaaaagaattcttagaggaaataataaagatttttttccagatatctaaattagtatacatttttaaaaacatcataataactctatgaaatataaagtagcaaaacagcatatgaaagttctcatcttcagcttgggacacagctaatgcttagtaagtagcagattgaggcatatgaggttgccaatatttgaccactttgacttataaaaatgacaatttcatgagattcaagttaata

SEQ ID NO: 61505 - DNA, 1662 bp, Homo sapiens
tttcttgtctatatacaaaagtttggcaatcataacccaaatccttttggctaagatatttagcatgcataactttctgtgacaatacatatatgtagaaatattccattataagtctattcttaaggagaggtagttaatgaatacctaccaagcgtttttttttttatgtatgataattgacatttatatactaaatatataaacaatgtaccttaattccaaagaacaatttacttttgaacatgaatgattaaatttaaattactatgtaaatcaggcctaaagttataaaacatttagtctatgttggccctcatctaatgacctttcacaattaattttgtattttttcttgcattttatgaagaattctttttgataaaatgagaaattcagtacagtgttaatgcttctcttattaaatccatgaattaagtgcagtgcttccaaatgctccaattctatgaggatgcaaatttatttaggagtatattaacagaattctaaatgaatgcttactaaatattatacattctaattcaaccatattcactagaaaatgtggcctctaggtcctgtccactgagaaactgaatgtggcagcagaagaaaattaaattttcatttcctaagagatactcttcaattatgaaatagtttggctgtcttgctcatattcatgcctgtactaaattaggcacaggtaattatcatgtatcaatttttccagaagttccataaattctccctgtacatggctaatgcatagatagggaggctaaatagcaaaataaataactctggattccccttttaacagaatggctcttttcaaatacttatatgttacaataatcagtgtgaaactctccaccttctccattttacagcattaggatccactaaatgtttgataatggtaatgatttatgtgacccatttttagcaaaggtaaaaatgtttttcatagctatactctgtgtttactcaagtgtcaattttaatggtttgcatagttttatccacagagagatattactctgaaaatgcaacttgcatttctgtattttgaccacattcttgtcctgcttgacaggtacttttacttcctattttgctagaatttatacaaacagctttcaaacactgtccttgaaaaccaaatactgcattttctcacttataagtgggagctaaattttgggtactcatggacataaagatggcaatgacagacactgaggatgactagaggagggaagacggaaagggggcaagggtggaaaaactattgggtgctgtgctcactatctgggtgacaggatcatttgtatcctaaacctcagcaatatgcaatatacccatgtaacaaacctacatacgtatcccttgaatctaaaataaaaggtttttttagctttttattttttcatattaaaatgcctttatatatattttttgagctttctctttayacttcaagttctgggatacatgtgcagaacatgcaggtttgttacataggtatacacgtgccatggtggtttgctgcacccatcaacccatcacctacattaggtatttctcctaatgctgtccctccccaaggccccaaccctccaacaggccccggtgtgtgatgttcccttccttgtgtcc

SEQ ID NO: 61506 - DNA, 691 bp, Homo sapiens
tgttatagagaaggtctatttttgtaatggaaatggatgactgtcagcatttggattaatagataatcctcttggaaggtgtaaggggaaggagaaagagagtactaaatccttcagcatcaagtacaagctttaataaaggagccaataaaataaaggaattaagaagacacaccaaaagccatattcaggtcagactcaagtgctgttgatttatgctggacctactcttaccctctgcccttgtttgttctctttcttcttgcgcctgtaaactacaaggctctatttctctcattgccataattccaattcttctactttcttgcctggattaytgcaacagctaacaaagttcatcttcctgcccccagctgtttgcttatctgattcaccctgcacagcagctgccacagctatcttctaaaatcaaagcattgtgtcccattacttctggacaaatccaggctctctagcatcatcgtcaaagctcttaaaattatgtcctctcctactccccaacctcctcatagctcaggctccagctggaccttcaagagatccccactggggatgtaaagtttctctcactttacaaatggaatcttctgcttggaatgtccatcttgccttctctgacttttcactcttactaattgtttaagagcaagttgaaaggtcgacacatcag

SEQ ID NO: 61507 - DNA, 758 bp, Homo sapiens
cctcccttgtaaaggaaggaaacactacctcccttccatcttcccaaagctgttgaaaggatgaaatcattcagatgaacaccacttaaaaaccttgaagtaatatttaaatatgagtgagactttcttattaagaataaagaataattcaaaatctgaagattagtacttaccccacctggtttatgttaacttaaatgagataatatattaacgtgatacaaatattgccagatagttctccaggtggcttcgaaacaacctagttctctccctttccttgcttgtagtctcgtaaataactgtagaagtgttgggtatgcctcatcctgaaataaggaggaasctgctggaacaacctgggttctgttccagtccctcctagaaacaggacatccttcaaggctttgtcccagcaattcatataatctcccaggatataaaaccagggcaggcttctttctagggtctctcagctgtggtgcaagcagggcatgcacagacaatactccactcagcctgggaagctttcctgagccttgggagactggctcatcatgaatccgagccttctgtggtccctttataactatctgcaagtaataaattagcttcatggaatttatagtatatttaggtgttctgtctcaccaggctgacaaattggtactcagtgcacagggtaactcttcacaaatgcctgacatatatttatatgtctggaaaataaataaattgtcttcccactctaaggttat

SEQ ID NO: 61508 - DNA, 758 bp, Homo sapiens
cctcccttgtaaaggaaggaaacactacctcccttccatcttcccaaagctgttgaaaggatgaaatcattcagatgaacaccacttaaaaaccttgaagtaatatttaaatatgagtgagactttcttattaagaataaagaataattcaaaatctgaagattagtacttaccccacctggtttatgttaacttaaatgagataatatattaacgtgatacaaatattgccagatagttctccaggtggcttcgaaacaacctagttctctccctttccttgcttgtagtctcgtaaataactgtagaagtgttgggtatgcctcatcctgaaataaggaggaagctgctggaacaacctgggttctgttccagtccctcctagaaacaggacatccttcaaggctttgtcccagcaattcatataatctcccaggatataaaaccagggcaggcttctttctagggtctctcagctgtggtgcaagcagggcatgcacagacawtactccactcagcctgggaagctttcctgagccttgggagactggctcatcatgaatccgagccttctgtggtccctttataactatctgcaagtaataaattagcttcatggaatttatagtatatttaggtgttctgtctcaccaggctgacaaattggtactcagtgcacagggtaactcttcacaaatgcctgacatatatttatatgtctggaaaataaataaattgtcttcccactctaaggttat

SEQ ID NO: 61509 - DNA, 964 bp, Homo sapiens
tgcaggctggaataatgagggctaaataaaagttatacatctgatttgtataatgcatttaaagttcattatataatataycatctaatcttttaattatagctgctttgttagctagagagagctgattttagctcctcttgacacgagggagtgcatactcagagaggttacaacacgtgcctgaaacccaaagttagttaatgataggaaagtagccagatccttctgactcacagtatagtcctctcctttgacaagcaaagactgtacaagcagcttttataactttagcttttgtcttgactctgtagccagtatctgcatactgaaatgatttcactttgaagaaacaaagaaattatcatctataaaactaaaacaaaaaagcccttagttatgggagacgtaaaaggtggggaaaacataaataaagaaaatgagctgcaatttataacccaagttaaacaaaaagctcccctaaatttatatcctcctgtttccacataatgagtcaattaatcttctaatgctttataaaagtaaaaaacactgcagtagcagctggttttaatgttaaagctaattaggaagacacattaaggcaagagaagtgctgaagttaacatttagctcaagagggaaaaagtatgtgcgtgtgtttgtgttgcggacaagcataaagaaagaagataaattaaagcttgtcttttatattctgcagtctgatttccccaaggaaggcagccatgagaacagagaaatgggtcactggtataagaagctgttctgaccaagacaggcaagagaaggttaaggggtgtctttcacagagctaccagactgacacttctgactgaatttatgaagatttttcggctcaaactgactaatcacacaagccatttggacaccatttcaccccagtatatgattgtcagaaaaatttcttaatcatgggatg

SEQ ID NO: 61510 - DNA, 553 bp, Homo sapiens
tggaggaattcataaagtgaatttgaaatgagtaagtactatgccggtgtgactggaattaccacctctttacctgtcctcatttacctgtttttctgtctgtctcttagagttgactccctcactcttccattatccagggtatagaacacttcttgccatctgcttccagattccatcccagaataattagtttttatctctttctttcttcccattgttgacagccgtcactttctagtattcgcattgtcaatacaagttctccagtctccacaccaccagttcccaggtcctccactgtgccatatctcagccttgacctggctgtttcctcctctttctctctcctgtctagtctagatccttagtattcacctgggcatwtcagaaagttcacccctctcacaaagactactaattgccttccttcaaatgctttctctcttttctctaaactctcaagaacactaaagcacctgtcttttgctgtaatacttagattagttatatgtatatgtactcttgcctagtctttcctatcagttgaact

SEQ ID NO: 61511 - DNA, 747 bp, Homo sapiens
cttcatggatgtctctggaggtgcaccgaagtcaaggctggaactggtgagggagaatctttcctattcaaaagaaatagactgcttgggatgggtgaaggcaggggcaagagccctgcatgccaagagggtctcctccagctggatggttccaaggtttcacatgaataatcagtaggagggagcgaaggggcccagcttcctcatctcttggagagggtctttggcttttgcagagtgacagccacaggaggcaaactccactggatgccatgaggacaatgggtgggggggcgggccctaaggagccagagtcagaagaaggatgggcagaaaccaaggaggctgtgatgacaggggcagggaggtggcagcgccatgggacacatcaatgctgaccctaagctcttcagattgctgttagcactgtgaggcaataaggatgggtgaatctgcaggctgggagggtggtgggatactcagcaagatatccggcctcgggccagcccaggctggggctgggtggtggggatctggagaacaagcactccctgctgaaagagagggagaggtgtgccacccagaaggaacaacacctgggtttgtcagccctcctcccttgcactatgcygcgaggaagtcaatcacatgtgtgtctctgaggtgacaatgtacccccagcacagaggattccatgtggaggatgctaagggagcactgagagtggatttgcttaaaaagaagcag

SEQ ID NO: 61512 - DNA, 747 bp, Homo sapiens
cttcatggatgtctctggaggtgcaccgaagtcaaggctggaactggtgagggagaatctttcctattcaaaagaaatagactgcttgggatgggtgaaggcaggggcaagagccctgcatgccaagagggtctcctccagctggatggttccaaggtttcacatgaataatcagtaggagggagcgaaggggcccagcttcctcatctcttggagagggtctttggcttttgcagagtgacagccacaggaggcaaactccactggatgccatgaggacaatgggtgggggggcgggccctaaggagccagagtcagaagaaggatgggcagaaaccaaggaggctgtgatgacaggggcagggaggtggcagcgccatgggacacatcaatgctgaccctaagctcttcagattgctgttagcactgtgaggcaataaggatgggtgaatctgcaggctgggagggtggtgggatactcagcaagatatccggcctcgggccagcccaggctggggctgggtggtggggatctggagaacaagcactccctgctgaaagagagggagaggtgtgccacccagaaggaacaacacctgggtttgtcagccctcctcccttgcactatgccgcgaggaagtcaatcacatgtgtgtctctgaggtracaatgtacccccagcacagaggattccatgtggaggatgctaagggagcactgagagtggatttgcttaaaaagaagcag

SEQ ID NO: 61513 - DNA, 721 bp, Homo sapiens
aaagagacagggtttcaccacgttggccaggctcgtctcaaactcctgacctcatgtgacccacctgcctcagcctcccaaagtgctgggattaaggcgtgagccaccatgcccagccttaaactaaggtctatctgatttcagagatgatcttaccacttttctgtatcgtcaaacttgccagacggcaaggaagaactgggaggaataatgaatgcatctagtgaaagaattgggaccctaagacatctggaggctctggcagcaactgtccaayagaactttctgcagtgatggaaatgttttgtttcgacactgtccaatatggtagcctgtagccacacatggttatcaggcacttgaaatgtggcttgggtgactgagaaactgaatttttaatttaatcttatttatttatatttaaatagttacacattgctagaggctcccataccggacagcacaaccctagtgctatgggcagaagtcaacaagatgattctgggttgagaactgtgtaacatctaacatttgggtcacaggagtgggatggggagttaaaaatgactgggggggggtgctgatgcattgtgagcagtcacctccaaatgtgggagctgaaacatcgaatcagagaaaggaaggaggaagggagtgggcaggacagaggggacgggaggagcttggcaagcgggggcaggtacaagacaggttcacctga

SEQ ID NO: 61514 - DNA, 745 bp, Homo sapiens
ttatatttacaaaaaaataagttccacaagatggacaaaaatggtccatgatatttagcttaaattgtaaccttttgttgtgtatataaaacttccttggaagaaaataaccttattgttttcttaaagctaaacagaataggattggtactcattaattatgtcttgcaaatattttctaaaaattcaaccactctcctaaaatggtgtttaaatattttgtagggcagaatatgcatattgcctgttagcaagtaataattcattctcatagagaaatgggtttttacccatggaagtaatcttttttttttcttttttttttttaatttttttttaatatactttaagttttagggtacatgtgcacattgtgcaggttagttacatatrtatacatgtgccatgctggtgcgctgcaatctaattttcttaacagtagaggactccggttttaaaaatcatctgctctcagggattatccttaccaccgtacatagaacagaatcagactgtgcttttgcaagtccagatatgacttagttgtcaaacatagactcttgtacagtaccgcgaatccaaacactgatctgagttttgtaataacacagatgagaagccacatttctgcctcaaccttctttctctgaccattgtcaccctattatattttattttaagttccgggatacatgtgcaggatatgcgggcttgttacatagataaacatgtgccatggtggttt

SEQ ID NO: 61515 - DNA, 833 bp, Homo sapiens
atttttgtatttttagtagagacggggtttcgccatrttggccagactggtctcgaactcctgacctcaggtgatccgcccgcctcggcctcccaaagtgctgggattacaggtgtgagcaccggccccggccttctttttttcttccacactttctgatttctcttaggggtggctacatctgcagctgtgtttttcctccatttatctggctctggaagtgcaagagcacagactgggaggagacgtgggctaggggaagagaaggtttcctggttgtgtgtgtgtgtgtgtgtgtgtgtgcacgcgcgcacgcataagagggttcagaggaagccagaaatgtttcctctctcccagcactaccattccaccaatccatagcaagcaaaactcaggctgaatgttcaaaccccatgcttttaaggatgccacatggtgagaaagggccaccatgtaatgaatcctgggaaaaggccagggcccttgggagcgggagaatgagcaccagagaagctgataggagaaaccttcagaatccccactgagctctttgcaacttagaagaattgagagaactcaggggaatatggtgaactacggacttaagcggaccataaagattttgaactattggtcaggcagggtggctcatgcctataatcccagtgcttttgggaggctgaacaagaggatccttgaggacaaggttcacaccagcctgggaaacatagcaagacccatctctatatacatttatttttcctttgagacagattcactttggaaccaagcttggattccatggcacattttggctcttaaaccttcac

SEQ ID NO: 61516 - DNA, 403 bp, Homo sapiens
cttctcagagcaatgtttttaaatgcaaaatcctagttttaagccataacttaaattcttcccaactgaacagtaacagatctgtgttcaaatccctccygttgccactaactagctgtataaccttgggtgggccaactaagcactctaaacccatccaatatggtttggctctgtgtccccacccaaatctcatcttgaattgtactcccatatttcccacacattgtgggagggccccggtgggagatgattgaattatgggggcggtttcccccatactgttcttgtggtagtgaataagtctcacgagatctgatgtttaataaggaaaaacccattttgcttggctttcattctctctcttgccaccaccatgtaacaagtgccttttgctttctgc

SEQ ID NO: 61517 - DNA, 403 bp, Homo sapiens
cttctcagagcaatgtttttaaatgcaaaatcctagttttaagccataacttaaattcttcccaactgaacagtaacagatctgtgttcaaatccctcctgttgccactaactagctgtrtaaccttgggtgggccaactaagcactctaaacccatccaatatggtttggctctgtgtccccacccaaatctcatcttgaattgtactcccatatttcccacacattgtgggagggccccggtgggagatgattgaattatgggggcggtttcccccatactgttcttgtggtagtgaataagtctcacgagatctgatgtttaataaggaaaaacccattttgcttggctttcattctctctcttgccaccaccatgtaacaagtgccttttgctttctgc

SEQ ID NO: 61518 - DNA, 1576 bp, Homo sapiens
ccctccactcacctcagtaaatggcaccaccaaccacccaagtggtcatactgggaaactgggcatcctggttgaatctcccctttcccttaacctccccacctccatccagtccattaaccagtcctggcatccatccaactcagcctctagtttcatttctttatatacttcccacagcttaaaattattgtgttcatttggtttgcttactttttttgttgactcccttactaaaatgagggtggggtcaacatctgatttcttgctcaccaattcrtctccagaatttagcccagttccagccagaaaataaacacttaatgaatactggttgaatgagtgaaagaaggaattcattgataaagactttgcccagggtgaagcagctgccccatgactggcctggcacagtcccatagggcgagccccctaaactgggttgggcactgagcctccccacctgtgtctcctactcctttccacagaaggataccaaccagaaaaggtaccttcctacccaaatgtgaagcaacagctcctaaatcccacctccttcaaaaagtggatccagtagctggatttccaggctgaatctcttcaacccccagttgcaggttttctttatctaactgcttttcctcatctctaaaataaattcagccttgtccaaggatggaaatactgcttccctggcctggcctggcctgactacacatttctattccacagcctgtgtgttctctccgggtgccccggcagtgtgacatgcctggaaggcatcctcgaagacagtgtggggaagtggagggagctccggacttgggatgcagggcttcattcctagctcaggcattcacatgctataagaccctggaggagtcacccctcctctctgagcctcaatcttttcatttggaagcaaaggccttggactccttgcttctgagtcctttccagcagtcaccttctggacagcactcccatggccaactaacacattatcagagcttcttggtgcagggcagaagccaggatgacaagaactctcatggctggtgcacctattttcaggccccaagtgcatgcacagtgctaggtgcaggaatgggggcctctgcaggaaatgttggattcaaggaagctaacaggttttccttgctactgaacttcttagaaactctaatatgtgctccaaaaagaaaagatgtaatgggcgtggagtcttttattgcagagtgtctcaatggaatggtgttcctgggtcagactttgacataggctgctctggggcctatttccatccctgggcttccagcagcccgcactttcccggagcaccttgatgggggaaaagctttcacgatgtcagctggagtgagaatcaacaccaagggaagaaaccctctgtccccaaggccctcttagttcccccacatgagagaagacagggaggagacagatgtctgcatgggccagccttcaccactaaggacggtaagggtacacagggtacaacagcgtcggggagcaggacctctccctccccacggtgctcacagaataatgaacaacc

SEQ ID NO: 61519 - DNA, 1384 bp, Homo sapiens
cctctccagcatctctgacttatatccctaattttctgcaagttctgcccatggactgtgaagttagcccaggcctagagtgtggccacacaggctcctctcctctttgctccctcaaaggcaatgaaccaaacccagggctagaccagatcctccccatgactaagcatgaccaaagctatttaaattctctgcatttcagcatcattaaccataaaagatgatcaatcatctctgaccctctagatctcacaggaacatagctagatgaatgaaatatctgccagtgttttaagaaacatatcacaaggccaaatgtggtggctcacgcctgtaaccccaatactttgcaaggctgaggtgggcagattgcttgagcccaggagtttcagaccagccttggaaacatggcaaaacaccatctctatgaaaaaaatacaaagattagccgggtgtggtgtcatgtgcctgtagacccaggtgcttgggaggctaaggtcggaggatcrcttgatcctgggaggtcaaggctgcactgagctatgattgcaccatggcactccagcctggacaacagaacaagacccttctcaacaaaagaaaaagaaaaaaggaaacatatcacaaaaattagaccatatttttccttataatatctaagagagcaggatggaggacctgcctttatgccagacagaaatgaggctgctgcttggtctggtgtggggtctagagtccagggcaatgagtctctaggaattcctaaacccatagtgattcagggtacttagtgccccaatggggggagatcttagtcattgccagagcccactgattctgagccatgcttgtcattcctttagagggaattatcttggagaagaatctttgagaagcaacatcacaaccactgctgtcatcagctagtcctgggtcggggacctccccagcagatggtggaagaaaaaggaagaagggcataatctatacttactcttggggttgggatagcagagaagacatggcttgacctttgagaggacagggagcaaaacaaagattggggaatacattcgtgggactagattgtcaattctgatcagagctgtgagtgaaggaagtggtggaaggggaggagataatcagtgagttgaaattcttattggttgggcccatccctctaaacttgtagggcctaataaacactttgagaaaacagagttggtttacagtcatccccaacacttgaattatctgaagtttattaactaagcgccctaagtgtttactccctggagaaaagagtgagtcactggattgcaatgtgtaaaatcgagactcatagggtgctacggccaggaggctctccagtccactcctctac

SEQ ID NO: 61520 - DNA, 1359 bp, Homo sapiens
gctttcgtggtcctgttgtcttctcctcgtcaatgtgtcgtctccctctacctctatattataaggacacttgtgattaaatttaaggccctcctggataatccaagataatctccccacctcaaaatcctttatttaatcacatctgccaagacctttttgcctccaggtaaggcaacgtttacaggttccagagattagaacttgatatcttattcagtctactacaagttataatttaaataacatccttaatatttgttcaaataaacataataccaatagaaaaggataatgtagacctagaaatgaagaaatgcagttcttggctgggcatggtggctcatgcctgtaattctagcactttgggaggccgaggtgggcggatcacttgaggtcaggagttcaaaaccagcctggccaacatggtgaaaccccatctctactaaaaatayaacaaatttgccgggcgtggtggtgcaggcttgtaatcccagctactcaggaggctgaggcaggagaatcgcttgaacccgggagatggaggttaaagtgagccaagatcgcactactgcactccagcctgggagatggagtgagattctgtctcaaaaaaaaaagaaagaaaaaagaaatgcagttctcaatgaagtgatgaccagtttacacacacacacacacacacacacacacacacaccccaacatatatacacctgtatgtccatgcatacgcaaatttgtgtatcagcaaaagtagttcctattgcatagacctattgcatagttttactatggaccaagttcttatttgtaaaaaaaaaaaaaaaaaaaaaagcaaaacagaattaaaaggcatatctctgggcattcaattgagactaccaaaatgacaaaaagaaaggctagattctatagaaagggagatttgtttacaactaaagtatttcaaaagtttaccaaataaaaatagtaacttttaaggttaatatgggttaaagaattattgggacaagtagcctgagtgataagacataatttaatttgcaaatgtttctatcaaataatgatctcactccactacttccttctaaatcacaggaggaattaagaaacaatgtgagatctaattacaatgcccaatatttgtataacagtttatggtttacaaagttctttttcttttcttttttttttttttttttgagatggcgtctcactctatcgcccagggtggagttcagtggtgtgatctcggctcacttccacctctgtcgcccaggttcaagcaattcccctgcctcagcctcccgagtagctgggattacaggcacctggcactgcacccagctgatttttg

SEQ ID NO: 61521 - DNA, 1102 bp, Homo sapiens
ttattttctgaagattttaaacctagctatcagtgcaagcaatgtatctttgacatttgtaaaacacctgcagccattaaaaattgaccccttcccacctccaatctttctaaaacagatgcaaataatcccagaagatcctttggagggaaatgtaatatttgttttatagaacaatcacaaagttgtcgaatttcagagctggattggttcctgaggatcatctggtttggatctcattttgtagctgggaaggaaatcaagttctggaaagatggcagggccatatctaaactgcatttcctggcactcaggctaggaatcttccatttctcttatgtactggatatgtgcattaagtaagtrtagctggatttacttgaatctataatagacatattttagaaataagacattaactctttcaagaacaatgggctcaagtataactgatagaactcctaaggaagaaaatatttcttccattaagttgtaccacaggctttaccctagtccatagcccttggattggatcttaattacttttaattctcttatgatgtgaaagagaaattacttagataaggtgaactgaagaattaagcagaacagattctgatatacatgaaattagtgtacacttaattcttaggtttgggctctgtaaccaaaatagaaaatatcagtttaagggagaaatagatgcaagtttaggacataagaacaatgataaatgtgaatgcactttaaagagggtgggagctctggaaattattaatacatcatatgatgtaaacatgtagattttgtctaatctttgaaaaacgttcatcacaaatataaaatattaatatccttaacatataaacagctggtagaaattgatgtaagaaaaacacttaaaactaatagaaaaatggcctaaggacatgaagtggcatttgcaatgaacatgaacaatattttagctattaataatataagaaatgcagatttttaaggcttataatttttacctacaaaagtagctaagtttgtctttttcagtaatatctttttattctttaataaagacatttgttgaccagaatgtggtaaaata

SEQ ID NO: 61522 - DNA, 614 bp, Homo sapiens
aggctttaggcaatgaccttattctccccagagtacaggctctctccacaaatccccctgcgttcataacccactggtccccattccgagatccactcctggttgatcttgtgccaacaatggtatggttttcgagttggttgctttttttgtgaaaaattgttctactgaccactttgggtttaattttctttaccaaaggttctgagttattttctattggagactgcttgaaaggcaaaggactgtttgccaaactgacttcatcttgtcctttttcacattgttctcttttcccatagagatgaaatggattttcaggggactcacaggcyggagaggatccatggagcaggcctgcaaattgcccaggatcatattcttttgggggatcattgtcatcctgtcgggagaggtcatctgcaaaaggaaggaagggatatcagggtttataaaggttctgaaagccacgatataatagcagtgcccttatgaacatgtgggctatccaaacatttcatttactgctacatagcaataccttcactttatgaaatacccctgaccccacagtgccatgtatagaatgaatgtatgagtgtgtgtgcgtgtgt

SEQ ID NO: 61523 - DNA, 612 bp, Homo sapiens
cacacaaatacacacatagccatgtattttmaaagagcttcagatcagtgaaccaataatctctgaggtacatggttgtattagaggagaaacattaagcatctctgaaaacagtatttagacgtttcagaaaattttgttggaatataaaagaaataatatgagtaaaatctatcatcaagagatgatctaaaagttcaatgtaaaattctttgtaattctctgggacaaacactcaatttagatttaaaaatttcatttactcaaatctggatccaaattcaagtccaggatcatggtctcccgcagcccagccaggcagaagttaggcaacatccagactctgtgaactcaacctttgggaagaatgaaggtacatgtttctcaagagtaaattacagttgtctgaagagtgatagtgatggaaactattacctaaaattttggaaaagctgaattaagaaacaaacaagttctcccttccaaatttttccttaatttaaaaaaggaagagaagtagcaaggtcaagttgaggctgctgaaaatttatcctgttacagatctgaagcatttggaattgcaatgaatctcagatttttctgtgtatttga

SEQ ID NO: 61524 - DNA, 612 bp, Homo sapiens
cacacaaatacacacatagccatgtattttaaaagagcttcagatcagtgaaccaataatctctgaggtacatggttgtattagaggagaaacattaagcatctctgaaaacagtatttagacgtttcagaaaattttgttggaatataaaagaaataatatgagtaaaatctatcatcaagagatgatctaaaagttcaatgtaaaattctttgtaattctctgggacaaacactcaatttagatttaaaaatttcatttactcaaatctggatccaaattcaagtccaggatcatggtctcccgcagcccagccaggcagaagttaggcaacatccagactctgtgaactcaacctttgggaagaatgaaggtacatgtttctcaagagtaaattacagttgtctgaagagtgatagtgatggaaactattacctaaaattttggaaaagctgaattaagaaacaaacaagttctcccttccaaatttttccttaatttaaaaaagkaagagaagtagcaaggtcaagttgaggctgctgaaaatttatcctgttacagatctgaagcatttggaattgcaatgaatctcagatttttctgtgtatttga

SEQ ID NO: 61525 - DNA, 775 bp, Homo sapiens
tcaatcaaggatgagattaatggatatcctctgctccaaaagaaaaatacatatttgcttgtatttcacattcatatttaaaacatattttctcttccaaaataagccagcatctgatttttaatggatttgaagaaatccatttccaaatgcctgtagcatctgtgaatacttcatttaacaattagcaggatcttcctttttagacggtattagaactgatttgcagggttataccataatcaggaatgttcccaccctttggaaagctctaatcttatcttgaccagcctgccctctgcctccatggaataaaaacaataatgtctgcaatacagactaaatgtataaccctcaaagaaaactagaacaaacccagaaactgtataaagcayacagaaaaaatgtttccatgccccaccgttgtttgaacagaggtaagtattgctgtgatcaactgatcaggaacgaatgtccaacgtgaaatgaactcaagcccagggcgcctcagcggtggccagagagcggcacagacaaacagtgtgccgaggtaattccttcagcagaagacagacaactcaggaagagcctttcctaccaattaaaggtagtcaatattgattatctgagggatttccatgctcaggaagcaaattagaaactcaatacctgaactattcctaaatgcagttatcaacttcagagttttatctcataaaaccaattcagcttagagtttaattctattaaattagggcttagaaataagatttgc

SEQ ID NO: 61526 - DNA, 801 bp, Homo sapiens
agtatatcttgggaattctgggggtgattttttttctttatcgactgagctcaaattcatacattcaaagaccaccacagtaaaatcagtaaatacaataatgctatgttggaatgaaacactattcagttatagtaattgcccagaaattaatttttaagttagtgatgaaaagaattcatctgagaaaaagacaacaatgacaatgatgaagaaagaggaggaggaggtggtggtgtttcattctagtatggaatcgagaagaaaatccaaagaatgaggttgcctctcccgggtcctaaaatcccacacattgctcatttattcattctctcatttaccctgccgtgtctgccatgggcaaggtgaaacatttaagacccacaaagatagataaggtcctaatctactaggaccacraatcattccacaaatgaaactccaaggcagagaagcaccagtcaacagtgaaagcagaaatgcgttatgctcccgttgtacaacaacaaagatacctttgatgaaacaataatcccaagcctttcctttttttgagaaagagtctcgttctgtcgccaggttggagggcaatagcgcaatctcggctcaatgcaacctccaactcccaggatttagcaactctcctgcctcagcctcccgagtaactgggattacagtcatgcaccagcaacacccagctaatttttgtctttttagtacagatggggtttcaccatgttggccaggatggttttgatctcctgacctcatgacccacccgccttggcctcccaaagcact

SEQ ID NO: 61527 - DNA, 801 bp, Homo sapiens
agtatatcttgggaattctgggggtgattttttttctttatcgactgagctcaaattcatacattcaaagaccaccacagtaaaatcagtaaatacaataatgctatgttggaatgaaacactattcagttatagtaattgcccagaaattaatttttaagttagtgatgaaaagaattcatctgagaaaaagacaacaatgacaatgatgaagaaagaggaggaggaggtggtggtgtttcattctagtatggaatcgagaagaaaatccaaagaatgaggttgcctctcccgggtcctaaaatcccacacattgctcatttattcattctctcatttaccctgccgtgtctgccatgggcaaggtgaaacatttaagacccacaaagatagataaggtcctaatctactaggaccacaaatcattccacaaatgaaactccaaggcagagaagcaccagtcaacagtgaaagcagaaatgcgttatgctcccgttgtacaacaacaaagatacctttgatgaaacartaatcccaagcctttcctttttttgagaaagagtctcgttctgtcgccaggttggagggcaatagcgcaatctcggctcaatgcaacctccaactcccaggatttagcaactctcctgcctcagcctcccgagtaactgggattacagtcatgcaccagcaacacccagctaatttttgtctttttagtacagatggggtttcaccatgttggccaggatggttttgatctcctgacctcatgacccacccgccttggcctcccaaagcact

SEQ ID NO: 61528 - DNA, 742 bp, Homo sapiens
ttctcaatgggctcagaacttacagcggcagggtgctcttttgggggccatattgaactccagtagtgacagttaggtcagccctaatgtctgacagttaaaagaaaaagaatgtcaggccaatgctatgtatccaaaatggtggtctctgaagttggggagcagtgggtgaactttcctggcacagggaaccgaaaacacaagaggcttagaagtgggaaggcacaagagtgtctgaagactgtgaaaccctgaagctgctggaataccaggtgaggaaagaggggttgagaagaagctagagaaatagccagaccaattcaagcaggggttgcaaggctacagaaaagtttgcattgtgttctaaatgctatgggaagtcgctgaaggatcttaagcagggcaatgatgcgggtctgttcactccttcagaagtcgctctttttaactctgtagagaatggtctggctgtggcccccgagaatagatgaagagagaagactcaggagacttttgcactagtccagggcaagtctagatgatgctyacctagaccacgatagaagcaataaaccactggagggaaagcctcagatgggagagatcactgggagagcgaagccccggaatctgctgatgaattggatgtcgggggagagggaagaattggggatgaatcctaagttctggcttcatgagtggatgggtgttgacgccatttatagggatgtgaagaccggga

SEQ ID NO: 61529 - DNA, 538 bp, Homo sapiens
gagaggatagaagacagcccagttcaaggagtgaggcaggaaagaaggggtgtgttttttcttcctctgttctatttaggtcctcaacagattggatgaggcccgcccacgtaggggagactgatctagtttcctgagcccactgtctcaaatgctggtttcttccagaaacatcctcacagacacacccagaaatagtgtcaaatctgggcacccaggcccagtcaaacttacacgtaaaattatccatcatgtggcagagctaaggatgggcagagggaacagaacagggaaatctccaaatcactgcagctttgctgggctggttaatctttccagggattccacagattggtttgcaaaaactccagcgaaagacccatgcattgcaacactaaggttagatcaccaatgatttgagaaatagcaccttacaaaatgcctctttsagtattatccaatctcagtttgtttaagtccctttgtaacataagaaatgtggtctgtaatcccagcattttgggaagtcaaggcggga

SEQ ID NO: 61530 - DNA, 485 bp, Homo sapiens
tgggattacaagcgtaagccaccacacccggccaataggtactttctaagccagtcacaccctttctcttaaaaacacctagaagctatcaactgtgttcctatccttttacccagcaacaccacttccaggaattcacccaagtgaaagatcagagatgtgcagagcgatttatgtaaaagtttgtccactgaggtaggaaatattttcctgcaaatgacctgaaaagcatcactctattttatcatatagttttatcatttagtgtcatggaaggattaataatgtactgggggaaaagccggttacaaagcactacactatcttattccaygtttatattatatgttataaaatatatacatttaaaaaatatgtggaacttagatataaactagggcctctctgtttttcaaatctagttatacttggttccatccctcctgaccaattccatggattgtgcaagttcaaagactttctgg

SEQ ID NO: 61531 - DNA, 566 bp, Homo sapiens
ctactaatctgtaatctccatgatggcgtgcattgaatttattttactcatcattttattcccagkgcttattatagttcttgacatattgtaggtgctcattcattcattaatagctgcaaagagcataattgaaaaatctacttttgttttcatttaaaggatttacttaaaatacatccctagatgtagaatttttctcaaaaagtctgtgcattgaaattttaatagaaagtgccttttttttttttttgagatggagtctcgctctgatgtaccaaaccagactcagaccaagtattgttttgagacaatcaattcaatgggcttaagggatcactgaagccacagtatggatgcataaggcacaaaagctaaccatattttcaagtgctcagtagcacatggggttaatggctactgtactggccagcatatctctagatactactcagatatttactgtagcaagtatgtctggaaaaaataagaactgtgtgtccttcctgtagaaaggaaatctacattgtattaatcagttaagcacatcagatataaatatatat

SEQ ID NO: 61532 - DNA, 948 bp, Homo sapiens
ttcagaaactgctccataaaatagatatactttcttccttcccctatatcttgcattacagagttttcccaattctgtgtccagttttatttttcttttacttttaaatacttttgatacattatcattttttgaggtccaaccaaatgggcacacactgcactaaatgacctctagctcagtgctctttccaccatatttggatgccttcatagccaacactgaaacactaaaaaacattacaaagaattcaactggctggagatcaaaatgctcaggcaatattttagtagtacctatgagaaggaaagacttctgtgatatgaggaggagagagtcaaagcagcatgaaataaataaaagtagatggctgaagacaaaaattgattattgtatttcatagtaytctgtggagtcaactctgttttgacctcacatgtttctccaagcccttccaaactgtattatttggtacacattgctcgactaaatgtttttcacatggctccataaacttctcatggctgcccattgactacatggactcagaggtcagagggagaacctgaaaaaaaaaaaaacacaacattttttcaattttgcaaaggtgcttatcatcagaaatatttctgatcacaatgaaaaattgctttttagaaatacaagttctttttatttctgtaaatcttatttactgttttctcattgaagacaagaggtgtggttttactggtgattaggaaattttaggactgggctaataaatatcatatatgaatattgccctaagatataatgcaagctattattgcaaacttatatgaacaaataattaagtggtaatatttaattcacagatgacacttacctaaagattttccaaggaaaattgccttgaattaggccatgagaaaaagttatattatttttgaattgacaaataaaatg

SEQ ID NO: 61533 - DNA, 948 bp, Homo sapiens
ttcagaaactgctccataaaatagatatactttcttccttcccctatatcttgcattacagagttttcccaattctgtgtccagttttatttttcttttacttttaaatacttttgatacattatcattttttgaggtccaaccaaatgggcacacactgcactaaatgacctctagctcagtgctctttccaccatatttggatgccttcatagccaacactgaaacactaaaaaacattacaaagaattcaactggctggagatcaaaatgctcaggcaatattttagtagtacctatgagaaggaaagacttctgtgatatgaggaggagagagtcaaagcagcatgaaataaataaaagtagatggctgaagacaaaaattgattattgtatttcatagtattctgtggagtcaactctgttttgacctcacatgtttctccaagcccttccaaaytgtattatttggtacacattgctcgactaaatgtttttcacatggctccataaacttctcatggctgcccattgactacatggactcagaggtcagagggagaacctgaaaaaaaaaaaaacacaacattttttcaattttgcaaaggtgcttatcatcagaaatatttctgatcacaatgaaaaattgctttttagaaatacaagttctttttatttctgtaaatcttatttactgttttctcattgaagacaagaggtgtggttttactggtgattaggaaattttaggactgggctaataaatatcatatatgaatattgccctaagatataatgcaagctattattgcaaacttatatgaacaaataattaagtggtaatatttaattcacagatgacacttacctaaagattttccaaggaaaattgccttgaattaggccatgagaaaaagttatattatttttgaattgacaaataaaatg

SEQ ID NO: 61534 - DNA, 948 bp, Homo sapiens
ttcagaaactgctccataaaatagatatactttcttccttcccctatatcttgcattacagagttttcccaattctgtgtccagttttatttttcttttacttttaaatacttttgatacattatcattttttgaggtccaaccaaatgggcacacactgcactaaatgacctctagctcagtgctctttccaccatatttggatgccttcatagccaacactgaaacactaaaaaacattacaaagaattcaactggctggagatcaaaatgctcaggcaatattttagtagtacctatgagaaggaaagacttctgtgatatgaggaggagagagtcaaagcagcatgaaataaataaaagtagatggctgaagacaaaaattgattattgtatttcatagtattctgtggagtcaactctgttttgacctcacatgtttctccaagcccttccaaactgtattatttggtacacattgctcgactaaatgtttttcacatggctccataaacttctcatggctgcccattgactacatggactcagaggtcagagggagaacctgaaaaaaaaaaaaacacaacattttttcaattttgcaaaggtgcttatcatcagaaatatttctgatcacaatgaaaaattgctttttagaaatacaagttctttttatttctgtaaatcttatttactgttttctcattgaagacaagaggtgtggttttactggtgattaggaaattttaggactgggctaataaatatcatatatgaatattgccctaagatataatgcaagctattattgcaaacttatatgaacaaatmattaagtggtaatatttaattcacagatgacacttacctaaagattttccaaggaaaattgccttgaattaggccatgagaaaaagttatattatttttgaattgacaaataaaatg

SEQ ID NO: 61535 - DNA, 1268 bp, Homo sapiens
atcaatcgaaatgatcatatcatttttatstttcattctgttaatgttaacatcaatttgattgatttatgcgtaatgaaccagcttgcatcccagggataaattaaatcccacttggtcatgataactgatctttctaatgtattgttgaatttcttttgctagtattttgtggagaatttttgcatcaatattcatcagagatattggcctgtagacttcatttttcatgtgtcttggtgtggtttttgtatcagggtaatactggcctcataggatgagtttggaagtattctgatcaaagtgctttccaagaataaactaccaataatcttcacattttcttctgtagtaattaatttatcaagttacttgtccctattgggttaatattggtagatcaactattactaatgatatggagaagagacaaggaaatactggctaggaaagggcagttcttttgcaaagaccccaccctcaagcctggatacccatggccctaaatgaggacaggcattcctgttttcatgctgaaaaactactttttgacctgccatgccccctatcctgtacccatattaaccccaggcctcaggctccagaagcagaaaaggagaggagcagacaaatagcagaacagtgtggcagagaaagagagaagagaaggggtgtctgaacgcctagaggagtttgactggtgatgtatggagaggatatcggctgctgagcagccaaactccaggggaagatcatcttcccactctatccccttcccagctcctcatccgtcttgctgaaagccacttccactacttaataaaccccctgcattcatgcttcaagtccgtgtgagacctgacactttcgggagactgaacaagagctcaggatacagaaaactgtcacactggccttctgctcttataaagaggcagagggtccactgagctggataacacttaagctgtccatggatggcaaggctaatagagtgcactgtaacaaacactcatttgggctttggtagtcacaggctcccacctctggaggctgctgtggggctggagtccagtgccctggctcctaccactgcctgtctatgtgctcctccctcccataaggggtttgagcagtggcagtgaccacacagatgagccacactcctgttgcatgtcctgcaagggcagtcagagaactcttccctttcactaagcaatcatctatttctttgagatttaaaaaatcttgctgctgtctgtggataa

SEQ ID NO: 61536 - DNA, 1268 bp, Homo sapiens
atcaatcgaaatgatcatatcatttttatctttcattctgttaatgttaacatcaatttgattgatttatgcgtaatgaaccagcttgcatcccagggataaattaaatcccacttggtcatgataactgatctttctaatgtattgttgaatttcttttgctagtattttgtggagaatttttgcatcaatattcatcagagatattggcctgtagacttcatttttcatgtgtcttggtgtggtttttgtatcagggtaatactggcctcataggatgagtttggaagtattctgrtcaaagtgctttccaagaataaactaccaataatcttcacattttcttctgtagtaattaatttatcaagttacttgtccctattgggttaatattggtagatcaactattactaatgatatggagaagagacaaggaaatactggctaggaaagggcagttcttttgcaaagaccccaccctcaagcctggatacccatggccctaaatgaggacaggcattcctgttttcatgctgaaaaactactttttgacctgccatgccccctatcctgtacccatattaaccccaggcctcaggctccagaagcagaaaaggagaggagcagacaaatagcagaacagtgtggcagagaaagagagaagagaaggggtgtctgaacgcctagaggagtttgactggtgatgtatggagaggatatcggctgctgagcagccaaactccaggggaagatcatcttcccactctatccccttcccagctcctcatccgtcttgctgaaagccacttccactacttaataaaccccctgcattcatgcttcaagtccgtgtgagacctgacactttcgggagactgaacaagagctcaggatacagaaaactgtcacactggccttctgctcttataaagaggcagagggtccactgagctggataacacttaagctgtccatggatggcaaggctaatagagtgcactgtaacaaacactcatttgggctttggtagtcacaggctcccacctctggaggctgctgtggggctggagtccagtgccctggctcctaccactgcctgtctatgtgctcctccctcccataaggggtttgagcagtggcagtgaccacacagatgagccacactcctgttgcatgtcctgcaagggcagtcagagaactcttccctttcactaagcaatcatctatttctttgagatttaaaaaatcttgctgctgtctgtggataa

SEQ ID NO: 61537 - DNA, 522 bp, Homo sapiens
ctcttatttttcagggtggcagcctgtctgcgccttgactcctctacgtcagcactgctcagctatggaaaagtcatgagggataatggtggtgtttgtagagccagcatgtgtcatgtgggttttcagacaaagggatacagagactcatgctttactaactcatcatctgcatacccattcgggaagaggaaatgactggggccacatcactccaagcttgtctctacttgtccttgtgacgagtatctcacgcacacaaagggacacttttttctcttgttttcactagcaagtcctatgtagggatgacatcatctctgtgctgatttactttaaaatactttcgtgcaatcgacaccctaggaggagggaggaaggaggaggtatttgaagtaccctaatcagacatccacgttccaagagttgttagttagcatttgaaacatcctaattagkgatccacacttaggagggggttacttagcacttcaaatattgttattgaaatctaccccacaa

SEQ ID NO: 61538 - DNA, 758 bp, Homo sapiens
tatttttcaaataataaaagacctgcagaaaccccataatggcttgtttttgtcagtgggccatgaagccacttagttatacataggcttttgccaggaattttaatctccttaatgtgatccacaagatgtgaccagttgtcacattcatcatgaagaacaatagtatacttatagtttgttaaagccaaggaaaattcttagggttaaatgtcaataaaccctgtctctaaatggcctcaartgaagtcaagatatagccaatgttctgttcttatgtccaagacagagaggcaaatcagatcattatcaaatcaattcaaatctatcttgcttggaagtatcacattttagctgcctatcttggtcttcgttctacctggtgctgaaaagaggcatccatattcttaaagcatagcttccattctatctcagatccttactcaactgatacagagaaaaatccataaaggaatgaagaaaaagtgtgtataggatataaatacttggagttacctggttatttcctaaggtaatagaagcctctctgtatttccaaaaaagcctcagaaaaaaaatatatattgctaaatgtttattacagtgctgccattctctgatttttataataaaaatggcaagatcattctagatgagtagattagatctattttttacctactcacaaaataaaaagtctgtctgcttagtggaaaggccccctctgtgtcctgcactgagtggaaaggcttgttcca

SEQ ID NO: 61539 - DNA, 758 bp, Homo sapiens
tatttttcaaataataaaagacctgcagaaaccccataatggcttgtttttgtcagtgggccatgaagccacttagttatacataggcttttgccaggaattttaatctccttaatgtgatccacaagatgtgaccagttgtcacattcatcatgaagaacaatagtatacttatagtttgttaaagccaaggaaaattcttagggttaaatgtcaataaaccctgtctctaaatggcctcaagtgaagtcaagatatagccaatgttctgttcttatgtccaagacagagaggyaaatcagatcattatcaaatcaattcaaatctatcttgcttggaagtatcacattttagctgcctatcttggtcttcgttctacctggtgctgaaaagaggcatccatattcttaaagcatagcttccattctatctcagatccttactcaactgatacagagaaaaatccataaaggaatgaagaaaaagtgtgtataggatataaatacttggagttacctggttatttcctaaggtaatagaagcctctctgtatttccaaaaaagcctcagaaaaaaaatatatattgctaaatgtttattacagtgctgccattctctgatttttataataaaaatggcaagatcattctagatgagtagattagatctattttttacctactcacaaaataaaaagtctgtctgcttagtggaaaggccccctctgtgtcctgcactgagtggaaaggcttgttcca

SEQ ID NO: 61540 - DNA, 758 bp, Homo sapiens
tatttttcaaataataaaagacctgcagaaaccccataatggcttgtttttgtcagtgggccatgaagccacttagttatacataggcttttgccaggaattttaatctccttaatgtgatccacaagatgtgaccagttgtcacattcatcatgaagaacaatagtatacttatagtttgttaaagccaaggaaaattcttagggttaaatgtcaataaaccctgtctctaaatggcctcaagtgaagtcaagatatagccaatgttctgttcttatgtccaagacagagaggcaaatcagatcattatcaaatcaattcaaatctatcttgcttggaagtatcacattttagctgcctatcttggtcttcgttctacctggtgctgaaaagaggcatccatattcttaaagcatagcttccattctatctcagatccttactcaactgatacagagaaaaatccataaaggaatgaagaaaaagtgtgtataggatataaatacttggagttacctggttatttcctaaggtaatagaagcctctctgtatttccaaaaaagcctcagaaaaaaaatatatattgctaaatgtttattacagtgctgccattctctgatttttataataaaaatggcaagatcattctagatgagtagattagatctattttttacctactcacaaaataaaaagtctgtctgcttrgtggaaaggccccctctgtgtcctgcactgagtggaaaggcttgttcca

SEQ ID NO: 61541 - DNA, 689 bp, Homo sapiens
tgatctgaagagaatccatgtacagctaagagaataaacagctccattcccattctagctgatcgtctccccaggacaccaggcaaagttgctgctgactaaggaggcccccctttttttgtttttgtttttgaagtggacatctttcctttagaaactcagcactggctgaggcaccaattaattttgcataagctgctacaggaccctcagatgctaatcagtttgttcataaccacagagtattgttttagggtcatgtacgtaacttctgcctccagccctgtggatttatttactgcttagtccctagttcctgcagctgtgtcctttcaatgactgctttatggtggccaagagagttgaggtcgactgccaggactcagagatctggaggaacacatggacacattattcttttgctctgaagctatccaattcctgttccggtcagaaggggagatagtgggaggatatctctgaaactgcccagcgcttactgctgatattcctcakgtctgacattattgcaagagaacaaacttagatctaccctctgtgtgttcttcagtggaaggtgaattactaacgaaagtgtaataatacaaaacacaattgagtgtagccttggctttatttgtaagacctactctggagatattattttctttactccaagactacacatt

SEQ ID NO: 61542 - DNA, 725 bp, Homo sapiens
atgtgctttcccaatatctttacatgaattgttattagatttgatggccagagaaagaagaggcagaggaaataggaagctttgacaagacaagtagaggtgatgcagtggccactgaaggcaagccacctacatcccaattatctacccacagctgtctctgccttgtgacacattgttyttgattaattgtacaattgctaatagaaaacattaactaatgggaattaatattaatctgtgatgaatagtcactggcatgtggcttgccttctgactgtttgaatttgattttcgaggatctgcacttatgcctatggaaagccttttgaagaccacaggagccaagggtgtagagtgcatatggagagaataatgttcattatcttattaaaccccagttcctcccagggagggtagaagatagctggcaaattttatctctcatttgcaaatggagactcattggcttacggtaattctataatatgccttaagtccagaagggagcaaatggagagctaagaatgaacagcgaattctccagtgctgcctgacaccaacctgtagctatcacatactaaagaccacagggacacgatggcaaggacctgtacaatcaggctgcccaggccaaaaaaaaaaaaaaaaaaaaaaaaggtcaactttgttatgcctctcctaaagcatttattctttatgctagcaccggccataatcagatg

SEQ ID NO: 61543 - DNA, 725 bp, Homo sapiens
atgtgctttcccaatatctttacatgaattgttattagatttgatggccagagaaagaagaggcagaggaaataggaagctttgacaagacaagtagaggtgatgcagtggccactgaaggcaagccacctacatcccaattatctacccacagctgtctctgccttgtgacacattgttcttgattaattgtacaattgctaatagaaaacattaactaatgggaattaatattaatctgtgatgaatagtcactggcatgtggcttgccttctgactgtttgaatttgattttcgaggatctgcacttatgcctatggaaagccttttgaagaccacaggagccaagggtgtagagtgcatatggaragaataatgttcattatcttattaaaccccagttcctcccagggagggtagaagatagctggcaaattttatctctcatttgcaaatggagactcattggcttacggtaattctataatatgccttaagtccagaagggagcaaatggagagctaagaatgaacagcgaattctccagtgctgcctgacaccaacctgtagctatcacatactaaagaccacagggacacgatggcaaggacctgtacaatcaggctgcccaggccaaaaaaaaaaaaaaaaaaaaaaaaggtcaactttgttatgcctctcctaaagcatttattctttatgctagcaccggccataatcagatg

SEQ ID NO: 61544 - DNA, 1198 bp, Homo sapiens
tccagaaaaaacattaataactttgataaaaaatcaacatcatctgcaatcccagcactttgggaggccgaggtgggtggatcttgagctcaggagttcaagaccagcctgggcaacatagtgaaacccatctctatgaaaattacaaaaattagtcgagcatggtggcatatgcctgtagttccagctacttgggaaactgaggcaggagaatcgcttgaatctaggaggtggaggctgtggtgagctgagactgcaccactgcactccagcctgggcaacatagtgagactstgtctccagaaaaaataaaataaaataaaaaaatataaaaaggaaaaaaagaaaatcaacatcatcttattatacttatttataattgaattgttagtaccttaacaagagtctgtatatttttcttcatgaagagtctcataggattcactaatccttctcatatctgtgttataatgagagcagttattgggaaaataattatttgtggtttggtttccatttgaatatttagtaaacattttaatttttgcttagcctagtttgtattgtttgactttattcattttgtcctttataactttagcttatttttctccatctgaatagccacaaacaagaacataacctggaagataaagcattgtatttgtgtctttgcatgatctggtccctgccaatgtttcaacatctccatctactgtcttagatccccaccctcttccacactaagctactctattcctaggaccccttaactcttcatggcttttgatacttttcacttcctgttttctctaaattgaataatcttccccctagtttttcttatgttagatttcttatcatccttggtaagtttctatctaaatgccaccttctctgagaggccattctgcttactctacctaagttaattccctgcctttaatatccatatcattaagctgttggtgctcctataacacttttcaaggtctgtaattatctcctaattttgtttgtttgtatcttttccatttgccttctagattagagaatgtgagcctcaagaggtacagtataagtgacccagcaggaatgtgaagtttgggagcacagttgtggcatttgtgtatgtttagtaatcatgagtaatggatacaatctaacaatctagggcaaaagataaatcaagtggtat

SEQ ID NO: 61545 - DNA, 1198 bp, Homo sapiens
tccagaaaaaacattaataactttgataaaaaatcaacatcatctgcaatcccagcactttgggaggccgaggtgggtggatcttgagctcaggagttcaagaccagcctgggcaacatagtgaaacccatctctatgaaaattacaaaaattagtcgagcatggtggcatatgcctgtagttccagctacttgggaaactgaggcaggagaatcgcttgaatctaggaggtggaggctgtggtgagctgagactgcaccactgcactccagcctgggcaacatagtgagactgtgtctccagaaaaaataaaataaaataaaaaaatataaaaaggaaaaaaagaaaatcaacatcatcttattatacttatttataattgaattgttagtaccttaacaagagtctgtatatttttcttcatgaagagtctcataggattcactaatccttctcatatctgtgttataatgagagcagttattgggaaaataattatttgtggtttggtttccatttgaatatttagtaaasattttaatttttgcttagcctagtttgtattgtttgactttattcattttgtcctttataactttagcttatttttctccatctgaatagccacaaacaagaacataacctggaagataaagcattgtatttgtgtctttgcatgatctggtccctgccaatgtttcaacatctccatctactgtcttagatccccaccctcttccacactaagctactctattcctaggaccccttaactcttcatggcttttgatacttttcacttcctgttttctctaaattgaataatcttccccctagtttttcttatgttagatttcttatcatccttggtaagtttctatctaaatgccaccttctctgagaggccattctgcttactctacctaagttaattccctgcctttaatatccatatcattaagctgttggtgctcctataacacttttcaaggtctgtaattatctcctaattttgtttgtttgtatcttttccatttgccttctagattagagaatgtgagcctcaagaggtacagtataagtgacccagcaggaatgtgaagtttgggagcacagttgtggcatttgtgtatgtttagtaatcatgagtaatggatacaatctaacaatctagggcaaaagataaatcaagtggtat

SEQ ID NO: 61546 - DNA, 719 bp, Homo sapiens
aaaagaacttgacaccttaccaaactcttagtaattctaatggtttttaaattgtcagagctttttttgccttgcttctactttctgaaacccatttttagagtggtttctcatgaccaagatcctgataaaatgccatgacaactggcccccaggctgtgggaggtggcgagggtcatgtggctataggcaggcttcctaatcacagtgatcgtggttgagcaaagtagagtaaaggtgatgccgcacagaccttgtagaattttacacatcgtggaaaagcctgaccaagtgtgaactctgtagcacagattgaaccatagcacagatcaaatcctaacacctgatctgacatttcattccattatgtcctgtgatcgcacacagttgcctatctgttcccgtccatcctgtctggcaatggcaaatcacggtctccagggtcatttaaagggatgctgtgttcagggtgaactcgttctacctgctctttggtttacgaaggactgcagcgaagtgaactagcgatggataagtacaggtaattgggatttcatatatggtcatggggttgcttgacagcggtctgcagttggacctgtgagggctgctgactgcagtgtcctggccctgattgcagaacaggatagtgttatctgtgctggccggaaagsctgcttaaaaccagacctcaaacttgggcagacgggcttgttctg

SEQ ID NO: 61547 - DNA, 531 bp, Homo sapiens
tagaataattatgaaagtttttcaagtctttatgaaatttttctacactattgattgcataacgtttgtaagactgtttccttattcatagaatagggataatgatatctcctacttaatctttatgtcaggattaagtgataccagaggagacagtcaagctcccagcatgggatggccgttagtgagtaaccactaattgcattggtttctattattgttgtagttactgtcattataatgagggcttcctggtcttacctgcttggtgtcacttaccaggtcttgtccttttggatgcctcctccctcatttggacatacttcctattactccagacgaatctgtttcatgtgctgaagctctccccttcgtgggtcaaaacgtatggaatttctgctttgtaaaaaaaaattcmtaagattttgattagttacattgcaggatctagttgtgattccactctgctgccttgaggtcccaccagtgatgactttattgttgacattttcctttacactgtttgtcttg

SEQ ID NO: 61548 - DNA, 531 bp, Homo sapiens
tagaataattatgaaagtttttcaagtctttatgaaatttttctacactattgattgcataacgtttgtaagactgtttccttattcatagaatagggataatgatatctcctacttaatctttatgtcaggattaagtgataccagaggagacagtcaagctcccagcatgggatggccgttagtgagtaaccactaattgcattggtttctattattgttgtagttactgtcattataatgagggcttcctggtcttacctgcttggtgtcacttaccaggtcttgtccttttggatgcctcctccctcatttggacatacttcctattactccagacgaatctgtttcatgtgctgaagctctccccttcgtgggtcaaaacgtatggaatttctgctttgtaaaaaaaaattcataagattttgrttagttacattgcaggatctagttgtgattccactctgctgccttgaggtcccaccagtgatgactttattgttgacattttcctttacactgtttgtcttg

SEQ ID NO: 61549 - DNA, 682 bp, Homo sapiens
aagagcagcagctaaatactatggttggaattcggaatgttggtttatgaactattaaaaagatgcttttcatttatgttaccagtgtaaggcattatataaatgtcatctataagtgactggaaagaaggaaaataatgcaagggttttctgctattaagcatttatattagatagtcaatagtattctttagctgtccaggttgaatggtggtttccagcatcctaaaggcattcagggaaatactttgcagtcttgttaaagcgatgctgaatatgtctgagatatgactcactccttacggtgaaaggtgggagaagagaaacattgccaggcatctccctggctgtatggaagccagagtgtttatgaacactcaattttttttgttcatttattaatctaatgggtattgcatgttcttctctgttcctgctactgtgttaggcgtctaaggaagagttctcctctgatacatagagtatttgatatacagagaagctgatggagasatgggaaagccgaagaaattccatgagcttgatggaaaaaattgccatgtgtgggaggcaggaaccttgacagaaagagagggagacaaagaatctgagcacattgctttaagatactgatgccctatgcagctcaagtatatcatgagccttaacactatttgtacca

SEQ ID NO: 61550 - DNA, 682 bp, Homo sapiens
aagagcagcagctaaatactatggttggaattcggaatgttggtttatgaactattaaaaagatgcttttcatttatgttaccagtgtaaggcattatataaatgtcatctataagtgactggaaagaaggaaaataatgcaagggttttctgctattaagcatttatattagatagtcaatagtattctttagctgtccaggttgaatggtggtttccagcatcctaaaggcattcagggaaatactttgcagtcttgttaaagcgatgctgaatatgtctgagatatgactcactccttacggtgaaaggtgggagaagagaaacattgccaggcatctccctggctgtatggaagccagagtgtttatgaacactcaattttttttgttcatttattaatctaatgggtattgcatgttcttctctgttcctgctactgtgttaggcgtctaaggaagagttctcctctgatacatagagtatttgatatacagagaagctgatggagagatgggaaagccgaagaaattccatgagcttgatggaaaaaattgccatgtgtgggaggcaggaaccttgacagaaagagagggagacaaagaatctgagcacattgctttaagatactgatgccctatgcagctcaagtatatcatgagccttaacacyatttgtacca

SEQ ID NO: 61551 - DNA, 1060 bp, Homo sapiens
atgtatctctatatttgcatatcctgtatatttatatatcctgtatatttgcatatcctgattgtcttttagcatcaccaccatcagatatcaggtaaacttattatacttcaatgacggtaaatrtttggttaaatatttggatcagagatggaatagagaaataatgttaataaaaatgggaaaaacatcatgagccctacttttcccactcctgcagttatagactctcaagacctttaacctacaatcggccatgacagagacctgagtttgtcctaagcaaatatggtgccctctgttaggaaccacagcccgttcatgggcaggatgggctcaccatgtctggacctgccttgagtgtctgccttccaccagctgcactctcttgcagtaatacctttgttttacagggagttttaatggttggacatggttttctgcaggtaagagtccccctctggtaacaaaccctgaagtttgaagcccagactatctgacctataccttgaccccttcttgcttttttttttttctatgtcactttcccccacctgcaatactctaactttgctccctaacccttctctgaccttgagagcccccaaaaaattagtgtagacctcagcaacctgaaaaatagtacctctgcacccaaactcctgttgctcactcccacacgtccttaaacaatacggcaacaccactcaaaccacagttttccatattcttttggacgtgtaggtgggactgctagtcaactctaaaaagggccaacccttctccctggttagttcaaacaataatagcagtaataaccgtatcatcatcatcatcatcatcatcatcatcatattactattgtagtttgacttgcaccatgttccaggcactgctctaagccaggggtcctcaagccccaggctgcaaaccagtaccagtctctggcctgttaggaactggaccgcacagcaggaggtgagcagcaggcaagagagcatgaccacgtgagctctgcctcctgtcagatctgcggtggcattagattctcataggagca

SEQ ID NO: 61552 - DNA, 1060 bp, Homo sapiens
atgtatctctatatttgcatatcctgtatatttatatatcctgtatatttgcatatcctgattgtcttttagcatcaccaccatcagatatcaggtaaacttattatacttcaatgacggtaaatgtttggttaaatatttggatcagagatggaatagagaaataatgttaataaaaatgggaaaaacatcatgagccctacttttcccactcctgcagttatagactctcaagacctttaacctacaatcggccatgacagagacctgagtttgtcctaagcaaatatggtgccctctgttaggaaccacagcccgttcatgggcaggatgggctcaccatgtctggacctgccttgagtgtctgccttccaccagctgcactctcttgcagtaatacctttgttttacagggagttttaatggttggacatggttttctgcaggtaagagtccccctctggtaacaaaccctgaagtttgaagcccagactatctgacctataccttgaccccttcttgcttttttttttttctatgtcactttcccccacctgcaatactctaactttgctccctaacccttctctgaccttgagagcccccaaaaaattagtgtagacctcagcaacctgaaaaatagtacctctgcacccaaactcctgttgctcactcccacacgtccttaaacaatacggcaacaccactcaaaccacagttttccatattcttttggacgtgtaggtgggactgctagtcaactctaaaaagggccaacccttctccctggttagttcaaacaataatagcagtaataaccgtatcatcatcatcatcatcatcatcatcatcatattactattgtagtttgacttgcaccatgttccaggcactgctctaagccaggggtcctcaagccccaggctgcaaaccagtaccagtctstggcctgttaggaactggaccgcacagcaggaggtgagcagcaggcaagagagcatgaccacgtgagctctgcctcctgtcagatctgcggtggcattagattctcataggagca

SEQ ID NO: 61553 - DNA, 571 bp, Homo sapiens
ggggggcctgtgctgcctcatgacccctcagcatctgtctccggggcttgttgaatggaaagggtctgggcygttttgcagacatggggcctctgtgtgccatctttgctgcagaggcagcatggaacaaacttttggggaccttatgcattagtgcattggatcattttagaaaataacctgcagtattggacctgtttcttttctttcttctttttattaatgtgctttaccttcaggtagctgcctgcatttccttaagggcagactgggaatagctgagcaactaaagaagggctcagaagcccttattaaggtagttgatcaattctagaagtttatttagcattaagggaacccatgccctttcctattctagaaggcctcgtgagcactaactgagtatttccaaaagctgtagtgcagtatgcaacacctataaatatagtgtgtgtaggcttaggaaagccatggcgtttgccagtcctggctccaatcctaagtcagcaacactgcgatcttcattatgtgcaattttctctattttgtttaactttttaactttttgaaa

SEQ ID NO: 61554 - DNA, 571 bp, Homo sapiens
ggggggcctgtgctgcctcatgacccctcagcatctgtctccggggcttgttgaatggaaagggtctgggccgttttgcagacatggggcctctgtgtgccatctttgctgcagaggcagcatggaacaaacttttggggaccttatgcattagtgcattggatcattttagaaaataacctgcagtattggacctgtttcttttctttcttctttttattaatgtgctttaccttcaggtagctgcctgcatttccttaagggcagactgggaatagctgagcaactaaagaagggctcagaagcccttmttaaggtagttgatcaattctagaagtttatttagcattaagggaacccatgccctttcctattctagaaggcctcgtgagcactaactgagtatttccaaaagctgtagtgcagtatgcaacacctataaatatagtgtgtgtaggcttaggaaagccatggcgtttgccagtcctggctccaatcctaagtcagcaacactgcgatcttcattatgtgcaattttctctattttgtttaactttttaactttttgaaa

SEQ ID NO: 61555 - DNA, 1343 bp, Homo sapiens
ctacaaattacgcatcatcttagctttatggttgtaatatgattatatcttggagataattctattttagtactacagtgttttcttattcttttttattgctgtaaaatattccattgtccatggatatacatctgggctatttttagctgttccctactacagaggaggatttgttggacaaccttatataggaagctagagctctggggagtatactaagatttcccaaagcagtcagctcagtattaggctgcttcatgggggctgccatggagagggtgtattcagagggaccccagaggtctttatatacccaccaacccaagattgtaaaagtctatgaatctttgacatcagctccaatccaaggctagttataatctttataaacatttgcttgtaccaaggtcttgctgtgtagatactcaagaacttcctggcttttcatcctgttcctttgtcttctctgggcctcagtttcttcatgtgtaaaattggaaagctggagtataagttgttttcagaccttttcttaaaccagtgttgttattttttttaaaccagatgaaatttaggaggaactctaataaaagcccagataaaaatgaggtatgatatagagtggtgtcttagtttcttctttatttctgtgcagatagtattctgtagaatctccgaattaactctgagaagctgtaaggatctgtggaagattatgtgaaaagaaacagatactagctggaaggttttctgtttatgtctgtgacaagattataataatgactggttaccatgattcacagggatctagggttcttttgtgatctaccgtctaccagtttctacataaattatgaaaattagaatgactctgccaagaagggaaaagaccagaggattagagcatgaacagtaggtctgggtgagatgatgggaagaagggaaggcccccctcccctgaaaaaatggtaagaacttgggaaataaaggagggaagacattcatctgactttcagattcatggcttgatcagcaggtatcgtttgtgagcagattctttttttttgagagagaggaagaagtccattttatagaaaatataactttttcaaaaattttttttgtaacatgttttcctgttgtataatctctttaacttttaagttcaggggtacaagtgcaggatgtgcaggtttgttacataggtaaacaygtgtcatggagtttgttgtatagattatttcatcacccaggttttaagcctaattttcctgatcctctccctcctcccacgctctgccatccagtagaccccagtgtgtggtgatcccttctatgca

SEQ ID NO: 61556 - DNA, 666 bp, Homo sapiens
ttctacctagtccaaatgtagttatctttctcaatagcaaatgtgtttgaaattaagtttgtgaaattttatgaaactaataaagtactgtttgcctttataaaatctgtttttaattaagaaccaaatactgaaaaaaatgtaaaattatttgatataacctgacacatattttttgaacttggtattctaagtttaaaaagaaaaaaaactttcagttttcatcccacaaattacaaaaatatctaactaaaactaytttgtaatattaatgagttcggtaaaacaaaaatcgttgatgtttaaagaatcaaaagtaaaacttttctaataaaaaaccttgatgacaataacaatatttattttaaattatattttattctgtctgaaatttaaaactttaagaatgtattcaaattgttaattcaagttctgataaaaagtgatgatttctcaaaaatgtgtttaaacagttacattttgaaatctgtatttgtctaccatataaaattaaaataaatataatatttctacacagctgttcctagaacaagttctacacaatgcagttctgtgcctgaaccaagattcggaagaagaattggcaatgaatttgcagtcggttcatcggttctttttgattgtaatccaggatatattctccat

SEQ ID NO: 61557 - DNA, 421 bp, Homo sapiens
aggttagccaaaaatcttattgtttcgaagttgtttttgcaatagtatatctaacttgcattggtaaatagaatgtatactatctaaaattatggatatcttaatagtttagaattttatagtatttcagggtaattataatgacgcttggcttttgtagagttccatagacatagaaaatatagaaagtagggaaattactctcttttctgcccgaagaacatatctgggaatttttattattttttaaattacataatattaaattcaaaaaagagtggtaagacttaatctcaggttataaaataattctaatgacttgagttgtttctcattaaasttatattagtatgtgatgttaaaaataagatatgtgtatatatatatgtatatatatatatatatatatatatatatatat

SEQ ID NO: 61558 - DNA, 710 bp, Homo sapiens
tgcttaattaataccacttcatgccatttttaaatgtcacaacaaacattttctaattttgcattaagactgctacaaagctttcttaatgcaaagtttcttcttatttaggatcatggtgtagtatagagaaatgaatgcaacttcttttataaaagtgctaaatggagaagtaataaactcttttaaattggggtttaaaagattatacaatatatgcaatttttaaataaaacctgaagtaccaccctagagagaaaatatctcaacatattagtaaaagaaaacatattagacaaagtaatttcagtttttaaactcaaaacttaaaaagcttttatatttgaaactgaggcacatttaataaaatgtgtgtccttcttagaaatcaagtaccttttgtttcttagtatgtagttagtgtcaattcctttcaggtcatataacatygattagaatataatgttgcaggtttaattctatcttcagtatctgaaaaatttgatgccctcttaaaaatctgtatttaatatttgctggtaaattattttttcctattaaaatttcatgttttaagaaattgtgctagtaaaacattatggtctgtgatgtagggaagaggatgttgggctaatagcctttagagttaactgggcctactttttcctcttactggctttgtagcttgagacagacttttatcatctttg

SEQ ID NO: 61559 - DNA, 902 bp, Homo sapiens
gcattctgctttacacatcatgttaataatgaccgatcaaattcattcttctctcattgtctgggattattgccccattgtctgctcagatagccttttttgctcttttaaggatcagctcaaatgttacttctgctatgaaacattgctagattccccatctacctcattttctaggtaaaattgaaccgttatatctttgactccctgaacttgaaatgagcttctatagtaatatctgtaatgctttattatacctaaatatttgcatgtcaayctttcttaactggtctgaatggttctattttattgatatttgtatactctagcagggcatttgcatacattagatttataataattgttgattgattggatgtattattgaagtttccaccccatgtttacattggttctttaaaatattaaatatatatctgaaactctattctcggatgatttattgttatcatgtggttacggtcatgaccatattttcagtaccatatatgggatactatagtggataccatggtgtgttatgtagatcccttttcagaatacagctgctaacatatactcccaggatgcgaagcctctttaggaattaataaaaagaacttgatgagaactctcctgctcaaggttacatacacttcctgggacctcctagaaaggcccaagtcctttgctcacaggacaaccctgaaggacctaagatgtttcagagatcattttgcagtgagctgaatctttggatgaaacaacattgcagcctaattctgaccaatgctgattttttctctccacagatatttgcttcaagaagagaacacttacattcttttatgcagttatagagggaatgtttgtgccccaccccacaattcatatgttgaaat

SEQ ID NO: 61560 - DNA, 902 bp, Homo sapiens
gcattctgctttacacatcatgttaataatgaccgatcaaattcattcttctctcattgtctgggattattgccccattgtctgctcagatagccttttttgctcttttaaggatcagctcaaatgttacttctgctatgaaacattgctagattccccatctacctcattttctaggtaaaattgaaccgttatatctttgactccctgaacttgaaatgagcttctatagtaatatctgtaatgctttattatacctaaatatttgcatgtcaacctttcttaactggtctgaatggttctattttattgatatttgtatactctagcagggcatttgcatacattagatttataataattgttgattgattggatgtattattgaagtttccaccccatgtttacattggttctttaaaatattaaatatatatctgaaactctattctcggatgatttattgttatcatgtggttacgktcatgaccatattttcagtaccatatatgggatactatagtggataccatggtgtgttatgtagatcccttttcagaatacagctgctaacatatactcccaggatgcgaagcctctttaggaattaataaaaagaacttgatgagaactctcctgctcaaggttacatacacttcctgggacctcctagaaaggcccaagtcctttgctcacaggacaaccctgaaggacctaagatgtttcagagatcattttgcagtgagctgaatctttggatgaaacaacattgcagcctaattctgaccaatgctgattttttctctccacagatatttgcttcaagaagagaacacttacattcttttatgcagttatagagggaatgtttgtgccccaccccacaattcatatgttgaaat

SEQ ID NO: 61561 - DNA, 902 bp, Homo sapiens
gcattctgctttacacatcatgttaataatgaccgatcaaattcattcttctctcattgtctgggattattgccccattgtctgctcagatagccttttttgctcttttaaggatcagctcaaatgttacttctgctatgaaacattgctagattccccatctacctcattttctaggtaaaattgaaccgttatatctttgactccctgaacttgaaatgagcttctatagtaatatctgtaatgctttattatacctaaatatttgcatgtcaacctttcttaactggtctgaatggttctattttattgatatttgtatactctagcagggcatttgcatacattagatttataataattgttgattgattggatgtattattgaagtttccaccccatgtttacattggttctttaaaatattaaatatatatctgaaactctattctcggatgatttattgttatcatgtggttacggtcatgaccatattttcagtaccatatatgggatactatagtggataccatggtgtgttatgtagatcccttttcagaatacagctgctaacatatactcccaggatgcgaagcctctttaggaattaataaaaagaacttgatgagaactctcctgctcaaggttacatacacttcctgggacctcctagaaaggcccaagtcctttgctcacaggacaaccctgaaggacctaagatgtttcagagatcattttgcagtgagctgaatctttggatgaaacaacattgcagcctaattctgaccaatgctgattttttytctccacagatatttgcttcaagaagagaacacttacattcttttatgcagttatagagggaatgtttgtgccccaccccacaattcatatgttgaaat

SEQ ID NO: 61562 - DNA, 588 bp, Homo sapiens
taccacttttctgctttgaagattttaaagtaatattctagtcttctgaaatcactaaaattatctagcttcatttcaaggtcattgatattacaaaattatgagacaaatctagttctgaacttttaaacctgcattattgtaattaaaaagttgcattctaggtctgcctcctgctgtttctatttgagcaatttaaattctcagaacctttattttctcttctgcaaagtggacctactaataataccaagcatagcaataatattccacaattcctgacacagagtagatatgagaaaactgttggttaaatacaaatatcacaataattatgacaataattatagtaattcacacttatataggcagttcaatattctgagcactgttctgtgaartaatttgtttttaaaaaccgtatttggtagagaagcagcagcaaaatgtcataacttcaagcacttgggacttgacgttatactttctgggtttgaatgtttactacttgatagatttataagcttggaaagttacttaacttctctatgcctcagtctccttatatgtaaaacaatgccaagagag

SEQ ID NO: 61563 - DNA, 968 bp, Homo sapiens
catatatgtgatacacaattatatagttattattttgtcttgtgtgatcatgcaatactgtgaggtgaattccctttgtgatctgcctcctaaactttctagatgctttatgcaaagcttgattcttggaaaacccactgttaatacattttgaagtctacttctgttcaattatcttaatttacctttcagaccttggaataagctgtatttctctacaaagggctatgaacttttctttttctgcctttcatgaagctaccagctagctgtaatttgctgcstgtttattctactttccagcataaatacataaaatgttatgattgctccaatgtcatgggattactggaaattaactctgcaaccgatgaaagctacctcgtttcaatgtttattcttttaattccctctcctctttttttgttcagtgttgtttttcatcattatttccaaattcgggtatctgctgctgtcttacaatatttacttatagaataataccatcaaagttacattattctttaatattccataataacagcacatatgaaaaagacataaagcattgaagaaagagaggatgattaaaaaatagaaaaaatggtaaatttagttttataaatctggtattaaagtaccatataaaaataaaaaaaattttattacttggagtatttataatacacacacacagatatagcttttgttaaatgcagcattttctcatgttccactctttggtcctatccacttccatatctagtactccttcatatgaatcatctcatggtgatgtcaccatgattcacaattttaaatgccacttaggagacattgtcccaagactataaacccagaaaacagttcacaatataatttgagttccagacattctaaccaagtgcctaattgacatttttatgtggatacttcacaagtattttgaacagtgttaaaacatgaat

SEQ ID NO: 61564 - DNA, 876 bp, Homo sapiens
cttccatggctctcttcagggtgcacatccacttttcagagttycacttccatcattattttgttttgtgtgtttctaatctctcctgaagcgacctccagctacttctgagctgcttgctggttgcccaaactttcttccaaggtaccagcttttgttttcaccactgctttagttacaaagctgcacagatcttgaggggtctgccccaaaccaattcttcccataagcccttgtcttagtcagctgaggttgttataacaaaatacctaggtggcttaaacaacagacttctgatcgtactggaggaaatccaagagcagggtaccagcatggttggatgcttggtgaaggctccgtttctggtttacatattgccaccttctcactgtatcctaacacgatggagagagaaagcaagctctctggtgacacttcttataacggcaataatcgcatcatgggggctctatcttcatgaccttatttaaatctcacttcttcccaaagaccctgtctcctaatgctgttattttcggggttagggcctcaatatgtgattttggagggaaacaagcagtccgtaacagcccccttattttaagtgccattttgtggaatacaatatttttcaggaacatgtacattgaattacagtagaaatgcctatttttctatattcactgctcatattatagttgatcagtttctaaagctaggatattgcaaatataataccacaaatacctaaggcagtttgataaaactggaccttgtctttttatctaaaagcacatgacattattatttagtttcattaatcttttctcctaggttttccctgtaagatattacataacttttcatgtcctgaat

SEQ ID NO: 61565 - DNA, 876 bp, Homo sapiens
cttccatggctctcttcagggtgcacatccacttttcagagtttcacttccatcattattttgttttgtgtgtttctaatctctcctgaagcgacctccagctacttctgagctgcttgctggttgcccaaactttcttccaaggtaccagcttttgttttcaccactgctttagttacaaagctgcacagatcttgaggggtctgccccaaaccaattcttcccataagcccttgtcttagtcagctgaggttgttataacaaaatacctaggtggcttaaacaacagacttctgatcgtactggaggaaatccaagagcagggtaccagcatggttggatgcttggtgaaggctccgtttctggtttacatattgccaccttctcactgtatcctaacacgatggagagagaaagcaagctctctggtgacacttcttataacggcaataatcgcatcatgggggctctatcttcatgaccttatttaaatctcacttcttcccaaagaccctgtctcctaatgctgttattttcggggttagggcctcaatatgtgattttggagggaaacaagcagtccgtaacagcccccttattttaagtgccattttgtggaatacaatatttttcaggaacatgtacattgaattacagtagaaatgcctatttttctatattcactgctcatattatagttgatcagtttctaaagctaggatattgcaaatataataccacaaatacctaaggcagtttgataaaactggaccttgtctttttatctaaaagcayatgacattattatttagtttcattaatcttttctcctaggttttccctgtaagatattacataacttttcatgtcctgaat

SEQ ID NO: 61566 - DNA, 1720 bp, Homo sapiens
  misc_feature (1)...(1720): n = A,T,C or G
cccaggctggagtgcagtgggacgattttgactcactgcaacttccgcctcctgggtttaaatgattttccagcctcagcctcctgaaaagctgggattacaggtgtgcagccccccacctgggtaactttttttttttttttttttttttttttttttttttntgagacggagtctcgctctgtcgcccaggtcggactgcggactgcagtggcgcaatctcggctcactgcaagctccgcttcccgggttcacgccattctcctgcctcagcctcccgagtagctgggactacaggcgcccgccaccgcgcccggctaattttttgtatttttagtagagatgggttttcaccaggttggccaggctggtctcaaactcctggcctcaagtgatctgccctcctcagactccaaagtgctgagattacaggtgtgcccagcagctttctacttattctttaggctcttgtttataaacttagttttgtttagaacattatctgcaccacgctatctccaggattacttttacttctaaatgtagttccattgtagatgttctttcctctagaaaatctttcratgtatcccaaatcttgcgttacataactattttattttgtccctgtagcaacctatcctttccttatcatgtcacttacttcattgcattgaagtaatctgttataattttccaagcctctatttcccaaaaattctgagtttctagagaaggagaattatgtaaatgcatttttgtatattcagtactggtactgaatatgtgctcaataaattgtggatgacctagtgaattttgacattatttgattaggtgatgtttagaccctattttcttggatgcttttaattagccgtagcatagatattcccagtgccatgtatgacaaatggtaataatactgatgaaaaagatagatcatagaaatagacagatgataggtattatcttcattttatagatgaggaaactgaggtttggagaaatttaaaataaattttcaaggtcatgtagttagtgcttaacactctataaattgtattgctgtgtatatatatatatatgtatgtatatgtatatatatatatatatatatatatacacacacacatagtgtttccttagctagtcagtaagattcttgaagcaaggcttgtgctttcctgtactgccttagccagacactatcaacatttggcttttcaggcgatattcactgcaagtgtggggctaccactagggtttgaaacaaaatttataaatttctcatcttttaccctttcctctgtcctcatgttctcctctgctagcataaaacctgttcctcaaatatttaagccaaacttgtcctatgttttaatgttaccctaccttttatagttgaatgtcaatacaagaatctattctgtaagcaaagctttattgtataatgtagtagttactcaataaaaatattaattgaataaaatgtactcactctaaggtatgacaggcttagttattttcaacctatttaaatgtttatttagcaactatcacacacttttctctatgaacgagtttttattttatgtgctatggatacaaaatcaatttgcgtaattctctggctttaaataattcccaagtgtgaagggaaaaattttgttattaaatgtaattaattatatcacagaatggtgcttaaattaagaga

SEQ ID NO: 61567 - DNA, 924 bp, Homo sapiens
tgcatttattcacacatcttgtgattcaggatataaatggactctttatatttaatgaccaattaggattttttaaaacccttattgcttaaaaatgagactcatatgccttagaaaccccaaacacaaaacacgcctactggtaccttctgggagtttagcaaagcatatattttgaactgttggccaaaataaccccatctgagtgacaatttacacacatgtcacaccttttcatctcccttgttttcttggaaaaggtcaaagccatcaagacgacatgctcagccagagtcagggagagtcatcatttcacaaccgtgaagtggaactcacacagcaaatgaggctaatcattcagcaagtacaaggaaaagagattatgagatcataattttctcaccaattgagaatcactgtgcataaaaataggaattactaggaaaaatttagaatacttaccaagaaaataagagcactaaataaaatgatctctcgtctggaaaatgactttccaggcaaaacagaaagcactcagaaatacaaacgataagatagcaagaaagtaaatcctactgaaaacaatttaattctgttgctttattctcaaaatatgatttgtcacacagaatgccctgagtgaccttgcagatgccactcacctggcatcacgagaactcttcttgctggcaagtgggaaataattctgttttcctttatctggccacaaacataaatgacgcattctttaatgtgttagtaaaagtgttgtaaagactgattagattaattgagagagsctgatgtgcacttgccttttaaaaccttataaaaatcctgcttaactttttctagatgaccatctcccaacaaaaagattctttgataatgtaggaaggaaaaattccttctcagcttttatgc

SEQ ID NO: 61568 - DNA, 1347 bp, Homo sapiens
ggcagtgcttaataaataatggctacagacatactgctcttgctggtggtattaagagaagtttcccaaggtgatgacaacattggttcatagtagagccaggattcaaatccaggtattttgaatccaagtccattattactcatttctctacaaatggccaatgctgaaattaacctggggttacggggatgctgaaggccttgtgggttaacaatagagccagagaatgggcagtgacctcaggacaggaaaccacaatgagccaaatggctgggagcatagaagttttctataccatggttgcttggtgtccctgcctcttatcagagccagaagccccagagagggagagcaaacaggctctcagatttctatctaaagctagtttctttttttcctactttgccattagctaggatgaatgctaattactttaagctaaccaattaattgacagtgagaggcggtatagcataatagtgaaaaccacagactctacagccaaaagcctgaatcgaatcccagsttcaccattttctagccatatgactttgggcatgttatttaatctttctatgcctgtttcttcaactataaaatactgataatggtagtacccactttgctggattacttgatataataattaatatatataaaatgtgtaaagcaacatctagcatattgtaagtgcttaaaaagtgttcgctaaaaattctttactcaagaaagaataatttctttactccaagaatgaataactcttattggttttgtccactgcagtatctccaatacctcgatcatgactgggacatcagagatattcaataaatattatctggatggagcaagtcctcacatcaccacttcttccaccgacagccacaatgcggtaaggtctgtgacatttgcagcgaggatttctgagatcatatcaataaaatatctctacccattttacagaagagcaaagagaggcccagacaggctctatatacttatgcagttatagatttctccagcaagatagtttaggtgatttatctgaggtcttatcctagttagtggcagagttaaatgaagacctatgtcttttgacttctagtttttccttctgtttgatttcaccctttagtaaaccgatggaatcacccattgcctttcaaaaagtggacctggaaaggaaggaaacagggacagtaggtaggatgggcaggccctgctgttcttttgcaaaatctaggtagttgggttaagaaatcgatttcattcatttccagaaatgatgtaagaagatttagtgcacatggccagtttgacagtccatttagtaggtcacat

SEQ ID NO: 61569 - DNA, 289 bp, Homo sapiens
ccccaggaggtatttggcaatgcctggagacattttgggttgcagtaagtgagggggtgctgcaggcatctagttgagaaagaccagggatgctggtaaacatcatacaatgcacaggacagccacacacaacaaagagctgtctggccscaaatgccagtagtgtgaagggcaagaagccctgtgttacagaagctcacaggggatgagtatggaccccctctttgtggggcatggagatgaaccgctaacttccttggacaattgcccagtgcatcctatcttaaca

SEQ ID NO: 61570 - DNA, 622 bp, Homo sapiens
tcaactatttacaactctgcaaaatcaagagacaccctccrccccattccagaagctgccaaaaaccattatgtgaatccacaatccctgaccatttcccagagaaaattttctagaaattaatggatgtccaggcccagagcagccctcctccacttcctggggcattctccacaccatatgggtccaagaaatggtcttacgactgctttgctgtaaaatattccaacaccaagaactcccgagaagcgacctgtttgaggatgaagaggctgaatctttcagggtcgtcctgcttctgcgtcttcttccttcagcattctccacagccagggcctgcaggagtgacccaaagagcacagtcaggacatctggcttcagcatgggaacagtgagtatcaatcagggagaggtcggaggagtgacctgggatggagccctgaagaacccagcagctgatgggcccacccaggacgaggacccagcaaaggctgctgaggaaggtcccgggggagaagaggacttaggagaccaagacgttcaacttcattctggttattcaggctctaaacccaagtcatcatggctttcctctttccctcacaccccacgtctaatccat

SEQ ID NO: 61571 - DNA, 661 bp, Homo sapiens
ctcattatccaaggatctgaggttagtgatccttaggaagaactgctaaccttgagccaacttctctttatcctcaggttcatttcaattcagtgagtgctctggggctcctcttacagcttcacataaaggcattggtcatttatattcacatgccaaatccatgctttcagggaaaaccttcttgtacacaaatcctcacacatttgtaggcagacaacagtactgatcgttttttaccagtcgttcaggtagtttgctagggctgagctgtactatgtagaatatttaggagattttcctgagagattctttccctcctgagatgcataatttgcaagctggggaagacatcagtcttttgtaagtctgagatttttcaatttaaaatgaaatatttcacttctgggaactcttctccatggaattrtaaagtgcccctgtgtcaatgtgtaatttattccacgagagctttgtcctgggagcattgcagtggctggaaattaagaaacttctgtttcaattccaacttcacccgtgacttctgtgtgaccttagggaaattagttaacctccttgggttttatgtgctttaaaatgaggatcagactattacctcattgtctgggctcaaagctcaataaagagctaaagcccagtg

SEQ ID NO: 61572 - DNA, 693 bp, Homo sapiens
tgtccaaacacgtccccatttccccgtcttgaataaactgttgcctggcattcatggctctgccaggattagtttggatttcaagtcaccccagcaggatttcttccacctgcctttgctcaccttcatctcatcctgtcatatctaacttccagatcaagcccacttcacttaagaggcccatggtattagagaggacattttttattatacacttggcttcctctatacctctgcttctacttcctttctgacttgactttccactgtactgtattttctttgtttttttgtctttgtttttgtttgagatggagtcttgttctgttgtccagcctggaatgcagtgatgcaatctcagctcactacaacctccgcctcccaggttcaagcaattctgctgcctcagccttccaagtagctgggattacaggcatgcactgtcgtacccggctaatttttgtatctttggtagagacagggtttcgccatgttggccaggctggtctcaaactcctgacctcaggtgatctgcccmccttggcctcccaaaatgctggagattacacggggcccagcctttccttctttttttttttttttcttaaaacagggtctcactttgtcccctaggctgaagtacggggggccaatcaaggctcactgaagccccaacctcctggactcaaggga

SEQ ID NO: 61573 - DNA, 693 bp, Homo sapiens
tgtccaaacacgtccccatttccccgtcttgaataaactgttgcctggcattcatggctctgccaggattagtttggatttcaagtcaccccagcaggatttcttccacctgcctttgctcaccttcatctcatcctgtcatatctaacttccagatcaagcccacttcacttaagaggcccatggtattagagaggacattttttattatacacttggcttcctctatacctctgcttctacttcctttctgacttgactttccactgtactgtattttctttgtttttttgtctttgtttttgtttgagatggagtcttgttctgttgtccagcctggaatgcagtgatgcaatctcagctcactacaacctccgcctcccaggttcaagcaattctgctgcctcagccttccaagtagctgggattacaggcatgcactgtcgtacccggctaatttttgtatctttggtagagacagggtttcgccatgttggccaggctggtctcaaactcctgacctcaggtgatctgcccaccttggcctcccaaaatgctggagattacacggkgcccagcctttccttctttttttttttttttcttaaaacagggtctcactttgtcccctaggctgaagtacggggggccaatcaaggctcactgaagccccaacctcctggactcaaggga

SEQ ID NO: 61574 - DNA, 693 bp, Homo sapiens
tgtccaaacacgtccccatttccccgtcttgaataaactgttgcctggcattcatggctctgccaggattagtttggatttcaagtcaccccagcaggatttcttccacctgcctttgctcaccttcatctcatcctgtcatatctaacttccagatcaagcccacttcacttaagaggcccatggtattagagaggacattttttattatacacttggcttcctctatacctctgcttctacttcctttctgacttgactttccactgtactgtattttctttgtttttttgtctttgtttttgtttgagatggagtcttgttctgttgtccagcctggaatgcagtgatgcaatctcagctcactacaacctccgcctcccaggttcaagcaattctgctgcctcagccttccaagtagctgggattacaggcatgcactgtcgtacccggctaatttttgtatctttggtagagacagggtttcgccatgttggccaggctggtctcaaactcctgacctcaggtgatctgcccaccttggcctcccaaaatgctggagattacacggggcccagcctttccttctttttttttttttttcttaaaacagggtctcactttgtcccctaggctgaagtacggkgggccaatcaaggctcactgaagccccaacctcctggactcaaggga

SEQ ID NO: 61575 - DNA, 532 bp, Homo sapiens
gggatccggagaaatcactccgcacagtgcctgacacccagcaaaacgctcaaagatgtcagctgtttctatctttcttggggctcatcacttgaaactcaatgtcaactttattcttgacaaattacaagtccgggtgtctagttgaacatctytcatgaaaagcaagcaggttttagctctagcagccctacctgattctagtgaatggcttcatttcatcaagaaagtgcttaagtataatgagagacttgttccaatattcctgtatctgttgtctgcctctgattctgtaaccaggtgcaggcatctcaaagctaagtctaacatagaacccaggctcttcctgccccatgaaaggtcacgtctaatgtctgatttggtgatgaaggacagaaaagatgtttggtcacctggccaagatgatgaaaccccatctctactaaaaatacaaaatttagccgcagtggcaagtgccgataatcccagctactcgggaggctgaggcaggagaattgcttgaacctgggct

SEQ ID NO: 61576 - DNA, 1136 bp, Homo sapiens
ctcctccacacatccaatgcctgatcccgctatggtgcacccctgccagggggccagtctgtgagcagaaaggaaggtctaaatcaacagggccttaaggcatccaccaaagcttgacatctctgtcctggtcagcactcggggatcaaacatctagtcctgacttatctacatcctgagggtgtcaaacaggtgggaagtggcctgtatgtccaccccaggcaagtcctggggcagagtgaccttttgttgtacaaaggccaggctctccatccagtaaagctgtttgtattgagtctctcctgaagaccgctagcagtaggggctggcctcacctttcccagtgtttgttagacctgaggaagaggtcaggccctctacccttagtagaactgagtgggtgggtggagaggacatgtgtcagtgccctccaagcacagacaggccctgagctgagaaatccaggtttttttcttttccataattctaattgctcttagctgtgctcaagggttctgtccacatttgagccaaggtgttaaaggggcctcagcacccaactgggctctggatggctgagaagctgaaatcagaaataagaggcctgggagggaaggcgggggctctgggctttttaaaggggcctcagcacccaactgggctctggatggctgagaagctgagatcagaaataagaggcctgggagggaaggcaggggctctgggcttggggtcttgttttagtaaggaatgagtaccttgcagggcctctatctacctcttagccctgggaccagaagagggactccatcctgaagtgaaaggcacatcaaaaagcacttcaaaggctatgcctgcaatccatcacatgcaggcacagagccctggccagataggaccactagtgcccgccacctggcacaatttctctctagtctccttgacatagtccttatccctacttcatagatgtggaaactgagacttaaggatagaatctgcccagaggtcacccagcttgactggactggagcygacagacacttttcatttcctgctggggagatcaccatttctctctcctcttcttcagtcacaacttagtagcacctgcccgggacagggctctgggcccc

SEQ ID NO: 61577 - DNA, 1136 bp, Homo sapiens
ctcctccacacatccaatgcctgatcccgctatggtgcacccctgccagggggccagtctgtgagcagaaaggaaggtctaaatcaacagggccttaaggcatccaccaaagcttgacatctctgtcctggtcagcactcggggatcaaacatctagtcctgacttatctacatcctgagggtgtcaaacaggtgggaagtggcctgtatgtccaccccaggcaagtcctggggcagagtgaccttttgttgtacaaaggccaggctctccatccagtaaagctgtttgtattgagtctctcctgaagaccgctagcagtaggggctggcctcacctttcccagtgtttgttagacctgaggaagaggtcaggccctctacccttagtagaactgagtgggtgggtggagaggacatgtgtcagtgccctccaagcacagacaggccctgagctgagaaatccaggtttttttcttttccataattctaattgctcttagctgtgctcaagggttctgtccacatttgagccaaggtgttaaaggggcctcagcacccaactgggctctggatggctgagaagctgaaatcagaaataagaggcctgggagggaaggcgggggctctgggctttttaaaggggcctcagcacccaactgggctctggatggctgagaagctgagatcagaaataagaggcctgggagggaaggcaggggctctgggcttggggtcttgttttagtaaggaatgagtaccttgcagggcctctatctacctcttagccctgggaccagaagagggactccatcctgaagtgaaaggcacatcaaaaagcacttcaaaggctatgcctgcaatccatcacatgcaggcacagagccctggccagataggaccactagtgcccgccacctggcacaatttctctctagtctccttgacatagtccttatccctacttcatagatgtggaaactgagacttaaggatagaatctgcccagaggtcacccagcttgactggactggagccgacagacacttttcatttcctgctggggagatcaccakttctctctcctcttcttcagtcacaacttagtagcacctgcccgggacagggctctgggcccc

SEQ ID NO: 61578 - DNA, 677 bp, Homo sapiens
catgttacatttctgatctcatttcaccctcagagaggccataagggatgtgggtggaataggaacagaattaacaggcacagaattaagtcactggagcagctgaggaactctgagagattctgtggctcagctggggcaatgaattgtgtattgctttttgagcctcctttgctaattagaccagggccyacccccgcaagcagaccacaggtgtctgggttcccaccatgatgtggggctcctgcctcagcccttgctcccagcttctgcccctaaccgttgcaactggtgcccaggccgctgcagatggcagcaggccatgaccttcacctgaagctggacctggcaggtctgcctccaggaaacctcttccccaagggacaggaactggcttcaaacctcacccagagctcaagttgctttgcccttttcactgatgacaaccgtggggacccccatagctgggccctattcatattttgcacatcctggagctgtttgctctctacatgctggcctcggccaccagccctgtgacaagctgcccctctgtgataagctccccacccagaagcatgcccctaagaccacaagcaccaaaacctgcaggaagcccctaaacatggcccccagttccctccagctctgcagggagagtgctgctcaggcaggga

SEQ ID NO: 61579 - DNA, 687 bp, Homo sapiens
aaatgaatttcctctgaaaaaagtcactatttctgttgcatctgttaatgtacagtgaaggttggtgtattagtgtattcttgcactgctatagataaatacctgagactgagactgggtaatttataaagaaaaggggtttaattgactcacggttctgcaggctgtataggaagcatactggcttctagggaggcctcaggaaacttaccatgatggtggaaggtgaaggggaagcaggcacatctttcatagccakggcaggaggaagagacagagggaggaggtacctcacacttttcaacatccagatctggtgaggactctgtcatgagacagcactagagggatggtactaaaccattagaaaccacccccataagccagtcacctcccaccaagccccacctccaacactggggattacaattcaatgtgagatttgggtaggaacacagacccaaaccatatcagttggcaaaattaaatggcctttcatttctccttctacaaaaataagaactactctctttcctcttagaataagcatgtttaatctttgcttctgatgtataattttggcctggaagataattaaaaatatggtattggtgagtttatatatggtgacaacagaaactcatgaaaagttggcatcacattattttcttacttgctgtttttcca

SEQ ID NO: 61580 - DNA, 687 bp, Homo sapiens
aaatgaatttcctctgaaaaaagtcactatttctgttgcatctgttaatgtacagtgaaggttggtgtattagtgtattcttgcactgctatagataaatacctgagactgagactgggtaatttataaagaaaaggggtttaattgactcacggttctgcaggctgtataggaagcatactggcttctagggaggcctcaggaaacttaccatgatggtggaaggtgaaggggaagcaggcacatctttcatagccagrgcaggaggaagagacagagggaggaggtacctcacacttttcaacatccagatctggtgaggactctgtcatgagacagcactagagggatggtactaaaccattagaaaccacccccataagccagtcacctcccaccaagccccacctccaacactggggattacaattcaatgtgagatttgggtaggaacacagacccaaaccatatcagttggcaaaattaaatggcctttcatttctccttctacaaaaataagaactactctctttcctcttagaataagcatgtttaatctttgcttctgatgtataattttggcctggaagataattaaaaatatggtattggtgagtttatatatggtgacaacagaaactcatgaaaagttggcatcacattattttcttacttgctgtttttcca

SEQ ID NO: 61581 - DNA, 687 bp, Homo sapiens
aaatgaatttcctctgaaaaaagtcactatttctgttgcatctgttaatgtacagtgaaggttggtgtattagtgtattcttgcactgctatagataaatacctgagactgagactgggtaatttataaagaaaaggggtttaattgactcacggttctgcaggctgtataggaagcatactggcttctagggaggcctcaggaaacttaccatgatggtggaaggtgaaggggaagcaggcacatctttcatagccagggcaggaggaagagacagagggaggaggtacctcacacttttcaacatccagatctggtgaggactctgtcatgagacagcactagagggatggtactaaaccattagaaaccacccccataagccagtcacctcccaccaagccccacctccaacactggggattacaattcaatgtgagatttgggtrggaacacagacccaaaccatatcagttggcaaaattaaatggcctttcatttctccttctacaaaaataagaactactctctttcctcttagaataagcatgtttaatctttgcttctgatgtataattttggcctggaagataattaaaaatatggtattggtgagtttatatatggtgacaacagaaactcatgaaaagttggcatcacattattttcttacttgctgtttttcca

SEQ ID NO: 61582 - DNA, 813 bp, Homo sapiens
gtagyttcgaattccagctcagataacatcttcaacaaggaatagtaaacatttagagcgacaaggcaatggaaaaggtctttgaatctctaagggtggtaccttggggggaaggcaaatcactggcagataaaggctagttcctaaagcttgttaatgtagacacgccagtgccatatccaggcccctggtgccacctccaggcccataaacatttaacgttgtcttaagtgtttaaccgttattctccacggtaagaagtgggggggtggtataccttttgtcgttgtaaatttatgtcctgcttttagataaacagatataaaacagaagaatttctttcatccatttcttcttaattgccttcagatcaacagttcttatgccaaagaggcacattttagagtggcatatttggtctcctacaacctcatgaacactgctttcaacaccatcaacttgataattcttcctatgctctgatatgctattcacctttagttcttctgtggtttcgatattcatctttgtgttatgatgatctctatgccagtatttgctccttaatagattttaacttttttaggatacagcttgtgtcttatttctttataaaatttgaaggtatatttgcatgataaatatttggtaaaatgaaaaatataaggtccaaaatttgcaatgatatatttgccactgaaacttgcaatggcatataacctgctattatttgctctggtgcacatatgtaattattctttctttggccatatggcagagggggcaagtttcttgttaattgtttcccagatg

SEQ ID NO: 61583 - DNA, 1095 bp, Homo sapiens
tgtataaacacacaaacacacctatatatatagctagtgaataataaagatatttagttatcatttatttataataatgaaatcttcctttttaaatgattaaaacaactaatattaatagaaaaaagaatgaagtaaggtgattatatttcagataaatggaaacacacttgcctcatgagctattttatatcaatgacttcagggactgagttatcttctacttaatggtatacrtggatacaatatcaaaaatatatttccccttatatttaaaaaaacaaaaccaaaagttgcattttaaaaagtcaggaaaaggcatattttcaatgacagttgtttcaatccagctctaagacactgaaaacaatttctgttaatattgtaagttcaagaataatatagatttaactgcatgtaggcacaaatgtagagaaaaataatgtgataaaaatagggtctagatgcaaaatacaaaaaaactattttatatgtaattaaaaggccattaaaaatctatagtagaataaaggatcattcaatacaggctgcaaaactattaataatcagttaatttactcctaaattcaacaaatgtttattgagtttctattacatactaggcacagtttagtattggaaatgtagcagtgaagaaacaagatacctaataccatggatataacattatggtaaggtgacaagacaaaaactgaattagtaaataaactattaacaattgatataataagaaaaaggcatttacatgatagatgaggtagaaagaatgagaggagttacaatagataagagtcagacaagtccttcatgaggagtgatgtcttaactaagtgttgaaggactaaatcaagcaatcacagaattgctttagtatagactacagaacgtctatatttcacttggtgaattagtataaagtggacacatataaaacgtccaacctgttcaagaaatgaagcattgccaggatctcaaaagcccccataatgaaccttctctatcactaattttccctcaaagacaaatttatgggaaactgtaaagcactagtttacttttgactggtattttaac

SEQ ID NO: 61584 - DNA, 1095 bp, Homo sapiens
tgtataaacacacaaacacacctatatatatagctagtgaataataaagatatttagttatcatttatttataataatgaaatcttcctttttaaatgattaaaacaactaatattaatagaaaaaagaatgaagtaaggtgattatatttcagataaatggaaacacacttgcctcatgagctattttatatcaatgacttcagggactgagttatcttctacttaatggtatacatggatacaatatcaaaaatatatttccccttatatttaaaaaaacaaaaccaaaagttgcattttaaaaagtcaggaaaaggcatattttcaatgacagttgtttcaatccagctctaaracactgaaaacaatttctgttaatattgtaagttcaagaataatatagatttaactgcatgtaggcacaaatgtagagaaaaataatgtgataaaaatagggtctagatgcaaaatacaaaaaaactattttatatgtaattaaaaggccattaaaaatctatagtagaataaaggatcattcaatacaggctgcaaaactattaataatcagttaatttactcctaaattcaacaaatgtttattgagtttctattacatactaggcacagtttagtattggaaatgtagcagtgaagaaacaagatacctaataccatggatataacattatggtaaggtgacaagacaaaaactgaattagtaaataaactattaacaattgatataataagaaaaaggcatttacatgatagatgaggtagaaagaatgagaggagttacaatagataagagtcagacaagtccttcatgaggagtgatgtcttaactaagtgttgaaggactaaatcaagcaatcacagaattgctttagtatagactacagaacgtctatatttcacttggtgaattagtataaagtggacacatataaaacgtccaacctgttcaagaaatgaagcattgccaggatctcaaaagcccccataatgaaccttctctatcactaattttccctcaaagacaaatttatgggaaactgtaaagcactagtttacttttgactggtattttaac

SEQ ID NO: 61585 - DNA, 1095 bp, Homo sapiens
tgtataaacacacaaacacacctatatatatagctagtgaataataaagatatttagttatcatttatttataataatgaaatcttcctttttaaatgattaaaacaactaatattaatagaaaaaagaatgaagtaaggtgattatatttcagataaatggaaacacacttgcctcatgagctattttatatcaatgacttcagggactgagttatcttctacttaatggtatacatggatacaatatcaaaaatatatttccccttatatttaaaaaaacaaaaccaaaagttgcattttaaaaagtcaggaaaaggcatattttcaatgacagttgtttcaatccagctctaagacactgaaaacaatttctgttaatattgtaagttcaagaataatatagatttaactgcatgtaggcacaaatgtagagaaaaataatgtgataaaaatagggtctagatgcaaaatacaaaaaaactattttatatgtaattaaaaggccattaaaaatctatagtagaataaaggatcattcaatacaggctgcaaaactattaataatcagttaatttactcctaaattcaacaaatgtttattgagtttctattacatactaggcacagtttagtattggaaatgtagcagtgaagaaacaagatacctaataccatggatataacattatggtaaggtgacaagacaaaaactgaattagtaaataaactattaacaattgatataataagaaaaaggcatttacatgatagatgaggtagaaagaatgagaggagttacaatagataagagtcagacaagtccttcatgaggagtgatgtcttaactaagtgttgaaggactaaatcaagcaatcacagaattgctttagtatagactacagaacgtctatatttcacttggtgaattagtataaagtggacacatataaaacgtccaacctgttcaagaaatgaagcattgycaggatctcaaaagcccccataatgaaccttctctatcactaattttccctcaaagacaaatttatgggaaactgtaaagcactagtttacttttgactggtattttaac

SEQ ID NO: 61586 - DNA, 1095 bp, Homo sapiens
tgtataaacacacaaacacacctatatatatagctagtgaataataaagatatttagttatcatttatttataataatgaaatcttcctttttaaatgattaaaacaactaatattaatagaaaaaagaatgaagtaaggtgattatatttcagataaatggaaacacacttgcctcatgagctattttatatcaatgacttcagggactgagttatcttctacttaatggtatacatggatacaatatcaaaaatatatttccccttatatttaaaaaaacaaaaccaaaagttgcattttaaaaagtcaggaaaaggcatattttcaatgacagttgtttcaatccagctctaagacactgaaaacaatttctgttaatattgtaagttcaagaataatatagatttaactgcatgtaggcacaaatgtagagaaaaataatgtgataaaaatagggtctagatgcaaaatacaaaaaaactattttatatgtaattaaaaggccattaaaaatctatagtagaataaaggatcattcaatacaggctgcaaaactattaataatcagttaatttactcctaaattcaacaaatgtttattgagtttctattacatactaggcacagtttagtattggaaatgtagcagtgaagaaacaagatacctaataccatggatataacattatggtaaggtgacaagacaaaaactgaattagtaaataaactattaacaattgatataataagaaaaaggcatttacatgatagatgaggtagaaagaatgagaggagttacaatagataagagtcagacaagtccttcatgaggagtgatgtcttaactaagtgttgaaggactaaatcaagcaatcacagaattgctttagtatagactacagaacgtctatatttcacttggtgaattagtataaagtggacacatataaaacgtccaacctgttcaagaaatgaagcattgccaggatctcaaaagcccccataatgaaccttctctatcactaattttccctcaaagacaaatttatgggaaactgtaawgcactagtttacttttgactggtattttaac

SEQ ID NO: 61587 - DNA, 1095 bp, Homo sapiens
tgtataaacacacaaacacacctatatatatagctagtgaataataaagatatttagttatcatttatttataataatgaaatcttcctttttaaatgattaaaacaactaatattaatagaaaaaagaatgaagtaaggtgattatatttcagataaatggaaacacacttgcctcatgagctattttatatcaatgacttcagggactgagttatcttctacttaatggtatacatggatacaatatcaaaaatatatttccccttatatttaaaaaaacaaaaccaaaagttgcattttaaaaagtcaggaaaaggcatattttcaatgacagttgtttcaatccagctctaagacactgaaaacaatttctgttaatattgtaagttcaagaataatatagatttaactgcatgtaggcacaaatgtagagaaaaataatgtgataaaaatagggtctagatgcaaaatacaaaaaaactattttatatgtaattaaaaggccattaaaaatctatagtagaataaaggatcattcaatacaggctgcaaaactattaataatcagttaatttactcctaaattcaacaaatgtttattgagtttctattacatactaggcacagtttagtattggaaatgtagcagtgaagaaacaagatacctaataccatggatataacattatggtaaggtgacaagacaaaaactgaattagtaaataaactattaacaattgatataataagaaaaaggcatttacatgatagatgaggtagaaagaatgagaggagttacaatagataagagtcagacaagtccttcatgaggagtgatgtcttaactaagtgttgaaggactaaatcaagcaatcacagaattgctttagtatagactacagaacgtctatatttcacttggtgaattagtataaagtggacacatataaaacgtccaacctgttcaagaaatgaagcattgccaggatctcaaaagcccccataatgaaccttctctatcactaattttccctcaaagacaaatttatgggaaactgtaaagcamtagtttacttttgactggtattttaac

SEQ ID NO: 61588 - DNA, 503 bp, Homo sapiens
tagacattgtgccttagaaagattcagtgattcagaaaactaggaagtagagcttgtattcaaagccaaaaatgcctgtgcytttaaccatcatgatttactgcctcctaatttccatagaggtctaccagatattatcatacctttccagccatttaagctaggcttaattgttaaacattaaaactgcaagttatgcacaagttatagtatattgactgctgacttctaaagtgcacacaaagaagcatcaactagctatgattcacttcagatccacttcagagtgtggtactgtgtcattggcataatagcaagctcatagttactggaccaagaactcctaccactgcccgtacctgggctgccagaggcaattgccaggacaaacacctgtgctcagatgggtctctgggagctgtccttggtgctggctggggaaaaaaaaaaaaaacactggctccagcttgcttttccttatttccgctcagattttgctggct

SEQ ID NO: 61589 - DNA, 441 bp, Homo sapiens
atcctttgctccccactttttaagataggcagttctcattttgaagcccatgcaactcacacactactggttatcccggggcagctgcttagagatgaagcataaggtctccacatgagatagaaaaggaatggtcaaccgtaatcaaccttgttgagccttgagctccttgtctattacatttgtttcttccaaagtgcaacagagtaatatatctcattaaatggtcacctttgctaagattataggctttccctaaagttaaagrtaaaagttttatgtaagcgaaacatttagtagagccttagaaatgccttgtagaatgaacaacattcattcaacaaatatctgagcacctagtactgtgattctcaattctggctgcacattaacaccacaagggaagttggtgtttttaaaaacaccaatgccctggctgca

SEQ ID NO: 61590 - DNA, 441 bp, Homo sapiens
atcctttgctccccactttttaagataggcagttctcattttgaagcccatgcaactcacacactactggttatcccggggcagctgcttagagatgaagcataaggtctccacatgagatagaaaaggaatggtcaaccgtaatcaaccttgttgagccttgagctccttgtctattacatttgtttcttccaaagtgcaacagagtaatatatctcattaaatggtcacctttgctaagattataggctttccctaaagttaaaggtaaaagttttatrtaagcgaaacatttagtagagccttagaaatgccttgtagaatgaacaacattcattcaacaaatatctgagcacctagtactgtgattctcaattctggctgcacattaacaccacaagggaagttggtgtttttaaaaacaccaatgccctggctgca

SEQ ID NO: 61591 - DNA, 670 bp, Homo sapiens
tcctttttcctggaaattcgtggaatattcagaaagcagaatagcactcatagtacatgctaatattaatgggctttataaacatacaatcaaatgattaaaagttgttttattacatcatcactaagaatgccagattaacctcaaactccaagaacccttcttcttactcatggaaawtcctcctttattttgttctaggtttggatgaaatactgagttacaatggcttcttcagtttagctctctgagctctacttgctgattttgtattttgtagatttaatcctagtaactgctgttagtataagttgcttagccttagtgatcatcatacgtaactagttggccagaaaaatgaacgagcaaaaaaccaaaacaggatacaacaaacagaatacgctcttatatccacagcaatggaatagaaacacttttctgtttcagacaaaaagctatctaccaaaatcctttctccctctgcataatacagaattgtagcttgaggttgaatagttaggcaagagctaaattcctcagtttcctttcagttatgggtgatcatatcattagttcttcccaataaggaataaatggaagtggtgtttgctgcttctggaccacagcttttaagaagtcttttccatgttttctttttccccaaatactg

SEQ ID NO: 61592 - DNA, 825 bp, Homo sapiens
tctatcatctatctatctatctatctatcatctatctataaaagaaaatattcatatctaagtatcccttttttctgccctgaccataagcaaaatccactgatggaactaagtgggaactggccgctcactctgatctgtcaactccaggctagaaaaccatgaagctccttggctcgtacttcaaaaatctgttccagttctaattcaggtctctgacaacttggaagtgatttgccttcattctttatccctcctgtcaaggcaatggctctccgcatggtttcttaaccacatttggagaatccactaatgttcacttattcccatagagcaaataattaactaaaactcaaaataggaagcgagtttcacratgtcctgcttgcaaccattgagtaatgggaggttggttttcttttaaactaattatgaggaagaaagtacatgacttttaaaaatgttaaagtattttttcagctaaaacatgagcatgttttaaaagttaaaaaacattctaatagaatagtagtgaaatagccaactaaactcaagtcctgtttattatttatttcatgtggtatttactttcattttttaatagtagtgcttatcttgccattttatttaacattggtaagcataatctcctgacttactatcatgtttaaatcagctcacatacactaccactagcagatctccccttttctctttccctgcttctgtataatgtagttacattacaatttttggttaaatcaatttttagctattacaaagttacgaccatataagaattattttctttgagtcaagtaatgc

SEQ ID NO: 61593 - DNA, 825 bp, Homo sapiens
tctatcatctatctatctatctatctatcatctatctataaaagaaaatattcatatctaagtatcccttttttctgccctgaccataagcaaaatccactgatggaactaagtgggaactggccgctcactctgatctgtcaactccaggctagaaaaccatgaagctccttggctcgtacttcaaaaatctgttccagttctaattcaggtctctgacaacttggaagtgatttgccttcattctttatccctcctgtcaaggcaatggctctccgcatggtttcttaaccacatttggagaatccactaatgttcacttattcccatagagcaaataattaactaaaactcaaaataggaagcgagtttcacgatgtcctgcttgcaaccattgagtaatgggagrttggttttcttttaaactaattatgaggaagaaagtacatgacttttaaaaatgttaaagtattttttcagctaaaacatgagcatgttttaaaagttaaaaaacattctaatagaatagtagtgaaatagccaactaaactcaagtcctgtttattatttatttcatgtggtatttactttcattttttaatagtagtgcttatcttgccattttatttaacattggtaagcataatctcctgacttactatcatgtttaaatcagctcacatacactaccactagcagatctccccttttctctttccctgcttctgtataatgtagttacattacaatttttggttaaatcaatttttagctattacaaagttacgaccatataagaattattttctttgagtcaagtaatgc

SEQ ID NO: 61594 - DNA, 825 bp, Homo sapiens
tctatcatctatctatctatctatctatcatctatctataaaagaaaatattcatatctaagtatcccttttttctgccctgaccataagcaaaatccactgatggaactaagtgggaactggccgctcactctgatctgtcaactccaggctagaaaaccatgaagctccttggctcgtacttcaaaaatctgttccagttctaattcaggtctctgacaacttggaagtgatttgccttcattctttatccctcctgtcaaggcaatggctctccgcatggtttcttaaccacatttggagaatccactaatgttcacttattcccatagagcaaataattaactaaaactcaaaataggaagcgagtttcacgatgtcctgcttgcaaccattgagtaatgggaggttggttttcttttaaactaattatgaggragaaagtacatgacttttaaaaatgttaaagtattttttcagctaaaacatgagcatgttttaaaagttaaaaaacattctaatagaatagtagtgaaatagccaactaaactcaagtcctgtttattatttatttcatgtggtatttactttcattttttaatagtagtgcttatcttgccattttatttaacattggtaagcataatctcctgacttactatcatgtttaaatcagctcacatacactaccactagcagatctccccttttctctttccctgcttctgtataatgtagttacattacaatttttggttaaatcaatttttagctattacaaagttacgaccatataagaattattttctttgagtcaagtaatgc

SEQ ID NO: 61595 - DNA, 514 bp, Homo sapiens
atacatgatggttgacagagtgtcgctctcaggcatatggggggatgaagggctgaaatagacggcgatggctgtgccgtaaaacaacaccaccactgacaggtggcagctgcaggtggaaacagctctctgcttgccctgagtagaggtgatcttcagaacagtggagaagataagtccataagatacgaggatacagacaaggggcgtgagagccaatagacckcctactgcaaaaatgatcattacattgaaggagacgtcagagcaagagagctgcaggagaggattgagatcacagaagaaatgatggatgatattggaggcacagaaggacagctgtgctattaggacagtatgcaggagggcgtggaggtaagtaacaagccacagtccagccactagctggacacaaaggcacaggttcattctggcggtgtaatgtaaggggtggcaaatcgccacatatctatcatacgccatcacacacagaaggaggctgtccatattcaca

SEQ ID NO: 61596 - DNA, 514 bp, Homo sapiens
atacatgatggttgacagagtgtcgctctcaggcatatggggggatgaagggctgaaatagacggcgatggctgtgccgtaaaacaacaccaccactgacaggtggcagctgcaggtggaaacagctctctgcttgccctgagtagaggtgatcttcagaacagtggagaagataagtccataagatacgaggatacagacaaggggcgtgagagccaatagacctcctactgcaaaaatgatcattacattgaaggagacgtcagagcaagagagctgcaggagaggattgagatcacagaagaaatgatggatgatattggaggcacagaaggacagctgtgctattaggacagtatgcaggagggcgtggaggtaagtaacaagccacagtccagccactagctggacacaaaggcacaggttcattctggcggtgtaatgtaaggggtggcaaatcgccacatatctatcataygccatcacacacagaaggaggctgtccatattcaca

SEQ ID NO: 61597 - DNA, 884 bp, Homo sapiens
ctacctggccaaatttgtgtgccctgatatgtatgaaagttaggaaaaggcaggaaagagattcccatagcatcaaataagggaggagtgaaaccatattgctcaaggggagacctcagagtccctgagccaccagagagcttctccaggagcagagacacccggtggccactttcctgctactgtgggaagctgtccattgggtcaagggtccaatacccccccagtaaacttacttgagcaaagcagcttgaggggtctagtggaagaagtttagtttttgtattgacggggacctttttttttgtctctcatcagggatggttaggacattctcaatgtcaatagcctttttgcttatggtaggcaaactgattctggcccaggggctggtgagccaggggctcttctctaggcatcccagatgttgatcttgcaatactttattgggatgagaaacactgagaggcaggggactgaaagcattttctaataattgcaattttgagctatttgttttattttttctactwcttttgccctgtttccattgttgtaaagtttaaagaccacattaagagttggctcatagggctttgtgtccccattgctgttttgtgtagcttcctcctaatgtcagggtagattgactaataaaatatatgtccaggagagcctgcccttctaggaagtctgggtctgcaatcgtatatttcctgagcgcctcaaccaatacatgtcccaaatacatatggcttaaccatacatgtctttctccactttttttctatggcacagaaaacaggagacaatatttacaagtcatgacctaaattaaacagcatattcaacttaacaaattcctctataaacttttatggatc

SEQ ID NO: 61598 - DNA, 884 bp, Homo sapiens
ctacctggccaaatttgtgtgccctgatatgtatgaaagttaggaaaaggcaggaaagagattcccatagcatcaaataagggaggagtgaaaccatattgctcaaggggagacctcagagtccctgagccaccagagagcttctccaggagcagagacacccggtggccactttcctgctactgtgggaagctgtccattgggtcaagggtccaatacccccccagtaaacttacttgagcaaagcagcttgaggggtctagtggaagaagtttagtttttgtattgacggggacctttttttttgtctctcatcagggatggttaggacattctcaatgtcaatagcctttttgcttatggtaggcaaactgattctggcccaggggctggtgagccaggggctcttctctaggcatcccagatgttgatcttgcaatactttattgggatgagaaacactgagaggcaggggactgaaagcattttctaataattgcaattttgagctatttgttttattttttctacttcttttgccctgtttccattgttgtaaagtttaaagaccacattaagagttggctcatagrgctttgtgtccccattgctgttttgtgtagcttcctcctaatgtcagggtagattgactaataaaatatatgtccaggagagcctgcccttctaggaagtctgggtctgcaatcgtatatttcctgagcgcctcaaccaatacatgtcccaaatacatatggcttaaccatacatgtctttctccactttttttctatggcacagaaaacaggagacaatatttacaagtcatgacctaaattaaacagcatattcaacttaacaaattcctctataaacttttatggatc

SEQ ID NO: 61599 - DNA, 725 bp, Homo sapiens
tttgagcccaggaggttgaggctgcactcactgagccatgatcatgacactacactccagcctgggtgacagagcaagaccctgcctctaaaatattatgacaaaagatgataaaataaaatagttaccccaacatctagcatgacaattaaataataccgtaagtgctgcagtaggtcttcaagcatgcatacagaaaataaatataatatgggaaaaaatgtttttaggcagtggacatcagagcacaaaactgtcaattctgaatgaatattagtggaaaaatactatgcaactattttttactgggaaggatacgataaatatgtatttcctatttggaagcatccagaattggaggagacacmcactcaaaagttaagcaccaatccaaaattcgaatttaaagttattaatatcataaaattgaattgaatttaaagcaaaaatataaaaataaataaaataatattcatattgttctaagtatcagtatatcatccagataagctgtaaaatttaataccgttccaacaatacctttacaattgaagtggtgtcactgtctggggtaaatatccaggattcactgtctcccacaaagaagatttaggacacggacacacaccaggagttcaggagcagaggtttaataggcaaaggaaagagaaaagaaaatagagctctctctagtaagaaacagggccttccgaaaggagggacca

SEQ ID NO: 61600 - DNA, 725 bp, Homo sapiens
tttgagcccaggaggttgaggctgcactcactgagccatgatcatgacactacactccagcctgggtgacagagcaagaccctgcctctaaaatattatgacaaaagatgataaaataaaatagttaccccaacatctagcatgacaattaaataataccgtaagtgctgcagtaggtcttcaagcatgcatacagaaaataaatataatatgggaaaaaatgtttttaggcagtggacatcagagcacaaaactgtcaattctgaatgaatattagtggaaaaatactatgcaactattttttactgggaaggatacgataaatatgtatttcctatttggaagcatccagaattggaggagacacccactcaaaagttaagcaccaatccaaaattcgaatttaaagttattaatatcataaaattgaattgaattwaaagcaaaaatataaaaataaataaaataatattcatattgttctaagtatcagtatatcatccagataagctgtaaaatttaataccgttccaacaatacctttacaattgaagtggtgtcactgtctggggtaaatatccaggattcactgtctcccacaaagaagatttaggacacggacacacaccaggagttcaggagcagaggtttaataggcaaaggaaagagaaaagaaaatagagctctctctagtaagaaacagggccttccgaaaggagggacca

SEQ ID NO: 61601 - DNA, 734 bp, Homo sapiens
ttatgtagttgtccctttgaatttgatatttgtaattttaaatatttcaactttatataactgacttcaattcttaaccaagatgtctgaccatgcttccatgcctgattgccacttatagcttcctaattttactgagtctctaattacatgctttacacttttacatgtaaatatctctaccatatttgaacattggccatttagatacttgtgtaacttggaatcaaatttatgatctttttttttaaatgaaactcagacatggtagtccgcctctttgagtgtgcagtgatctttgaatgtaaatatagatatttacaaagctggttatttataaagttactgctagtgacattagaacacctcagccatctttacggctgaaatggtgcagtaaargagtaaagcaaaaaggagaaagagatcgggggaagtgctggcgggcggaagtgctggccggcggaagtgctggcgggcggaagtgctggcgggcggaagtgctggcgggcagagatgaaagcttcaatcagattatgcaaccaacctgagagactttcacaaaaacagaaccgaagattaaattccctaaacagaacttaattctatctgctctgcaaattctcctcattggcctgatctaaccagaagccaaggacagtgactttgctgatacagtccagaaaacttagactacaggccacagtgcaggctggaggagagttaacaatgga

SEQ ID NO: 61602 - DNA, 734 bp, Homo sapiens
ttatgtagttgtccctttgaatttgatatttgtaattttaaatatttcaactttatataactgacttcaattcttaaccaagatgtctgaccatgcttccatgcctgattgccacttatagcttcctaattttactgagtctctaattacatgctttacacttttacatgtaaatatctctaccatatttgaacattggccatttagatacttgtgtaacttggaatcaaatttatgatctttttttttaaatgaaactcagacatggtagtccgcctctttgagtgtgcagtgatctttgaatgtaaatatagatatttacaaagctggttatttataaagttactgctagtgacattagaacacctcagccatctttacggctgaaatggtgcagtaaaggagtaaagcaaaaaggagaaagagatcgggggaagtgctggcgggcggaagtgctggccggcggaagtgctggcgggcggaagtgctggcgggcggaagtgctggcgggcagagatgaaagcttcaatcagattatgcaaccamcctgagagactttcacaaaaacagaaccgaagattaaattccctaaacagaacttaattctatctgctctgcaaattctcctcattggcctgatctaaccagaagccaaggacagtgactttgctgatacagtccagaaaacttagactacaggccacagtgcaggctggaggagagttaacaatgga

SEQ ID NO: 61603 - DNA, 863 bp, Homo sapiens
tccttagcacagcccaaggagagaccttattattatccccagtcactgtgaggaagccgaagtaaggggaggtgaaatgacttgcccagagccacacagctgccatggggtagagctggagcccaaaaycaagtggccaggcaagagcgcgaacccctcactacacaccctgctgcccacagtgacggggacggcaccgccaccaacctaacaggatggaccctccaaatcgggtttgacttaaggaaataaggtaataggacattcttagcacacgcacttctgaattaaatttccaccctccacaagcatcatcaggtggaggctaggatgagctgcagctggggaggctcaccaagcccaggtgtccccaagagagtaaggcagttcaaaacatcttatctacatttaattaaattagacattcctggtgcagcttcatgcccccgcacagctggtttaaaataacctaagattggcttcctttgactgttctagccaaaatgctcgggggtcggggctgaaggtgccagtttgcccagaggtccgtcctgagacagatggattcatcaacagtgcttggctttgagagaagggcactggagaagactccgaggacacccctgttccctcagtgttgcagtgaggtgagtgtagctccgccaccgagcgagagccagcctaccggcccctcccaggctgcagccgtgatctctgggtgaccagagctcatcccatcttagcctgggcacctccaaaacacagcctgaaaccaaagcttgcatgcaagttgttaggaatgagatttcagcgagcaagagagacagatggggagtaaaacgggagaagcgaaccctgatgga

SEQ ID NO: 61604 - DNA, 929 bp, Homo sapiens
gggagggatagcattaggagaaatacctaatgtaaatgatgagttaatgggtgcagcaaaccaacatggcacatgtatacatatgtatcaaatctgcacattgtgcacatgttccctagaacttaaagtatactaacaaaagaaaagtctctggaagcatacataagaaaatataatactggttaactcctgggaggagagatgggtgactatggaagatatacctttcattgaataatatgaatcatattaatatattattcaaatattgatattaaaactgaacaaatatatttaagacataaagtagtttttgtgaatcttaaaaaaaaaaaaaaagacgtggagccaaaattatttctgaagttgtgcccaagaggaatccagggcctgtgtggactgtgaaaacctcagagactaaagggcattgcagcccctgcatgtccagcaggggtagggggctgttaccagaagcacaggccaattcaccctgaccccagcccagtgctgactagcaaactgggtatccaggatgtgtaggggcaggacacttccactccttccctctccccacacacctggagttcctggccccaaaataccctggctggggaagcattggtggttcctgcacgtgctctgcctattgttgaaagagggtgcactgagattcttcccagctagaccccaaagtttacataactcagaacagaaggccaccgccaaaaagcatttacatkttgttgtatgaagtatctttacatcttttttccatcttcacaccaaatcccatgaagaaggaattacagactttatctcatagacaagctgactgggccttggggcagttcactgatctcttcaagaccccagagccattgagtatagtaatgctggaaaagcaatttggttcatctggtttcaagtct

SEQ ID NO: 61605 - DNA, 577 bp, Homo sapiens
tgcatctttgacaggaatgtgaaggtaggatgctgggtccttcctattaaaccctgtcagagtgacaaaaatgtaaatatgtctcatttctgatgatgtttcttttgattatttgattaaggtggtatctgccagccttctccgtgtgaagtaattcttttccctattgtaggtaataatggggagaagggatttgagactatcartatcccattcctcatcaaactttacatttattcctttatctatttatatccatttggatacaaggtttcctactttttccccccaggttaaaatgattactattgtaggggtcgaaagggcaagatccctttcctccccattataaggatcactgctgacacccctataacagattaacaaaagaaaagcataacaaatgtatttggccatagttttatgtgacaaaggacacaagaatgaagatgcaaaggtacaagggaagctgtgtgattttatgcttaggttcgatgaagcaaggacagctgtgtagaaatgtgaggtatgagctgattgtcacagacagtgggggaacccagcagggcctgtctgg

SEQ ID NO: 61606 - DNA, 577 bp, Homo sapiens
tgcatctttgacaggaatgtgaaggtaggatgctgggtccttcctattaaaccctgtcagagtgacaaaaatgtaaatatgtctcatttctgatgatgtttcttttgattatttgattaaggtggtatctgccagccttctccgtgtgaagtaattcttttccctattgtaggtaataatggggagaagggatttgagactatcagtatcccattcctcatcaaactttacatttattcctttatctatttatatccrtttggatacaaggtttcctactttttccccccaggttaaaatgattactattgtaggggtcgaaagggcaagatccctttcctccccattataaggatcactgctgacacccctataacagattaacaaaagaaaagcataacaaatgtatttggccatagttttatgtgacaaaggacacaagaatgaagatgcaaaggtacaagggaagctgtgtgattttatgcttaggttcgatgaagcaaggacagctgtgtagaaatgtgaggtatgagctgattgtcacagacagtgggggaacccagcagggcctgtctgg

SEQ ID NO: 61607 - DNA, 577 bp, Homo sapiens
tgcatctttgacaggaatgtgaaggtaggatgctgggtccttcctattaaaccctgtcagagtgacaaaaatgtaaatatgtctcatttctgatgatgtttcttttgattatttgattaaggtggtatctgccagccttctccgtgtgaagtaattcttttccctattgtaggtaataatggggagaagggatttgagactatcagtatcccattcctcatcaaactttacatttattcctttatctatttatatccatttggatacaagrtttcctactttttccccccaggttaaaatgattactattgtaggggtcgaaagggcaagatccctttcctccccattataaggatcactgctgacacccctataacagattaacaaaagaaaagcataacaaatgtatttggccatagttttatgtgacaaaggacacaagaatgaagatgcaaaggtacaagggaagctgtgtgattttatgcttaggttcgatgaagcaaggacagctgtgtagaaatgtgaggtatgagctgattgtcacagacagtgggggaacccagcagggcctgtctgg

SEQ ID NO: 61608 - DNA, 1155 bp, Homo sapiens
aattgaatttatttgaaatagaaagatagtgaggacttctggttttggaaacctggtagattgagacaatacatctcttccatgacaattgcctgggaattctagataacatacagtaaaaactttaaaaacagagttgaattcagaagaaaacaacaaagaaggctttaggtagcacagataagcaaagaccctgacagctagagccataagcactgaagttgaagtgcagcttgtgggccagggcagggcttgtggggagggagtctgcagggatgatgcagtttcagatcaggaattaagctgaggtttctataaccatctaggaaaatgtgtcattgtgctcttcagctcagtattaagaaatgctaatggaggaacagatatttcatgcacaaagagagccccccttctcactcttcccgtaggtcttttgaacctgttctccccscagtgatgctgtgttgagggcagaggtgcgctcaacattgaatgagaccacattcaggctgcagtgattgtgccctaaagagttcaagacatgattggaggaagccctgttctatgtttttgctattaaattctgaatggtaagcttaacatgaccagaaaacaagttatcattcacatcttgcatacactggatgagcttgcatttttggtcatcacaaatgatacacaattgcaacttttttttttttttttttttttgagacagtctttctctgtcgcccaggctggagtgcagtggcgcgatctcggctcactgcaagctccgcctcccgggttcacgccattctcctgcctcagcctcccgtgtagctgggactacaggcgcccgctaccatgcccagctaattttttttttttaagtagagatgggatttcactgtgttagccaggatggtctttggtcttgatctcctgacctcgtgatctgcccatcctggcctcccaaagtgctgggattacaggtgtgagccgctgtgcccagcccacagttgcaactttgagagtcattggaagccaatattcatgggcagtatgataaatgatgcaatgccatgagtaatgatgcaacctgtgttaactgataaatggttttagggaactgcagaggcagggaaatctatgttgtttcaatggaaacaggtt

SEQ ID NO: 61609 - DNA, 1155 bp, Homo sapiens
aattgaatttatttgaaatagaaagatagtgaggacttctggttttggaaacctggtagattgagacaatacatctcttccatgacaattgcctgggaattctagataacatacagtaaaaactttaaaaacagagttgaattcagaagaaaacaacaaagaaggctttaggtagcacagataagcaaagaccctgacagctagagccataagcactgaagttgaagtgcagcttgtgggccagggcagggcttgtggggagggagtctgcagggatgatgcagtttcagatcaggaattaagctgaggtttctataaccatctaggaaaatgtgtcattgtgctcttcagctcagtattaagaaatgctaatggaggaacagatatttcatgcacaaagagagccccccttctcactcttcccgtaggtcttttgaacctgttctccccccagtgatgctgtgttgagggcagaggtgcgctcaacattgaatgagaccacattcaggctgcagtgattgtgccctaaagagttcaagacatgattggaggaagccctgttctatgtttttgctattaaattctgaatggtaagcttaacatgaccagaaaacaagttatcattcacatcttgcatacactggatgagcttgcatttttggtcatcacaaatgatacacaattgcaacttttttttttttttttttttttgagacagkctttctctgtcgcccaggctggagtgcagtggcgcgatctcggctcactgcaagctccgcctcccgggttcacgccattctcctgcctcagcctcccgtgtagctgggactacaggcgcccgctaccatgcccagctaattttttttttttaagtagagatgggatttcactgtgttagccaggatggtctttggtcttgatctcctgacctcgtgatctgcccatcctggcctcccaaagtgctgggattacaggtgtgagccgctgtgcccagcccacagttgcaactttgagagtcattggaagccaatattcatgggcagtatgataaatgatgcaatgccatgagtaatgatgcaacctgtgttaactgataaatggttttagggaactgcagaggcagggaaatctatgttgtttcaatggaaacaggtt

SEQ ID NO: 61610 - DNA, 1155 bp, Homo sapiens
aattgaatttatttgaaatagaaagatagtgaggacttctggttttggaaacctggtagattgagacaatacatctcttccatgacaattgcctgggaattctagataacatacagtaaaaactttaaaaacagagttgaattcagaagaaaacaacaaagaaggctttaggtagcacagataagcaaagaccctgacagctagagccataagcactgaagttgaagtgcagcttgtgggccagggcagggcttgtggggagggagtctgcagggatgatgcagtttcagatcaggaattaagctgaggtttctataaccatctaggaaaatgtgtcattgtgctcttcagctcagtattaagaaatgctaatggaggaacagatatttcatgcacaaagagagccccccttctcactcttcccgtaggtcttttgaacctgttctccccccagtgatgctgtgttgagggcagaggtgcgctcaacattgaatgagaccacattcaggctgcagtgattgtgccctaaagagttcaagacatgattggaggaagccctgttctatgtttttgctattaaattctgaatggtaagcttaacatgaccagaaaacaagttatcattcacatcttgcatacactggatgagcttgcatttttggtcatcacaaatgatacacaattgcaacttttttttttttttttttttttgagacagtctttctctgtcgcccaggctggagtgcagtggcgcgatctcggctcactgcaagctccgcctcccgggttcacgccattctcctgcctcagcctcccgtgtagctgggactacaggcgcccgctaccatgcccagctaattttttttttttaagtagagatgggatttcactgtgttagccaggatggtctttggtcttgatctcctgacctcgtgatctgcccatcctggcctcccaaagtgctgggattacaggtgtgagccgctgtgcccagcccacagttgcaactttgagagtcattggaagccaatattcatgggcagtatgataaatgatgcaatgccatgagtaatgatgcaacctgtgttaactgataaatggttttagggaactgcagaggcagggaaatctatgttgtttcaatrgaaacaggtt

SEQ ID NO: 61611 - DNA, 573 bp, Homo sapiens
aacactgagatcccatggcagttgatctgatcacgaagatggctactaagtgcctggtgagcaggcagcatctacagcgggagacactggacaaagggaagattcacatcccgggtgggatggagtgtgatggcatgagatttcatcatgctagtcagaacagcatgcaatttaaaacttacgaattgtttatttatggaattttcctttcaatatttgctgactrcaggtgaccacaggtaactgaaaccactgaaagcaaaaccatagataacagaaactatagtagtcccctgcttttctatttgtttatttaaaaaaaaaaaaaaagaacgaggagagggcacaggatgagcatttggctatttcatgccacccagatggtaaagtaagctggctcaaacacctgtcatgcttagccctatctggagtgtaagggaaggagggatcagagcttcatgcctggcatggcatgcattcatgttcttttgttctggtcggactcaagctcagttacatgagattgcatgtacccagcagcaagtcaccagccctcaccagcctttttcggca

SEQ ID NO: 61612 - DNA, 591 bp, Homo sapiens
tatgtcacactccactcacccaccccaaggccaggctgaggtcccacactgggccccagtgctggggggccagctccgtgtgtggctcttgctaatgggacttcaacctgtgaatggtctggagcatccaggaatgcacagtagaccagctggcaggcttggcaggttcatcatgctggcaaatggagggttgagacagtaattagtctcaacacagggaaccccatggcaagaaaatgagaaaggccatcagctttgccagtggagaaattatgccccgcagagaaagctctcccttctgcagtcttcctccatctgtgactcagcacccctgcctacaactaarcctgttcacctgtgctttgtccaaaacagccattgctacgttactccatggtggagcagccggccaaacgcagccaccctgggcaaaggcacctactctcagctccacctctggccagctgtgcaatcttggagaaattacagtttttagtcctgggcctggagcagagtaggcactcaacagatgcggctattaacaataataatattattatactcattggtgcacacaacttgtaagacaga

SEQ ID NO: 61613 - DNA, 591 bp, Homo sapiens
tatgtcacactccactcacccaccccaaggccaggctgaggtcccacactgggccccagtgctggggggccagctccgtgtgtggctcttgctaatgggacttcaacctgtgaatggtctggagcatccaggaatgcacagtagaccagctggcaggcttggcaggttcatcatgctggcaaatggagggttgagacagtaattagtctcaacacagggaaccccatggcaagaaaatgagaaaggccatcagctttgccagtggagaaattatgccccgcagagaaagctctcccttctgcagtcttcctccatctgtgactcagcacccctgcctacaactaaacctgttcacctgtgctttgtccaaaacagccattgctacgttactccatggtggagcagccggccaaacgcagccaccctgggcaaaggcaccyactctcagctccacctctggccagctgtgcaatcttggagaaattacagtttttagtcctgggcctggagcagagtaggcactcaacagatgcggctattaacaataataatattattatactcattggtgcacacaacttgtaagacaga

SEQ ID NO: 61614 - DNA, 1068 bp, Homo sapiens
ctgtcttcagacccaagtgagtgaaaaatgctttgagtggacttcagagtggtctgattttgcagcacttaagagacatacatttaaaatattgagaaagttaataacagaagatgcaagagaaaaaagcataagtcataacttcagagcaatggtgctcaacagtgaagaaggggtgattttgcacccccttccaggggacatttgataatgtctggagatactgttggttgttacaactagggggaagggctactggcatctagtgggtggggtgcaagggatgctgctcaacaggacaggcccctccccatcaacaaagaattatctggcccaaaatgtcaacagtgcaaaggttgacaaaccctcatttagagctatcatcctttacaccacaaatattaaccattagacaatgtaactagttaaatgaaaaaacaccgtaagtgagaacagaggcttatgccagaaacagagtaagtcatgtaattaataaaataatttcttgcaaataagaaatcctaggttttcttttcaaactccttaccctaaacttttcaaatatgcagtaagaataagagaaccattaaaaaaaaaactctgcaaaattttatagtgacattgttacaacttttaaacatagtattttttatagtttataaatcacatgaattgtcttattcaatatttacaatttggtgtaattgtcccaatttcatagactgtgagaatttacwttttgttttttttttttttttgtatatctatgtatcaggcaatgtactaggcactgcgtttgttaccaagataaataaaaatttatattaagatgttcaaaatttcctaggaaacacagacataggatagctataataagagaagtataaacacagccacaggagaatgggggtggggggaccgaagtcatttgcctaaggtacaaaactagcaattggaagatctgggacttgagatctgggtcttctgaatctagagtaagtcctctgtcttggcacagcaatataaccctcttagcttttccagagaaataaaaacaaaactgaaaaa

SEQ ID NO: 61615 - DNA, 596 bp, Homo sapiens
  misc_feature (1)...(596): n = A,T,C or G
gaagtaatgatcaggaaggatctatgcctattaaagacattaccttgaaaatataagatttcatattttatgttgtttgaacttttaaaatctatccttccctgtcctcccactccagataagcaaccatggtaacgcgttgatgtctccttttgtttcttttttcttttttttatttgagacagagtcttgctctgtcacccaggctggagtacagtgacacaatctcagctcactacaacctccacctccagggtgcaagcaattctcctgcctcagcctcctcagtagctgggattacaggcatgcgccaccacgcccggctaagttttgtatttttagtagaracggggtttcaccatgttggtcaggcttgtcttgaactcctgacctcgtgatcctcctgccgcagcctcccaaagtgctgggatgacaggtatgagccctgcacctggctatgtattttagttcacataaatggtgtcgtgctacnnnnnnnnnnnnnnnnnnnnnnnnnnnnnnnnnnnnnnnnnnnnnnnnnnnnnnnnnnnnnnnnnnnnnnnnnnnnnnnnnnnnnnnnnnnnnnnnnnnngtgg

SEQ ID NO: 61616 - DNA, 596 bp, Homo sapiens
  misc_feature (1)...(596): n = A,T,C or G
gaagtaatgatcaggaaggatctatgcctattaaagacattaccttgaaaatataagatttcatattttatgttgtttgaacttttaaaatctatccttccctgtcctcccactccagataagcaaccatggtaacgcgttgatgtctccttttgtttcttttttcttttttttatttgagacagagtcttgctctgtcacccaggctggagtacagtgacacaatctcagctcactacaacctccacctccagggtgcaagcaattctcctgcctcagcctcctcagtagctgggattacaggcatgcgccaccacgcccggctaagttttgtatttttagtagagacggggtttcaccatgttggtcaggcttgtcttgaactcctgacctcgtgatcctcctgcckcagcctcccaaagtgctgggatgacaggtatgagccctgcacctggctatgtattttagttcacataaatggtgtcgtgctacnnnnnnnnnnnnnnnnnnnnnnnnnnnnnnnnnnnnnnnnnnnnnnnnnnnnnnnnnnnnnnnnnnnnnnnnnnnnnnnnnnnnnnnnnnnnnnnnnnnngtgg

SEQ ID NO: 61617 - DNA, 759 bp, Homo sapiens
cccatgtttttaactcttgatgggaagacgatcccactgggcggagactgtaccgtgtaccccgtgtttgtgaatgaggccgcatattacgaaaagaaagaagcttttgcaaagacaactaaactaacgctcaatgcaaaaagtattcgctgctgtttacattagaaatcacttccagcttacatcttacacggtgtcttacaaattctgctagtctgtaagctccttaagagtagggttgtgccttattcaactgcatacatagctcctagcacagtgccttattcggtaggcatctaagcamatttcttaaattaattaatatatctttaaagatatcatattttatgtatgtagcttattcaaagaagtgtttcctatttctatatagtttattatacatgatacttgggtagctcaacattcttaataaacagcctttgtattcagaatataaaattgaaatagatatatataaagttatttgttttattgtgctttgccttactacacttcacggatactgtacttgtactttttttccaaattgaaggtttttggcaaccctgtgtctagaaagtctaacagtgccatgtttccaacagcatgtgctcactccttgtctctgtgtcaccctttgataatatttcaagcttttttatgatttatttattatatctgctatggtgatctgtgatcagtggcctttgatgttactgttgttaagtgttttggggcaccatgaatcgtgcccatgtg

SEQ ID NO: 61618 - DNA, 734 bp, Homo sapiens
tcggctcactgcaagctccgcctcccaggttcatgccattctcctgcctcagcctccccagtagctgagattacaggtgcctgccaccacgcccggctaattttttgcatttttttagtagagatggggtttcactctgctagccaggatggtctcgatctcctgacctcatgatccrcctgcctcggcctcccaaagtgctgggattacaggcatgagccaccacgcccggcccaaaaatcgtaggactctgaagactgatgctaaacctgctgtgtctgagctctataaatggaacaacaaagcctcgctggcagcacatctgtttgcggcatggtttactgtatattttaagcccactgttgagacctactgcttgggaaaaaaaaaaattcctttcaaaatactactgctgattgacaatacaccatgttacccaagagctctgctggagatgtgcgaagagattagcattgttttcgcgcctgctaccacgacatccagccgaagcccatggatcaaggcgtcattgtgactttcaaatctaactatttaagaaatacatttcaggctgggggaggggagaaaaaagaaaaaaaagaaaggaagaaaaaaatcatttcataaggctatagctgccatagatagtgattcctctgatggagctgggcaaagtaaacagaaaacctctggaaaggattcagcattccagatgccattaagaacattcagga

SEQ ID NO: 61619 - DNA, 665 bp, Homo sapiens
accatctagtaggagagatgctgtcttttatagctaggcctagtgttgtagttatgatcctgggtcttcttttttttgtataaagtcatagagaattgtcactttcttgcatactatataaatttcttgtagtacagagagtgtcattccagggttcagcacacaggtgaaattgtggctctcatgtgtacaccccaccaattgttaggattgtcaccctcacacatggatggagaccactggtgagaccctgaatttcacacagacacagtccacagttaaaattgtaactgtcatatgtgaacatccagccaaagttggaatgatgacttatttctaaacccagttcattggcatgtgggaattctatctgaatctgtgaaaattttatctgggcttagggccagagtgaacacagtttacaggaggaatgaaagctctcatgcaccaatccaattcattggtgagattttcactaccatacttagacccaacatagaaaatgtggtgactctcatacctagaactgggacctgtgcaggattgttaattcattactggaatttcctgcgggtrtgattgttacatatgcctatgttcagcacctgagtggtttgatgttgctgtctgggcccagtccaaaggtaagattgtgatatatcact

SEQ ID NO: 61620 - DNA, 717 bp, Homo sapiens
ttatactcctcacccacaatccccaataccagttattatatattctattcaactcagaaaatatggcaggacatatgttaagtaatcagccaggttcacatacaaaacaagtgagagctgtggcccgagatcacaataaaccaagtttcaccaaccggttaacgtacacacacgattcaatgagatattaaaaacagataattaaatactaaaatgaacagtatagacagtagttcagtggatggagtgactcgtttgttaacaattattgtgtgctaacaatattctaggtactgggctagatggtgagtatataatgttgaatgattcagaatccatgtgctcaaggaatttgtagtctactaagggagtggtgcaacttaatctataacttattatttattcagcaaattcttgttgaaaactatcacagaatctatcctagcagtgctgtgaayatagctatgaataaaaaagaccaaaatgtctgcccagataaaggatacattgtgcatacatacactggggagaggcagacaaaaaaacaatgtagtttgagtgtgtgtgcgtgcttgcatgcgtgcatgcaggcatgtgcatatataatgctaaaacatgataagtactattaaaaaaacaggttagggtgattgaaactactagggtatgaataagagtgggttgcaatttaaagtagggtcattgtggttggcctta

SEQ ID NO: 61621 - DNA, 863 bp, Homo sapiens
ataattgaaaaaacagagccatgacaatgttcaaatattatatgtgggatataaaagaagagaagaatccaggatgcttttgagagttgtggtggtttttaagcaactaaaagggtagagttgccattaacgacaaaggagaacactttggatggagcatagtagaagagaagatcaatcctggacatgaaaaaatcaatggcggtttagtgtgtgataccacaatattgtgatttatttgtttatttttttgagacggaccctcgctcttgtggccgaggctggagtgcagcggcgcaatctcggctcactgcaagctccgcctcccaggttcaagcagttctcctgcctcagcctaccgtgtagctgggattacaggtgccccccaccacgcctagctaaatttttgtatttttagtagagacggggtttcatcatgttggccaggctggtcatgaacccctgacctcaggtgacccacctgcctcaacctcccaaagtgctgggattacaggtgtgagccaccgtgactggcctttattttttgtaaacataaaaatattgtaaaatattgttattttaacaatacattttaaagaaggtattagatctgctgcatggtcatttttaaatgctttaaaaaagacataatacaaaatagctttccctttcaaataacataataaatcctacataattgcatattttagaagaaataggaaaacacgaaagtttagactcttgctacaaagtgaagtctctcccacattaaacacaggaatgttaaacagcctatagcgttctyccaaatagcccattgtgcaacttgaacaacatgtatttgcaatttaacttctgttttg

SEQ ID NO: 61622 - DNA, 731 bp, Homo sapiens
gggaggctgaggcaggaaaatcgcttgaacctgggaggcggaggttgcagtggactgagatcacactactgcactccagactgggcaacagaacgagactctgtctcaaaaaacatattcataacaaaacagaacagaacagaacagaacaaaacaacaacaaaaacaaacacacacaaaaaatcctcaactactgaaaaaaaaaaaaaacagttataaagctgacctggaggcctggagggattttatataggatatttatgctatcacttgggataaggtaaaatttatttttttgaggtgatcctttgtgaaaatagtagaagacctttggggtgagtggctggcattacattaatgaaattaaaaataatataaaaataatataaatawtataaggcatatggaaccatatttgttcacaaaaactttatatttgggaatgtgaaggtaatatagtctgctttgtggaaattctgcccagtggccaaggcctctctctgagatgacacccccttgcccacagcaaccatcaattattttacgcataactccaaccctttggccacagtttatttgaccagaatgagcacttcggtctgccctgtatgaacttcagaagcactgaaatcctttaaatagaagaatgaagcaactgtccgatgggagcagaaatgttaaaagtacaattttcaggcacagttgcatcctggcccttgcatgtggcagct

SEQ ID NO: 61623 - DNA, 770 bp, Homo sapiens
acaagtaataatgtattgtgcagagctctgtttcaaacctgaaaakaaactcagtgagcctgattactaatatttcaaagtgttggccatgcctggcactgaacaatgatgagaacagggatcattaatgtgtaccatctcaattatccagcctggttgaaagaaccaggttttaacctggttgaaaggagggggagctcattttctggttagctgattgttaactctttaagttcatcagagctgtttgctacctaaatatctcacttctgagctttagaagttgtatagtatttactcaagtttgttgtttttaaaatacacagacatcctaaacatccaataaagactctgttgaacacattatgatatattacatcaaggaattcgacatagctatttaagagctagtgtgaatgcctatttattaacatgaaagatgctcataatataataacagtgaagaatgaaaaactgtgcatacaccataatcccagtcttagaaaataataaaaaacccaacatatgaatagcaggtctaaagggacatatagcaacataataagagggttatctcagagttgtgcaatgatagatactttgattctattcccctttttctcacattttatagtttcccatgataaacatgtatccctcatataatttgaaaggatactgctttttataacaataacacacaaacctacacatataactgaccaacaactggctaaaccatcagtcctgaagttagttttgtataaaaa

SEQ ID NO: 61624 - DNA, 770 bp, Homo sapiens
acaagtaataatgtattgtgcagagctctgtttcaaacctgaaaataaactcagtgagcctgattactaatatttcaaagtgttggccatgcctggcactgaacaatgatgagaacagggatcattaatgtgtaccatctcaattatccagcctggttgaaagaaccaggttttaacctggttgaaaggagggggagctcattttctggttagctgattgttaactctttaagttcatcagagctgtttgctacctaaatatctcacttctgagctttagaagttgtatagtatttaytcaagtttgttgtttttaaaatacacagacatcctaaacatccaataaagactctgttgaacacattatgatatattacatcaaggaattcgacatagctatttaagagctagtgtgaatgcctatttattaacatgaaagatgctcataatataataacagtgaagaatgaaaaactgtgcatacaccataatcccagtcttagaaaataataaaaaacccaacatatgaatagcaggtctaaagggacatatagcaacataataagagggttatctcagagttgtgcaatgatagatactttgattctattcccctttttctcacattttatagtttcccatgataaacatgtatccctcatataatttgaaaggatactgctttttataacaataacacacaaacctacacatataactgaccaacaactggctaaaccatcagtcctgaagttagttttgtataaaaa

SEQ ID NO: 61625 - DNA, 647 bp, Homo sapiens
atgaacattaccctaaaacccttgaatgctataatttgccaaggtcccagcatggcccaaaggtgctaacataaaaccttcagaaacacaatgatgtctactcttctctggtcctaacttctccctctgtaaaaagagaggattgattcattcctccaacaaatattcattggataatagatctattctgtgctacggcacctttattcttccatgctagagattcaggagaccataagaaagaaagratctcaggctgagtgtggtggcttacgcctgtgatcccagcactttgggaggttgaggcacgtagatcacatgagaccaggagtttgagaccagcctggccaacatggtgaaaccccatctctacttaaaatacaaaaattagccgggcgtggtgacatgtgcctgtagtctcagctacttgggaggctgaggcaggagaataggttgaaccttggaggcagggagcagagattgcagtgagcggagatcatgccactgcacaccatcctgggtgacagaacaacacccttctaaaaaaaaaaaaaaaagagaaaagaaagaatctctcctctcatggcatggaattaataggtaaacaaatcgatatgtgctaagaagacattaccaaaggcaatgta

SEQ ID NO: 61626 - DNA, 705 bp, Homo sapiens
tttatcccagaggaacctcatgtccattttaggacatgtactggatgggtattttaaaccatttcaccaagagagaagcttagctctaaggcagacacttgattaaggctacaaggttcacacttgggcatgagcttcccagcctaatactcatgttcatccaactaaacttgactgcttctgagctacatcactttttaggctcaaattggccaagataatgtgtaaagctgcccaattttaaagaaggtaaatgaacttgaagatttaccttgcccaaatccctgaagggagagcaagagagggctagggaaaaaggcatgtcaggctcgaggtcagacccaaggtcacagagacctcccttccattgcaaagaaaaaattatcaattaactgaagagttctcttcctmctgtgattccctctctggtaagatggtcctcagaggggaccaccttgacttctactgcattatctccatccaccttagtcaccagctacatatgaggttaaaagacagagagctgaagcatcagtaggtgcttgagcagttggcagaaaactcacctgcccaagtgggctcctacttgtggtcctctgtttccctgtatgtgacatgagggaagagggctaggctacatggatcaaatattttctaaagtgtgaaaatgctccagttcctaattgtttaatgtgaggctcagga

SEQ ID NO: 61627 - DNA, 705 bp, Homo sapiens
tttatcccagaggaacctcatgtccattttaggacatgtactggatgggtattttaaaccatttcaccaagagagaagcttagctctaaggcagacacttgattaaggctacaaggttcacacttgggcatgagcttcccagcctaatactcatgttcatccaactaaacttgactgcttctgagctacatcactttttaggctcaaattggccaagataatgtgtaaagctgcccaattttaaagaaggtaaatgaacttgaagatttaccttgcccaaatccctgaagggagagcaagagagggctagggaaaaaggcatgtcaggctcgaggtcagacccaaggtcacagagacctcccttccattgcaaagaaaaaattatcaattaactgaagagttctcttcctactgtgattccctctctggtaagatggtcctcagaggggaccaccttgacttctactgcattatctccatccaccttagtcaccagctacmtatgaggttaaaagacagagagctgaagcatcagtaggtgcttgagcagttggcagaaaactcacctgcccaagtgggctcctacttgtggtcctctgtttccctgtatgtgacatgagggaagagggctaggctacatggatcaaatattttctaaagtgtgaaaatgctccagttcctaattgtttaatgtgaggctcagga

SEQ ID NO: 61628 - DNA, 705 bp, Homo sapiens
tttatcccagaggaacctcatgtccattttaggacatgtactggatgggtattttaaaccatttcaccaagagagaagcttagctctaaggcagacacttgattaaggctacaaggttcacacttgggcatgagcttcccagcctaatactcatgttcatccaactaaacttgactgcttctgagctacatcactttttaggctcaaattggccaagataatgtgtaaagctgcccaattttaaagaaggtaaatgaacttgaagatttaccttgcccaaatccctgaagggagagcaagagagggctagggaaaaaggcatgtcaggctcgaggtcagacccaaggtcacagagacctcccttccattgcaaagaaaaaattatcaattaactgaagagttctcttcctactgtgattccctctctggtaagatggtcctcagaggggaccaccttgacttctactgcattatctccatccaccttagtcaccagctacatatgaggttraaagacagagagctgaagcatcagtaggtgcttgagcagttggcagaaaactcacctgcccaagtgggctcctacttgtggtcctctgtttccctgtatgtgacatgagggaagagggctaggctacatggatcaaatattttctaaagtgtgaaaatgctccagttcctaattgtttaatgtgaggctcagga

SEQ ID NO: 61629 - DNA, 2018 bp, Homo sapiens
caatctgcatccataaataggggagagaagtgttgagttacaactcccacatggggaataagaagtagttgcatctgtcacaggagctaggaagggtagaaggttgttgattactgtggcaatgtagcactttatttattaagggtcagctatcatgccccatccttagcaaatattccttaagtgcctactgtgtccagggtattgaactatgtggttaaaagagagagaaataggagacatttctatagcctagatcaggggtgtctcaaagcctagacattgagacaggctagatcaggggtgtccaatcttttggcttctctgggctgcattgaaagaagaagcattgtcttggaccacacatcacatacactaacactaacaatagctgatgagctaaaaaaaaaatcacacaaaaagtctcawaatgttttaagaaactttacaaatttgtattgggcctcattcaaagccgtgttgggctgcatgcggcctgaggcccacgggttaagcttggcctaggtggttatgagatttttgatattaaaaagaaaaaataattccaaataatgttcacatactgatgcatttattcaaatatttatcagacacaactaagtgctagggataacatggtgaaaaaattaaaaaacagagaaggacattgctttcatggagattacattctggtctgtctctacttacacattttggtgatttagctctctgcccttcaactacaataaaatcttggtttcaaaggatccttataaggcactggtccaagtgctggttcttcacattaacatacccactaatgaaagaatgctgcagttgtgcaataggacaatgtgttggttaggagtgtcagctgtgggagcagagctgagtttgaggcctgactttggcacttataataaactgtgtttccttgggccaattatcaaacctgactctcaatttcttcatctgtaagacgttccccatacctgcttcccatgactgttggaacaacttgagatgatgcttgtggagccctgggcacagtgcctcagtgaatggctgctgctgtgctaatgaccattacattataataagcataaattatcatcatcggtaataattattgaattccttcattcatggagaacctatgggaatgactttagcatcttctgataagtaaggtaacaaagcacttccaaaaaattttataaaatgtaaagctccaggtgcataatctgtgttacaactagccataacagagctccctgtgacttccagccatttaactttgctccatctcttccctgatgtttgcacaatgatgattcctctagattgaagggacttcttcaactcttccttcttggagaaagtgaaaacctgcctctaccttagtaagtctcctttcaacataggtcaatcatacgaacatctaatgttcccctacaaattcatcctcaaacatcaatgaacaagttaagtacctaagatgtttgttatattggaatgcatttccagtgacacacgcctcagtaattatattctttggaccacctactggaaaagaattgttggccctcactttgttcccaatagggaggagttacacataaaattgaacatgtttcaggacactgatgaggacatatttgctaataggcagggccatcatgccttaaacaggggttggccgactatggtgtgtgggccaaattcagctatctgtttgtaaataaagttttattggaatacagctatggccttcatttaaatattatcattcaggagaatgccatctcaggagcttcaattataagagggaccaatcagttgctgccttcactctccagcagcaaagttgagtaattgtgacagagaccgtatggctcacaaaatctaaaacatttactatctgggtttttacagaaaaggtttgccaatccctgcatgccaagcttagcatgcagttagctcccacattgctgtagtggtgaactaacccgggaccc

SEQ ID NO: 61630 - DNA, 942 bp, Homo sapiens
tgcattaataaacaaataggcaatgtgtaggtgggacacttgtattcggctcccttctcaatctgttcatgttttatttcattcaaccacagcataaccctccgagttaggttcattttccccatatttatctgaaaaattactgaaggtgagagagaataaatagtctaaggacagagagtgaatgaccaagttagggtttaaaccaaaacacactggcatcagatcttgcrttctcaagtactctgttacactgtttttccttccaaatctgaccacatttgaagtagttggtaatatattttatgtcaatgtatttgagaaaaaaaatttcttgaactcttttgtgaatgttatcttagccaatcaccaaagtaagaatagataacaagctaatatttatttgttaaataagtgttggatttttaactttaaaatttttccatacacataaataatcaaaatgggaccatcttgctgaaactggaaatctttagtaagttacttaaccccccaacccgcccccctccttttttttttcttttttggaagagagtctcgctctgtcgcccaggctggagtacggtggcgctacctcggctcactcggcctcccgggttcaagtgattttcttgcctcagccttctgagtagctgggattccaggcgcttgccaccatgcccagataattttttttgtatctttagtagaaatggggttttgccattttggccaggctgatctcaaactcctgacctcaagtgatcaccccgccttggcctcccaaagtgctggaattacaagcatgagccacacttcacccctttaagctttgattttataatgtctaatgacatttgtctttgttagaaggctgttacttggtattaaataatataattatgagcatattcattgtcaacaataaatttctatacaaat

SEQ ID NO: 61631 - DNA, 890 bp, Homo sapiens
aatggttaaaaaataattagtaaacatctctaaaaggtaaaaaatggtcaaaatttgaattttattctgtaatgttatatttttagagttctagtaagatttaggctatggatttatgatatgtaggacatagactacattaatgtatttgtatgagagtctccctatgtgctctggaaactcacagatgagtatcattatgatccttgcctgccctcaaagggttgtgatttattagaaggagatatatatatgtaaagtaatgatccaacatctagctaaatgtatcgttttcaatataattggtattatattttaaaactttcatttgggcaatatgatttattattttcaatcactttcaatcattgctgcttcttgaataaagtatatttttcagttgtttaatattctttattactgaattgtataagtcatagaggggtgatatggttggctctgtgtcctcacccaaatctcatctggaattataatccccacatgtcrgaggaggagcctgatgggaagttataggattatgggggccgtttcccccacgctgttctcatgatagtaagttctcaggatatctggttgtttaaaagtgtggcacgtccttcttcgcccactctctctctcctgccaccatgtaagatgtgtctttcttttccttcaccttcctccatgattgtaagtttcctgaggcctccaaaaccatgtggaattgtacatcaattaaatctcttttctttttttttcttttctttataaataacccaatctcaggtagttgttgataacagtgtaaaaactgactaataacaggggatttattatttttctatgctctttaaaatgatttttatctacctgcataacaagaacatgca

SEQ ID NO: 61632 - DNA, 890 bp, Homo sapiens
aatggttaaaaaataattagtaaacatctctaaaaggtaaaaaatggtcaaaatttgaattttattctgtaatgttatatttttagagttctagtaagatttaggctatggatttatgatatgtaggacatagactacattaatgtatttgtatgagagtctccctatgtgctctggaaactcacagatgagtatcattatgatccttgcctgccctcaaagggttgtgatttattagaaggagatatatatatgtaaagtaatgatccaacatctagctaaatgtatcgttttcaatataattggtattatattttaaaactttcatttgggcaatatgatttattattttcaatcactttcaatcattgctgcttcttgaataaagtatatttttcagttgtttaatattctttattactgaattgtataagtcatagaggggtgatatggttggctctgtgtcctcacccaaatctcatctggaattataatccccacatgtcggaggaggagcctgatgggaagttataggattatgggggccgtttcccccacgctgttctcatgatagtaagttctcaggatatctggttgtttaaaagtgtggcacgtccttcttcgcccactctctctctcctgccaccatgtaagatgtgtctttcttttccttcaccttcctccatgattgtaagtttcctgaggcctccaaaaccatgtggaattgtacatcaattaaatctcttttctttttttttcttttctttataaataacccaatctcaggtagttgttgataacagtgtaaaaactgactaataacaggggatttattatttttctatgctcyttaaaatgatttttatctacctgcataacaagaacatgca

SEQ ID NO: 61633 - DNA, 623 bp, Homo sapiens
cagaggaaagttgaattctagatctgcctgactgagctgggacccatcttctcctgtccttggtgctcctgtttctcatgcttttacactcggactggaatctacaccattgcctctccacctttcaggccttcaaactgtacccccagcttttctgggtctctagcttgtggactggatcatgggacttctctcagcctccatcattaggtgatctaattctttataacaattctctttatacatatatgggctgggtgcagtggctcacacactttgggaggccaaggcaggagaggccagaagtttgcaaccagcctgggcaacatagtgaaatataatccccactctactaaaaaaaacgaacaaacaaacaaaaacaacaacaacaacaacaaaaaatctctctctctgtctctatatatagagagagagattgtgtgtacattatatctatatgtaatctctctctctctctctctctctctctctctctctctctmtatatatatatatatatatatatatatattctattgggtctgtttttctggagagccctgactaatgtgtggtttgcagccagtagcattggcataatctgggagcttattaggaatgca

SEQ ID NO: 61634 - DNA, 623 bp, Homo sapiens
cagaggaaagttgaattctagatctgcctgactgagctgggacccatcttctcctgtccttggtgctcctgtttctcatgcttttacactcggactggaatctacaccattgcctctccacctttcaggccttcaaactgtacccccagcttttctgggtctctagcttgtggactggatcatgggacttctctcagcctccatcattaggtgatctaattctttataacaattctctttatacatatatgggctgggtgcagtggctcacacactttgggaggccaaggcaggagaggccagaagtttgcaaccagcctgggcaacatagtgaaatataatccccactctactaaaaaaaacgaacaaacaaacaaaaacaacaacaacaacaacaaaaaatctctctctctgtctctatatatagagagagagattgtgtgtacattatatctatatgtaatctctctctctctctctctctctctctctctctctctctatmtatatatatatatatatatatatatattctattgggtctgtttttctggagagccctgactaatgtgtggtttgcagccagtagcattggcataatctgggagcttattaggaatgca

SEQ ID NO: 61635 - DNA, 810 bp, Homo sapiens
tatattttattattcctttttggcacaaaatgtagttgttcaacttttttatttttttcacttcttagcagcatgttgaattttaagatactctcttccttcgttgcctgtttgtgcccattttctcacctcattctatagttagggcatattaatatatagaagcagagttgtaaccatgaaaagctgaacgaatggagagagttatgtcaagcatgataagaacatgaagaagaaactagtcttgtgctatggttttgatatttgtcctctctaaacctcatgttgaaatttgatcaccaatgttggaggtggggcctaatgtaaggtgttttggttatgcaggtgggtgccccacaaacagattaatgctctcccttcaggaatgagtgagttctcactcgatcagttttcaagagagccagatgtctcaaaagagcctgggaccttcccctgctcycccttacttccattcttaccatatgatctctgcacacaccagctccccttcacttcccaccatgagtggaagcagcctgaggtctttaccagatgcagatgttggcaccatgcttcttgtatggtctgcaggaccataagccaataaacctcttttacttataaatttccctgcgtcaggtattcttttatagcaacacaaaacaaagacatttgtatttgtgcatcatttttgggaagaatcatgaaaacccaaatatgaataaaatagaaaaaaaaatcaacattctttctaatctaagagaaaagctcggtatcatagcaatgatgccatttattgattactttttg

SEQ ID NO: 61636 - DNA, 1360 bp, Homo sapiens
cctatgcatgcatcatggtccccccaaaaggaggatatgtgggtgggtgggagggctggggcaggggccagatagaaattattggttttgttttttaattttgtttttcctgttttctgagaataaaggttttgttatatcaccgaggctgctgtcttggcagagggaaggggaggctgtagtgggggtaggtggggtgaagtgatatggaagagatcggttggccccagccattggaggagggggtctggtgaaaggagaaggggacagggtgtaagataaaagatgttgctatctttgtccctcaactgcagttgcagcagttgagggacaaagactgaggcatggaaccactggaaagcccttagattcttcttcttccctttttttttttgtagagttagggtctcactatgtagcccagggtcttgaactcctgggctcaagtgatccaccagtcttgccctcccaaagtgctgggattgcagccatgagccgttgcatctggccagccctagattcttgatgtatcctctttacccagcccttctttttccctacccaccctctggtctagaccccaccagaaagcccaatgcagtgtgacttctcaccattcccccaacacccagatacgaaagcacaaaatgccaatgtacctttccttctgaggctaccatgttcagctgagggaggatgggaaggtggagaggatcctgggggctgagaccttttcctggctctgggtctccttatctttgctctctgcgaggtcataagccatgttcatagtgagcagaaggggattcttcttcaagccatggacccaagagcggacagcccaaggggatcttcacccctcccaacttctgggagagccgctggaacagagcgagccaaacattcacacagccatgtccagatgccctgtcctgggtccttaatgcatctccgagtccactgtatccattcrtcccttgggctcagtcacgtgcacttgggcttcctcaacagacaatagactgctggggtgggagggtgaggaggagacctggagcctccctgtgggcccgaggtccctttagccgataatagggagggattcctaaggggggtacaggatgtagcgcccagataagacttctgcggaacaataggaggaactgaagaagggagacccaccctcactgcaccccaccccccgggctttggggtcgtggactgggggaccagaggatcatggggaggggtgccgaagattcttgtgaatgggggtggaggatcatggcaaacagcaggattctggagttagaacctttatatttctttaggaaccatagggacacatgagcggggtggc

SEQ ID NO: 61637 - DNA, 1360 bp, Homo sapiens
cctatgcatgcatcatggtccccccaaaaggaggatatgtgggtgggtgggagggctggggcaggggccagatagaaattattggttttgttttttaattttgtttttcctgttttctgagaataaaggttttgttatatcaccgaggctgctgtcttggcagagggaaggggaggctgtagtgggggtaggtggggtgaagtgatatggaagagatcggttggccccagccattggaggagggggtctggtgaaaggagaaggggacagggtgtaagataaaagatgttgctatctttgtccctcaactgcagttgcagcagttgagggacaaagactgaggcatggaaccactggaaagcccttagattcttcttcttccctttttttttttgtagagttagggtctcactatgtagcccagggtcttgaactcctgggctcaagtgatccaccagtcttgccctcccaaagtgctgggattgcagccatgagccgttgcatctggccagccctagattcttgatgtatcctctttacccagcccttctttttccctacccaccctctggtctagaccccaccagaaagcccaatgcagtgtgacttctcaccattcccccaacacccagatacgaaagcacaaaatgccaatgtacctttccttctgaggctaccatgttcagctgagggaggatgggaaggtggagaggatcctgggggctgagaccttttcctggctctgggtctccttatctttgctctctgcgaggtcataagccatgttcatagtgagcagaaggggattcttcttcaagccatggacccaagagcggacagcccaaggggatcttcacccctcccaacttctgggagagccgctggaacagagcgagccaaacattcacacagccatgtccagatgccctgtcctgggtccttaatgcatctccgagtccactgtatccattcgtcccttgggctcagtcacgtgcacttgggcttcctcaacagacaatagactgctggggtgggagggtgaggaggagacctggagcctccctgtgggcccgaggtccctttagccgataatagggagggattcctaaggggggtacaggatgtagcgcccagataagacttctgcggaacaataggaggaactgaagaagggagacccaccctcactgcaccccaccccccgggctttggggtcgtggactgggggaccagaggatcatggggaggggtgccgaagattcttgtgaatgggggtggrggatcatggcaaacagcaggattctggagttagaacctttatatttctttaggaaccatagggacacatgagcggggtggc

SEQ ID NO: 61638 - DNA, 778 bp, Homo sapiens
acaaagcaaacagaagtggtaattgagcctagcaagcagtttagatggactacattcctcattccagctgaggagagatctcacaaggagaaaggagtgctaaggaagagcaagaccccacagccttccaaagatcccctatggtccaaagtcctttgaccatctcagtcagctgctttgttttctgttggcagtggagggacaaggtgagaggagccaggggtagtcatgaacaccagtgggttctgccctgggcagctccccaccttctttaagagagtactgtgtctcagctccagcagtctcaactgggaagacccaggactcctgctcttttctctartccctgggagacgaggtccagctaaggtagagtaagcagtcagtgaccaggcaggctggtttgggaggtcactgcctggaggacgggatcttgtattcttcggaagatggctgggaaattcttccctccattacgtagaactttcttcccctcctcagttgaggtgcctagatgtcccacaacggggtcttcactctgggagaaggaagggtccaataagtccttgcccactgttcagactgcccctggcccttagacacctatcccatcctcctggcactgagttaagtccaaatacagaaccactctggaaagggcctccacctcctctaggtcccctactcaccaggtcctccagaggcacacgctcaaacagtgggtgctcttcgaaatgagtgcacatccagtcgtgtagctccagcacatcggttatgg

SEQ ID NO: 61639 - DNA, 749 bp, Homo sapiens
tgcatcattttaaatttttcccaaaaaacttttatggaaggtgaatttaaaaatagtgaaataggtcaggcgaggtggctcacacctgtaatcccagtactttgggaagacaaggcgggcaaatcacttgaggtcaggtgttccagaccacaccctggccaacatggtgaaactccgtctctactaaaaatacaaaaattagctgggcgtggtggcgtgtgcctgtaatcccagctactcaggaggctgaggcaggaagattgcttaagcccaggaggcagagtgagcaaacatcttgccactgcactccagcctgggtgacagaaagagatcctgtctcaaaagaagcaaacaaacaaacaaaaatagtaaaatctctcttagccgaaaagccttctcagaagcctgagttcttgctcagcaaaaccttcgtttaggtctgtgggtttgtcaacgacagcactcatgtgggcattcagggaggtattcstcacttaggccgtggatgcctcagactctaggacctgctggcttcttccctagggcagcagcagcagcgacagaaaggcataaaggcagaagcacacaggcatgtgacaagagaccagggcatggcagtttaagcccagattttgccagtaactcgctgggcaaccttctcctctctggtcctgagaaatagaagagttggaccagggaaggtccaaggtccctttctcagtgaaggctctgagtttctgatttactgc

SEQ ID NO: 61640 - DNA, 447 bp, Homo sapiens
ccatccatccatccatccatccatccatctccaattagctttcttttaattaaaaatataatgacatcggttaaaagtaatttttcttccaccttcaaatcccttatggtctagtccccccatctcagacacaaacatcgtttctagtttcttgtgcatcctttcagaattatcatgtttctataatcacacctgacccattgttctgtatcatatgtttttgcacttaacrgtacccttgggtgtttttttcctgaggtgctcatagatccatcccattcttgttattggccatgatgctacctaattagccctctctggatgcccatggggttaattctgatgctttgctattgcaaagaatgtggcacagagcattttagtatctacatctctgtggacagttatattgttgagtaaattctagaaatgaggccaggagttctt

SEQ ID NO: 61641 - DNA, 447 bp, Homo sapiens
ccatccatccatccatccatccatccatctccaattagctttcttttaattaaaaatataatgacatcggttaaaagtaatttttcttccaccttcaaatcccttatggtctagtccccccatctcagacacaaacatcgtttctagtttcttgtgcatcctttcagaattatcatgtttctataatcacacctgacccattgttctgtatcatatgtttttgcacttaacggtacccttgggtgtttttttcctgaggtgctcatagatccatcccattcttgttattggccatgatgctacctaattagccctctctggatgcccatgrggttaattctgatgctttgctattgcaaagaatgtggcacagagcattttagtatctacatctctgtggacagttatattgttgagtaaattctagaaatgaggccaggagttctt

SEQ ID NO: 61642 - DNA, 567 bp, Homo sapiens
tttactctgtagcccgcagaatttcttacaagattctgagttgtcaagtaggggtagagggtagcacagtcaacttgggacagaccagcttgctctggggctttgggaaagccactgaatctctttggtgtcagccttttcttctgttaagtgaggtttttagattaaatggtctcctaaagtcccctttgactctaagtgagtctgtgattctatcagtagacttcagtagattatctgtgaagcttcgaaaattctgcgttggcccttttccacacccatgaaaatctcaattattttaaacaattactcaccccatgtttgtgaaaggacagaaggcatttgagtatgagtctgtataatacttaatttggaagctaaaaattactgtaaaaattaggcattagaccaaaaaatgggtgttgaatcacttcctgatcatgcgttctcatttctccaccctcgttcctccccttcattagcaaggatgacagagaatgcgwttaggcaacaaatgttgaatagtcgctctgtccaggactactctgatgggggtgccaggtacag

SEQ ID NO: 61643 - DNA, 503 bp, Homo sapiens
acactgcacaacaagcctctctgtaacttccctgaccactggtcaccacaactctgcttgaatcctttcagtgacagggagctcagcccactgcatgactcaaatgyttacgacttcagctttcattctctgatctaagatcttgctctacaactcggtagaggcaagggggaagatgaacaaagtccactgtgactagtgaaccatgagccatgctcctaccatatgctgtgattcaacccccaaccccaggccctgctctcaccacagacatgcacgtcttctacacctctcactgcaattctctataatttatcacatcaattttatagtatatttttcgttaacctcacatttgtacatccaggctccatgagctctttggctatttttactgttgtccagacagaataactaacattcattgagagcatacaatatactaggcaccattctaagcattttacatgtattcacttagcctatcttcccaaaactccaac

SEQ ID NO: 61644 - DNA, 998 bp, Homo sapiens
caaattagagaaaaatgacacattgtagcctagtacaaaaarcaaaacaaaacaaagcattctgcctattcaatgaaatttctgaccacagagtgacagaatgctgatcatggtttggtttatcccctaaggatgctgcccctaccagatagtgagttttcagtgagagtttgggatacctaatgtgtaaacttcattttgaaaatagaagcaatgtggagaaacaaagtgaataaagctaaatattgctggttccattttatgcttatagcaaaacccttggattctcaattgatacaccattaattttagtaacattatggatcaaaaagagtcatttgtatatctctgtcctgaaagccagtggtaaattgcaaaagtgatcattaaaggattaaaatatgttgctatagcaacttcttatcatataagaagtgttagtacaactagggtataccagaaatgggttagaaatggtctgtgattttaaaaagtaggcttttttttttttgcactttaggattagtgtgttacagatattttattacattgaaatataaagaaaagaaaaatatatacctttttgttataattctgaaacgtgaccacctacatatttattggaactttaattttgtaagtgcaatgggacaatgtcttgcaaatacattttattcagtaaataaataaattggggaggttcaacatgaagcatgatttaatgcttaatgacttatttttctagttctagttatatataataaggaaggaggaaaaataaatacataatgaatgcttttcaacttccactgttgcttttgctactatgaccagagactacttaatgcccaggctctaccctcctgtgtttgctccccgacctttgttcaattctatcgtctggtactatctttctcttgctttggggcccttattattaggccttagtctttgtttgtatgaggttttagagttagtcttgagcactgagtctgtat

SEQ ID NO: 61645 - DNA, 1169 bp, Homo sapiens
tgccttccagctgtcgtcttgaaagggaaaggataggaaagcttggaaaaagagagacaggttattgctgcttgtctttcttatttatctgcatattaaaatgaaaaatatgtccactgtacatttgttttattaaatactaaaggaggctaatgcagatgctgaaaatgcaaagtagaattctatcaaaaccatctcatcttattttagagcaacatttcattatactattcagtaaaaaataaataaataaataatccaagacaaatctaaatcaggatgccaagatagtcaatataaattgaaaatatttcaggccaactgagatggatatatgatcattctatttcttaggcaaaagtctgctgccctcttcaataaatgaacaaaatattgacatcacttataaatcctttactgattgattccatttagcttcagttattctattttcttcagatttgtttatgtgttagtgtgcttagttctttgtakatggataatttgacatctactttgtatatttttctatagtgtattcttaggtaaatcttttctgtttgtgtttgtatgtgttgtagtggtggatatacctgtaaaattaactgtttcatttcctggggactcgagatctacttgtcttttttaaacagattgattgacatataattcacataccttacaattcacctacttaaagtgaactcaatgttttcagtaaattcacaggactgtgctatcatcaacatagtctaactttagaacatttttgacctccctcaaaagccctaagcaactgctaatctattttatgtcactgtagaaaggttcttccctgttataacataccttagtccttattttttttacttccaaatatatcctgttgtatgcatgtatgaaactttatttatccatgcatgagttgacgaacatttgactaatttcatatagttacttgtatactttttttttttttttggagatggagtctcgctctgtcgcccaggctagagtgcaatggtgcaatcttggctcactgcaacttctgcctcctgggttcaagcaattctctggctcagcctcctgtgtagctgggattacaggagcctgccaccatgccgggctaatttttttgtatttttagtagaaacggggtttcaccatct

SEQ ID NO: 61646 - DNA, 1169 bp, Homo sapiens
tgccttccagctgtcgtcttgaaagggaaaggataggaaagcttggaaaaagagagacaggttattgctgcttgtctttcttatttatctgcatattaaaatgaaaaatatgtccactgtacatttgttttattaaatactaaaggaggctaatgcagatgctgaaaatgcaaagtagaattctatcaaaaccatctcatcttattttagagcaacatttcattatactattcagtaaaaaataaataaataaataatccaagacaaatctaaatcaggatgccaagatagtcaatataaattgaaaatatttcaggccaactgagatggatatatgatcattctatttcttaggcaaaagtctgctgccctcttcaataaatgaacaaaatattgacatcacttataaatcctttactgattgattccatttagcttcagttattctattttcttcagatttgtttatgtgttagtgtgcttagttctttgtagatggataatttgacatctactttgtatatttttctatagtgtattcttaggtaaatcttttctgtttgtgtttgtatgtgttgtagtggtggatatacctgtaaaattaactgtttcatttcctggggactcgagatctacttgtcttttttaaacagattgattgacatataattcacataccttacaattcacctacttaaagtgaactcaatgttttcagtaaattcacaggactgtgctatcatcaacatagtctaactttagaacatttttgacctccctcaaaagccctaagcaactgctaatctattttatgtcactgtagaaaggttcttccctgttataacataccttagtccttattttttttacttccaaatatatcctgttgtatgcatgtatgaaactttatttatccmtgcatgagttgacgaacatttgactaatttcatatagttacttgtatactttttttttttttttggagatggagtctcgctctgtcgcccaggctagagtgcaatggtgcaatcttggctcactgcaacttctgcctcctgggttcaagcaattctctggctcagcctcctgtgtagctgggattacaggagcctgccaccatgccgggctaatttttttgtatttttagtagaaacggggtttcaccatct

SEQ ID NO: 61647 - DNA, 643 bp, Homo sapiens
attgccctttcttctcttcactctgttatagagaytgtttatacccttcctatcaatgtttttatagtcttactgcaaatcaatatatccacaagttttgtatgaatggcattatagtgtgtatattactgtgtaacttgcttcatttttctcaatattgttctctgaattatccaagtcaatatatgtaggttttatatattaactttattttctgtataatattcaatcatatggctgcaccaaaatgtatttatacattctcttgctaatcaacatttgggtctttaaaaatattgtattattacaaatgaatgttgcaattaatacctttgtgtgtgtctctttgttcaaatatgtgaaactttttctagggaatccacaaagataataaattgcgaggtcaaaggatgtatgcaaattttaatttactagatattgcaaagttgctctccgaagtttaaaagtttataatcccagcctggcctacatagcaaaaccctatctctactaaaagtacaaaaattagccgggtgtggtggcaggtgcctgtaatcccagctactctggaggctaaggaaaggagaattgcttgaaccggggaggcagaggttgcagtgagccgagatcctgccactgcact

SEQ ID NO: 61648 - DNA, 643 bp, Homo sapiens
attgccctttcttctcttcactctgttatagagattgtttatacccttcctatcaatgtttttatagtcttactgcaaatcaatatatccacaagttttgtatgaatggcattatagtgtgtatattactgtgtaacttgcttcatttttctcaatattrttctctgaattatccaagtcaatatatgtaggttttatatattaactttattttctgtataatattcaatcatatggctgcaccaaaatgtatttatacattctcttgctaatcaacatttgggtctttaaaaatattgtattattacaaatgaatgttgcaattaatacctttgtgtgtgtctctttgttcaaatatgtgaaactttttctagggaatccacaaagataataaattgcgaggtcaaaggatgtatgcaaattttaatttactagatattgcaaagttgctctccgaagtttaaaagtttataatcccagcctggcctacatagcaaaaccctatctctactaaaagtacaaaaattagccgggtgtggtggcaggtgcctgtaatcccagctactctggaggctaaggaaaggagaattgcttgaaccggggaggcagaggttgcagtgagccgagatcctgccactgcact

SEQ ID NO: 61649 - DNA, 616 bp, Homo sapiens
agttttttaagtcaaataatttaaacctccaattttgttcttctttatcaaagttgttagatctaggtcttgaggattcaaaaaatgaataaaaaatggtcwcactgcttcttcacagctccttagcttcaaatgttttgccttctaagatctggtaccaaccaattcattagcttttccatagattattccttttcacgcaccatacgctttaatcaaagtgggtcattcacagttctgcaaatatgtctcatgctactcaccttcatgtatttaatcaaatggttctctctgcttggaatgaccatcttgtatgattggaacatatttaagtgttctatcaatccttataggcacatttaaataataattatgattatgactattatgtcagattaattatgttatggttaaaattatttaatttcattctggtaacaaatctgagaaaaagatatttttcccattttacagattggcaaactggtgtgctgggcaatttagtaaattatccaaggccatgtaattagtcaatatcaaagctgggatttgagctcgtgtcagcctggctctaaaaccccatcttgatcacagacagtcctgttttcctcagtat

SEQ ID NO: 61650 - DNA, 616 bp, Homo sapiens
agttttttaagtcaaataatttaaacctccaattttgttcttctttatcaaagttgttagatctaggtcttgaggattcaaaaaatgaataaaaaatggtcacactgcttcttcacagctccttagcttcaaatgttttgccttctaagatctggtaccaaccaattcattagcttttccatagattattccttttcacgcaccatacgctttaatcaaagtgggtcattcacagttctgcaaatatgtctcatgctactcaccttcatgtatttaatcaaatggttctctctgcttggaatgaccatcttgtatgattggaacatatttaagtgttctatcaatccttataggcacatttaaataataattatgattatgactattatgtcarattaattatgttatggttaaaattatttaatttcattctggtaacaaatctgagaaaaagatatttttcccattttacagattggcaaactggtgtgctgggcaatttagtaaattatccaaggccatgtaattagtcaatatcaaagctgggatttgagctcgtgtcagcctggctctaaaaccccatcttgatcacagacagtcctgttttcctcagtat

SEQ ID NO: 61651 - DNA, 848 bp, Homo sapiens
ttggccaggtgtggtggctcacgcttgtaatctcagcactttgggaggccaaggcaggtggattacctgaggtcaggagttcgaggcaagtctagccaaaatggcgaaatcccatctctactaaaaatacaaaaattagccaagcgtggtggtgggcacttgtaatctcagctactcrggaggttgaggcaggagaatcgcttgaacctgggaggcagaggttgcagtgagctgagatcgtgccactgcactccagcctgggtgacaagagtgaaactccatctcaaaaaataaaataaaataaaataaataaatactatgtggcccagtaagtgtactctaccctttgtattattttactttttagtctgaaattccaatcaatggaggattctagtgtccatgtacatttttaaatgaagtttgaattcacatgcctatgagtacattctatgagtacattttctttggagtttttagggcatctgaagaaatactaacatttgaagtaatctattctctttaaaagttctgattttctaaacactaataaagcatgtatggattaaatgcaaagagaaaatggtttgtgttcccctttcatcttagctaacactcttttatattcttatagtccattgaatacagtcatattgtattagtttcatgctgctgctgcaacaaattaccataaactgagtggtgtaaagcagcatatttatcttacagttctggaaatgttaaattttaaaaatcaaggtgttgacaaggctgagttccttctgaaggatctagaggataatccatttccttgctttttccagcttctagaggtcacttgccttcct

SEQ ID NO: 61652 - DNA, 746 bp, Homo sapiens
  misc_feature (1)...(746): n = A,T,C or G
aggttctgccccatagaaaccgtgggatcttagaaaagttacctattatccttgaatctcacctgtaaaatgggtttggtaaaattcatcctaccagacaactgtaagaattaaagatagaccctgacagtgtgagcatagtgtttggcacagagcangggcttaataaatgtggaactggaatcgcaccgtccgcctaggcaaattggccatccaaatagatcccattttttaaggcttaagttcaaactttcattcatgggtcacatatttattgagcartggctatgtatatcaatgcaaataaagagatgaacaagacctcagcatctacagacggtgacagacatcgattcactaattacataataattaaagtaaaattgtggttggggcagggacatagaagtctatcttccacagctagcccagcctagcccaaccaataaaggcttcctttggaatccctacttattttctgactttggccttttccatttactgtctagtattgctatttaaatgcttcccaagttcacaatcatttcctaaagctgactgtaggcaaggacccgggttcttgggctgcctttgcctttgttccacacagaacaaatatgcgaggctcagtcaagaataaaacacgatgtcagatccacatgtctcttgggaatggcgatttggaaatgctacagtgacttagaggtctccttccaacttagaattatctagtatttagggtttat

SEQ ID NO: 61653 - DNA, 847 bp, Homo sapiens
tctaagtcccacaatgactccacactgtaaaagtaacagtaataatgacaatatgtgacattggacttagccgggcctggtggcacacacctgtcatcccagctacttgggaggctgaggcaggaggattgcttgagtccaggagtttgaggctacagtgagccctgtcgtgccattgcactacagcctggacaaaagtgaaatcctatctcaaaaaaatgaattagtagtaataataattattgagtatttagtatgtgatatggtttttggctgtgtccccacccaaatctcaccttgaatagtaatagtccctacatgtcaagggtggggtcaggtggagataattgaaacatgagggcagcttccccacactctttttcgtggtagtgaataagtctcacgagatctgatggttttataaatgggagttcccctaacacatgccctcttacctgctgccatgtaagacatgtcttgcttcccctttgcyttctgccatgattgtgaggcctccccagccatgtggaactgtgagttaattaaacctctttcctttataaattacgcagtctccggtatgtctttactagccgagtgagaacagattaatacagtatgtgccgggctgtgttctaagagccttccgttaattacgtatctctagtcctcacaacaggtctgggaggagtaggtactcttaatacgatcattttgcagatgagcagactaagttcgcagagattgatgagatggtctcagggctagggtggggcttagctaagatttattcaaaggcaaaagttgttttacaattaatcatatacatgttgtgtgtgtgtatgta

SEQ ID NO: 61654 - DNA, 847 bp, Homo sapiens
tctaagtcccacaatgactccacactgtaaaagtaacagtaataatgacaatatgtgacattggacttagccgggcctggtggcacacacctgtcatcccagctacttgggaggctgaggcaggaggattgcttgagtccaggagtttgaggctacagtgagccctgtcgtgccattgcactacagcctggacaaaagtgaaatcctatctcaaaaaaatgaattagtagtaataataattattgagtatttagtatgtgatatggtttttggctgtgtccccacccaaatctcaccttgaatagtaatagtccctacatgtcaagggtggggtcaggtggagataattgaaacatgagggcagcttccccacactctttttcgtggtagtgaataagtctcacgagatctgatggttttataaatgggagttcccctaacacatgccctcttacctgctgccatgtaagacatgtcttgcttcccctttgccttctgccatgattgtgaggcctccccagccatgtggaactgtgagttaattaaacctctttcctttataaattacgcagtctcsggtatgtctttactagccgagtgagaacagattaatacagtatgtgccgggctgtgttctaagagccttccgttaattacgtatctctagtcctcacaacaggtctgggaggagtaggtactcttaatacgatcattttgcagatgagcagactaagttcgcagagattgatgagatggtctcagggctagggtggggcttagctaagatttattcaaaggcaaaagttgttttacaattaatcatatacatgttgtgtgtgtgtatgta

SEQ ID NO: 61655 - DNA, 573 bp, Homo sapiens
tatctatattttaccagtgagaaaatttcaaagaggttaagaagcttattggggtcacacagtaaacaatggagacagaattcctctcacataattctgggcttaaagtccaggccatttacrcttgacctcactgcattaaggggcttaattgatgtcacatatctgttcttctctatgcaaatgattaagttaccacgggacatcatagtagttgagagagtgggctctgcagtcagagtgcctagattcaaatccttcttctgacacttagacacatgaacttgagcaagggtaacctttctattctccagtttcctcatctgtaaaatatgagtaataaaaacacctacttcacaagtgctcagcagagcactcaagacataggatatactcagaaatgttacttattaatactcttataatgatactatgctcaccatttactgatccctatgataatgtatttgtactgttaggctagggattgtatatgataaattaaatggagcaggacttctggcaccagaggctacttgggcagtcacgtaagatacagtcatgcatagctca

SEQ ID NO: 61656 - DNA, 1173 bp, Homo sapiens
cctcaaagttcatacttcagcaataccaaattacctatagccttacacttccatgcttatgtctgtaatctgccctctgcctggaaaacctgccctcaataccatgatcttcttcatttggctattttctatttgtccttcaagtgtcacttcaggtcgtttcttccaggaagccttccttgactgccctatgttggtctccatacctgccatagaacactgtgctacctctgtcatcatacatcacattatattaacaggatccatttatttgcctgtgtcattctagatttctagctctgaatgtgcaggaattgtgtcatcttcttaatttcctcagctcctaacacaatgctggacaaagagtagttgttccataaatataatgggccaatagcctttccttgagaagggacagagatggtgaggcaggacacatccatggactatatactcacctggagaagcagcaaggcgtgagtgagagtgagactgtggtgaaacagagcaaggccaaaaagactctgaaggcctcatgtaggcagctgggaaggaagggagtgaagaaggagggattgaggacaatgggcccaaccctttcatccaattgatggcatcaattcaatccagtacattaagaaactaaacagactgaaaataaaaccagttcacaaaaattcataaataatagagataaacaagaggtcagtatgggacaaaatggtcacttagattacataactaacttgtcagaaaggacacatactcttgccaagaaagaccctggaccgtatggaccacaataaagccctaggggatccgaatgttgagccacatttttctggtaatggcaatttttgttactaactgtatgactttccatttgaaaggcctggcttatcaagggaggtagagagtatttcatttttggctcatttactaccacctttaatcactgccatagtcacattcttacttattcttacttctgcataaaagaggcagaataaagtttcaaaarggctcaagggctcaaagcatcaagcataaaaatcttcataagacaacctaaatcaaaaatagcatacagtttacatttcccttgaatctctatgacaatgaactctttttgctgactaattagtacccagtatgagattcatcataagagta

SEQ ID NO: 61657 - DNA, 1173 bp, Homo sapiens
cctcaaagttcatacttcagcaataccaaattacctatagccttacacttccatgcttatgtctgtaatctgccctctgcctggaaaacctgccctcaataccatgatcttcttcatttggctattttctatttgtccttcaagtgtcacttcaggtcgtttcttccaggaagccttccttgactgccctatgttggtctccatacctgccatagaacactgtgctacctctgtcatcatacatcacattatattaacaggatccatttatttgcctgtgtcattctagatttctagctctgaatgtgcaggaattgtgtcatcttcttaatttcctcagctcctaacacaatgctggacaaagagtagttgttccataaatataatgggccaatagcctttccttgagaagggacagagatggtgaggcaggacacatccatggactatatactcacctggagaagcagcaaggcgtgagtgagagtgagactgtggtgaaacagagcaaggccaaaaagactctgaaggcctcatgtaggcagctgggaaggaagggagtgaagaaggagggattgaggacaatgggcccaaccctttcatccaattgatggcatcaattcaatccagtacattaagaaactaaacagactgaaaataaaaccagttcacaaaaattcataaataatagagataaacaagaggtcagtatgggacaaaatggtcacttagattacataactaacttgtcagaaaggacacatactcttgccaagaaagaccctggaccgtatggaccacaataaagccctaggggatccgaatgttgagccacatttttctggtaatggcaatttttgttactaactgtatgactttccatttgaaaggcctggcttatcaagggaggtagagagtatttcatttttggctcatttactaccacctttaatcactgccatagtcacattcttacttattcttacttctgcataaaagaggcagaataaagtttcaaaagggctcaagggctcaaagcatcaagcataaaaatcttcataagacaacctaaatcaaaaatagcatacagtttacatttcccttgaatctctatgacaatkaactctttttgctgactaattagtacccagtatgagattcatcataagagta

SEQ ID NO: 61658 - DNA, 1919 bp, Homo sapiens
atgtattgtgttttgtatgggaaaacaatgatgccaaagtgtctatagctatatagtctgatatgtgctataataagaatttggaaaaagtattattggttcacaaaggcagaaatttaggaggttagatacatttaaagtaaaatttgattaaaaagtgtaaacttaaatagattaagataacatggggtgtttgtaaaatatattagtaaaatacaatgacatacccaaagtcctgttaaatcaaattaaatatggcctgagaaaaaygccatacttctatatttcagtccttgtgaatgaactgcaacctaactcaataggtacacaagactaaaacctaacttaggaatatgcgcctgtaacaatcgctgagtcttggccaattccagcagccatacttcaactagtcgcatacagctgagtgttcaaataaagcaagtgccaagccgtaaccaatccagctgtttctgtacctcacttctgatttctatacgtcactttactttgtattgtctataaattcattctgaccatgagacacccctggagtctctctgaatctgctgtgattgtgggggctttccaatttatgaatcattcattactcaattaaactgtaaatttattttggctgaaggtgtttttttttgttttgtttttttttttagcagtcctcaccataatgatccatacacgtaagtgtctaatataatctttctagctttcttttttggttgtgtttagtcatactgttgctgattcagctttgtataaaatgtcagagcaaaatgactatcaataatacagagatctgcaagaattcccacacaggtgaaatatgcatggtggaaagaggcaattcttaaggcaaagagccaagcatgtaccaaacaccaatgcccttgcataccaaagctaaagattctacaatttgccaaagataagaatgtaactttcacaacagcaaggacctcatatattgtcttattatatatccctaaaatctagcacagtgttgaataagaggaagtagaaataattttgagaaggaattaaacatgtatttgtagaagtcaagtcttacccattgaaaaagtatctcccccatatttgtaattcattaaattgtttggaagggaaaagaaactaaagggaatactccatagggaaagttgtttcagaaattatgcaaatttattctaataactaagaaatagtgaaaatgtattagaaatgttaggtagaggcacatttcagatttagactaaggtgcaaatggctttctacttaatgatagagaaaagcataaataaaagtacattgtatacatgaaatggttttgtttgaattgggtatagaatatcaaatgagaaatatatagtaaggaattgaatatatggaaatacagatatagacggccagagcacctacttgtagctcttgatagcagaattatcagtcaactgaaaagatattttaagacctccaagaataagtagataatttctattctgtattttgttaatgaaagaaaaccagggtaataactgcttgaattttcatcactagcatgtttcctacatacataaacatagtgagtagtgagtatattcacacataaagtaacaaagaattatagtaaaccccaacatccaatcgggaaaaatgttgtaactctatatattcattaaattgttcacaaactgacatcttttagcatataatatggtttcctttagcttgttaaagagcatggactcatgactaaaacataagaacacccaatgaagctcaactaaatcaattcaactatgaaaaataaactgactagtgatcatctctttattattattgaaagaataacttacaagtaaaaacattcaatttttgaaaacagctttatatttattgaattt

SEQ ID NO: 61659 - DNA, 1919 bp, Homo sapiens
atgtattgtgttttgtatgggaaaacaatgatgccaaagtgtctatagctatatagtctgatatgtgctataataagaatttggaaaaagtattattggttcacaaaggcagaaatttaggaggttagatacatttaaagtaaaatttgattaaaaagtgtaaacttaaatagattaagataacatggggtgtttgtaaaatatattagtaaaatacaatgacatacccaaagtcctgttaaatcaaattaaatatggcctgagaaaaacgccatacttctatatttcagtccttgtgaatgaactgcaacctaactcaataggtacacaagactaaaacctaacttaggaatatgcgcctgtaacaatcgctgagtcttggccaattccagcagccatacttcaactagtcgcatacagctgagtgttcaaataaagcaagtgccaagccgtaaccaatccagctgtttctgtacctcacttctgatttctatacgtcactttactttgtattgtctataaattcattctgaccatgagacacccctggagtctctctgaatctgctgtgattgtgggggctttccaatttatgaatcattcattactcaattaaactgtaaatttattttggctgaaggtgtttttttttkttttgtttttttttttagcagtcctcaccataatgatccatacacgtaagtgtctaatataatctttctagctttcttttttggttgtgtttagtcatactgttgctgattcagctttgtataaaatgtcagagcaaaatgactatcaataatacagagatctgcaagaattcccacacaggtgaaatatgcatggtggaaagaggcaattcttaaggcaaagagccaagcatgtaccaaacaccaatgcccttgcataccaaagctaaagattctacaatttgccaaagataagaatgtaactttcacaacagcaaggacctcatatattgtcttattatatatccctaaaatctagcacagtgttgaataagaggaagtagaaataattttgagaaggaattaaacatgtatttgtagaagtcaagtcttacccattgaaaaagtatctcccccatatttgtaattcattaaattgtttggaagggaaaagaaactaaagggaatactccatagggaaagttgtttcagaaattatgcaaatttattctaataactaagaaatagtgaaaatgtattagaaatgttaggtagaggcacatttcagatttagactaaggtgcaaatggctttctacttaatgatagagaaaagcataaataaaagtacattgtatacatgaaatggttttgtttgaattgggtatagaatatcaaatgagaaatatatagtaaggaattgaatatatggaaatacagatatagacggccagagcacctacttgtagctcttgatagcagaattatcagtcaactgaaaagatattttaagacctccaagaataagtagataatttctattctgtattttgttaatgaaagaaaaccagggtaataactgcttgaattttcatcactagcatgtttcctacatacataaacatagtgagtagtgagtatattcacacataaagtaacaaagaattatagtaaaccccaacatccaatcgggaaaaatgttgtaactctatatattcattaaattgttcacaaactgacatcttttagcatataatatggtttcctttagcttgttaaagagcatggactcatgactaaaacataagaacacccaatgaagctcaactaaatcaattcaactatgaaaaataaactgactagtgatcatctctttattattattgaaagaataacttacaagtaaaaacattcaatttttgaaaacagctttatatttattgaattt

SEQ ID NO: 61660 - DNA, 1919 bp, Homo sapiens
atgtattgtgttttgtatgggaaaacaatgatgccaaagtgtctatagctatatagtctgatatgtgctataataagaatttggaaaaagtattattggttcacaaaggcagaaatttaggaggttagatacatttaaagtaaaatttgattaaaaagtgtaaacttaaatagattaagataacatggggtgtttgtaaaatatattagtaaaatacaatgacatacccaaagtcctgttaaatcaaattaaatatggcctgagaaaaacgccatacttctatatttcagtccttgtgaatgaactgcaacctaactcaataggtacacaagactaaaacctaacttaggaatatgcgcctgtaacaatcgctgagtcttggccaattccagcagccatacttcaactagtcgcatacagctgagtgttcaaataaagcaagtgccaagccgtaaccaatccagctgtttctgtacctcacttctgatttctatacgtcactttactttgtattgtctataaattcattctgaccatgagacacccctggagtctctctgaatctgctgtgattgtgggggctttccaatttatgaatcattcattactcaattaaactgtaaatttattttggctgaaggtgtttttttttgttttktttttttttttagcagtcctcaccataatgatccatacacgtaagtgtctaatataatctttctagctttcttttttggttgtgtttagtcatactgttgctgattcagctttgtataaaatgtcagagcaaaatgactatcaataatacagagatctgcaagaattcccacacaggtgaaatatgcatggtggaaagaggcaattcttaaggcaaagagccaagcatgtaccaaacaccaatgcccttgcataccaaagctaaagattctacaatttgccaaagataagaatgtaactttcacaacagcaaggacctcatatattgtcttattatatatccctaaaatctagcacagtgttgaataagaggaagtagaaataattttgagaaggaattaaacatgtatttgtagaagtcaagtcttacccattgaaaaagtatctcccccatatttgtaattcattaaattgtttggaagggaaaagaaactaaagggaatactccatagggaaagttgtttcagaaattatgcaaatttattctaataactaagaaatagtgaaaatgtattagaaatgttaggtagaggcacatttcagatttagactaaggtgcaaatggctttctacttaatgatagagaaaagcataaataaaagtacattgtatacatgaaatggttttgtttgaattgggtatagaatatcaaatgagaaatatatagtaaggaattgaatatatggaaatacagatatagacggccagagcacctacttgtagctcttgatagcagaattatcagtcaactgaaaagatattttaagacctccaagaataagtagataatttctattctgtattttgttaatgaaagaaaaccagggtaataactgcttgaattttcatcactagcatgtttcctacatacataaacatagtgagtagtgagtatattcacacataaagtaacaaagaattatagtaaaccccaacatccaatcgggaaaaatgttgtaactctatatattcattaaattgttcacaaactgacatcttttagcatataatatggtttcctttagcttgttaaagagcatggactcatgactaaaacataagaacacccaatgaagctcaactaaatcaattcaactatgaaaaataaactgactagtgatcatctctttattattattgaaagaataacttacaagtaaaaacattcaatttttgaaaacagctttatatttattgaattt

SEQ ID NO: 61661 - DNA, 1919 bp, Homo sapiens
atgtattgtgttttgtatgggaaaacaatgatgccaaagtgtctatagctatatagtctgatatgtgctataataagaatttggaaaaagtattattggttcacaaaggcagaaatttaggaggttagatacatttaaagtaaaatttgattaaaaagtgtaaacttaaatagattaagataacatggggtgtttgtaaaatatattagtaaaatacaatgacatacccaaagtcctgttaaatcaaattaaatatggcctgagaaaaacgccatacttctatatttcagtccttgtgaatgaactgcaacctaactcaataggtacacaagactaaaacctaacttaggaatatgcgcctgtaacaatcgctgagtcttggccaattccagcagccatacttcaactagtcgcatacagctgagtgttcaaataaagcaagtgccaagccgtaaccaatccagctgtttctgtacctcacttctgatttctatacgtcactttactttgtattgtctataaattcattctgaccatgagacacccctggagtctctctgaatctgctgtgattgtgggggctttccaatttatgaatcattcattactcaattaaactgtaaatttattttggctgaaggtgtttttttttgttttgtttttttttttagcagtcctcaccataatgatccatacacgtaagtgtctaatataatctttctagctttcttttttggttgtgtttagtcatactgttgctgattcagctttgtataaaatgtcagagcaaaatgactatcaataatacagagatctgcaagaattcccacacaggtgaaatatgcatggtggaaagaggcaattcttaaggcaaagagccaagcatgtaccaaacaccaatgcccttgcataccaaagctaaagattctacaatttgccaaagataagaatgtaactttcacaacagcaaggacctcatatattgtcttattatatatccctaaaatctagcacagtgttgaataagaggaagtagaaataattttgagaaggaattaaacatgtatttgtagaagtcaagtcttacccattgaaaaagtatctcccccatatttgtaattcattaaattgtttggaagggaaaagaaactaaagggaatactccatagggaaagttgtttcagaaattatgcaaatttattctaataactaagaaatagtgaaaatgtattagaaatgttaggtagaggcacatttcagatttagactaaggtgcaaatggctttctacttaatgatagagaaaagcataaataaaagtacattgtatacatgaaatggttttgtttgaattgggtatagaatatcaaatgagaaatatatagtaaggaattgaatatatggaaatacagatatagacggccagagcacctacttgtagctcttgatagcagaattatcagtcaactgaaaagatattttaagacctccaagaataagtagataatttctattctgtattttgttaatgaaagaaaaccagggtaataactgcttgaattttcatcactagcatgtttcctacatacataaacatagtgagtagtgagtatattcacayataaagtaacaaagaattatagtaaaccccaacatccaatcgggaaaaatgttgtaactctatatattcattaaattgttcacaaactgacatcttttagcatataatatggtttcctttagcttgttaaagagcatggactcatgactaaaacataagaacacccaatgaagctcaactaaatcaattcaactatgaaaaataaactgactagtgatcatctctttattattattgaaagaataacttacaagtaaaaacattcaatttttgaaaacagctttatatttattgaattt

SEQ ID NO: 61662 - DNA, 1919 bp, Homo sapiens
atgtattgtgttttgtatgggaaaacaatgatgccaaagtgtctatagctatatagtctgatatgtgctataataagaatttggaaaaagtattattggttcacaaaggcagaaatttaggaggttagatacatttaaagtaaaatttgattaaaaagtgtaaacttaaatagattaagataacatggggtgtttgtaaaatatattagtaaaatacaatgacatacccaaagtcctgttaaatcaaattaaatatggcctgagaaaaacgccatacttctatatttcagtccttgtgaatgaactgcaacctaactcaataggtacacaagactaaaacctaacttaggaatatgcgcctgtaacaatcgctgagtcttggccaattccagcagccatacttcaactagtcgcatacagctgagtgttcaaataaagcaagtgccaagccgtaaccaatccagctgtttctgtacctcacttctgatttctatacgtcactttactttgtattgtctataaattcattctgaccatgagacacccctggagtctctctgaatctgctgtgattgtgggggctttccaatttatgaatcattcattactcaattaaactgtaaatttattttggctgaaggtgtttttttttgttttgtttttttttttagcagtcctcaccataatgatccatacacgtaagtgtctaatataatctttctagctttcttttttggttgtgtttagtcatactgttgctgattcagctttgtataaaatgtcagagcaaaatgactatcaataatacagagatctgcaagaattcccacacaggtgaaatatgcatggtggaaagaggcaattcttaaggcaaagagccaagcatgtaccaaacaccaatgcccttgcataccaaagctaaagattctacaatttgccaaagataagaatgtaactttcacaacagcaaggacctcatatattgtcttattatatatccctaaaatctagcacagtgttgaataagaggaagtagaaataattttgagaaggaattaaacatgtatttgtagaagtcaagtcttacccattgaaaaagtatctcccccatatttgtaattcattaaattgtttggaagggaaaagaaactaaagggaatactccatagggaaagttgtttcagaaattatgcaaatttattctaataactaagaaatagtgaaaatgtattagaaatgttaggtagaggcacatttcagatttagactaaggtgcaaatggctttctacttaatgatagagaaaagcataaataaaagtacattgtatacatgaaatggttttgtttgaattgggtatagaatatcaaatgagaaatatatagtaaggaattgaatatatggaaatacagatatagacggccagagcacctacttgtagctcttgatagcagaattatcagtcaactgaaaagatattttaagacctccaagaataagtagataatttctattctgtattttgttaatgaaagaaaaccagggtaataactgcttgaattttcatcactagcatgtttcctacatacataaacatagtgagtagtgagtatattcacacataaagtaacaaagaattatagtaaaccccaacatccaatsgggaaaaatgttgtaactctatatattcattaaattgttcacaaactgacatcttttagcatataatatggtttcctttagcttgttaaagagcatggactcatgactaaaacataagaacacccaatgaagctcaactaaatcaattcaactatgaaaaataaactgactagtgatcatctctttattattattgaaagaataacttacaagtaaaaacattcaatttttgaaaacagctttatatttattgaattt

SEQ ID NO: 61663 - DNA, 1499 bp, Homo sapiens
atttttataagagggccggaattagcctcttcgactggggcggagtagctggggtgtgggaaaggaacaccttcatacaacttccagctttcagccccttggagagatttccaagttctccggagccaccaggacttcctttccttgatctctcggccacctcctcctccttctccgattttttttccctccccccgctgtcttctctacggtttaattaaagttcagcgactccacttgtctctcctctcatttctttcggaaagcggaaaccagacgacccagcggccacgggacgagccgccccaactcaaccccagcaggacgctggaggggcctcccttgcccacctctcttcgctggcactggcctcccgcacccgggtctgcagtcccccctccatctcgcaggtgtgcagccgctaggcctgggggatccgaatgactggggctggataggaatgccttcgtgtttcccaagacccaggggcctgctccacaaagtttgaagggtgggtacacgccgacccaggcaagttgctcccccaaacccatgactgactaatctgatatgacaaaagcccatgatggatttggtatatgttaattcacaatgccctttcctccagaatttaactataagttaatacacaccggaaaccacgcgcatacacgctccttaatgggcttaggtattagcgaatcctaacgatgcatacaaatgtgttctgcgctctgtagacccctcaagatttatgggccttgagctctctgaagctgtaaacaaggagaaaaaaaaagagaaagcgaaagcgactggggggaagagacagaggcctgactcacccctccaggttttggagagaagggattctttatgtattttcctttccttgcaagctcggtgcgtgtgggttttggcgttggtctgggggtggtgttctgcctgaatgctggtgtgcgtgggcagtgtgttgtttgcatgctggggtaggatgcctgcctcttcggattgctgtgcaggggcctgaacacagcaggcatttgtgaccatatatgcgtgagtgtgcactgtgttagggtgtgtgtgtgtgtrtgtgtgtgtgtgtgtgagagagagagagacagacagggagaggcaggcttccccctgggccaggctgctgtcccttgaacggtggtgaacaaatctctaacgacaatcttaataacaataaataatgaataataataataaaacagtagttaacagtccctgcataacagaataacaataaaatgcaagaggaaatattttgaggtggagacaggagtcaggatcacagcatctgagggggagataggaaaggaagggaggaagacagcttcttaatatgctcttggtggggctgcggttgggaacccctttcccagacaagggacgtaagaggagaaggagagccaggaggccactctttattgctttttttctcaggcttctgctttgtgtgatcagggaag

SEQ ID NO: 61664 - DNA, 706 bp, Homo sapiens
atgaatgagtgaatgagtgactgagcaaatgagtgagtgaatgagtgagtgagtgaatgagtgaatgagtgagtgaatgaatgaatgaacgaatggatgagtgagtgaatgagtgagtgagtgaatgggtgaatgaacaaatgagcaggtgagtgagtgagcaagtgaataagtgaacaagtgaatgagtgagcgagtgaatgaatgaatgaatgagtgagtgagtgaatgagtgagtgaatgaatgagcgaatgaatgagtgaatgagtgagtgaatgagtgaatgagtgaggaaatgaatgagtgaatgagtgagtgagtgagtgaatgagtgaaggagtgagtgaatgaatgaatgagtgaacaaacgaatgagtgagtgaatgagtgagtaaatgagtgagtgagtgaatgaatgaatgagttagtgaatgaatgagtgagtgagtgaatgagtgagtgaatgagtgagtgaatgagtgagtgagtgaatgagttagtaggtgagtgaatgagtgagtgaatgagtgagggaatgaagaaaggaattagtgagttcagagcccatagaccctggaggacgaaggttcattaggcccctccagttcagcgagttcctgggaggtctctggatgctgtggggtgctaagctgtcayctcatgatccacgcagatggggcttcactggcctggggccaggctcag

SEQ ID NO: 61665 - DNA, 742 bp, Homo sapiens
ggatccttacaggttgcttaaaagggatagtttgttgtagtcctgaattartaaagtaatgtcctattctccacttaccatgtagtactgcttttgttaaataatccattggggcttgggtagtttaggtggcaggcaggatatgccccactgttatggcttgaattctgagttgtcaaagagtatgtcccctcaggcaatggtgatttttgtgctacaagaagtcggggggtcaataccaataatgcactcacaagtgagaaccatggtcactgacatccaatatggaccaaagccatatcacaggttgataagcactactggtcaatgcattcattctaaaaccttccagtgtcaccagtttttctccctaagaggacctggaaatattatgtggactcctgtatcaaaaaaaaaagtctgaatttctttcttttctcctcttaccttgacagaaatataaggcctttggcctccatttggggaccctgagaccttggtcccatttctgactctgccattcagcccaatacattggatttgcaatgtcctttcatcaaagaaacatgcctggcctttctctatatctgtcctttagataatgagtctccctttctgtgaaggcctttatcacatgtattgattccttctcagatgcctcaaggaagatctgaggacccctttcttctttccctctcaggtgccttagtgtctggttgagtacacacttccctcactctct

SEQ ID NO: 61666 - DNA, 742 bp, Homo sapiens
ggatccttacaggttgcttaaaagggatagtttgttgtagtcctgaattagtaaagtaatgtcctattctccacttaccatgtagtactgcttttgttaaataatccaytggggcttgggtagtttaggtggcaggcaggatatgccccactgttatggcttgaattctgagttgtcaaagagtatgtcccctcaggcaatggtgatttttgtgctacaagaagtcggggggtcaataccaataatgcactcacaagtgagaaccatggtcactgacatccaatatggaccaaagccatatcacaggttgataagcactactggtcaatgcattcattctaaaaccttccagtgtcaccagtttttctccctaagaggacctggaaatattatgtggactcctgtatcaaaaaaaaaagtctgaatttctttcttttctcctcttaccttgacagaaatataaggcctttggcctccatttggggaccctgagaccttggtcccatttctgactctgccattcagcccaatacattggatttgcaatgtcctttcatcaaagaaacatgcctggcctttctctatatctgtcctttagataatgagtctccctttctgtgaaggcctttatcacatgtattgattccttctcagatgcctcaaggaagatctgaggacccctttcttctttccctctcaggtgccttagtgtctggttgagtacacacttccctcactctct

SEQ ID NO: 61667 - DNA, 742 bp, Homo sapiens
ggatccttacaggttgcttaaaagggatagtttgttgtagtcctgaattagtaaagtaatgtcctattctccacttaccatgtagtactgcttttgttaaataatccattggggcttgggtagtttaggtggcaggcaggatatgccccactgttatggcttgaattctgagttgtcaaagagtatgtcccctcaggcaatggtgatttttgtgctacaagaagtcggggggtcaataccaataatgcactcacaagtgagaaccatggtcactgacatccaatatggaccaaagccatatcacaggtwgataagcactactggtcaatgcattcattctaaaaccttccagtgtcaccagtttttctccctaagaggacctggaaatattatgtggactcctgtatcaaaaaaaaaagtctgaatttctttcttttctcctcttaccttgacagaaatataaggcctttggcctccatttggggaccctgagaccttggtcccatttctgactctgccattcagcccaatacattggatttgcaatgtcctttcatcaaagaaacatgcctggcctttctctatatctgtcctttagataatgagtctccctttctgtgaaggcctttatcacatgtattgattccttctcagatgcctcaaggaagatctgaggacccctttcttctttccctctcaggtgccttagtgtctggttgagtacacacttccctcactctct

SEQ ID NO: 61668 - DNA, 742 bp, Homo sapiens
ggatccttacaggttgcttaaaagggatagtttgttgtagtcctgaattagtaaagtaatgtcctattctccacttaccatgtagtactgcttttgttaaataatccattggggcttgggtagtttaggtggcaggcaggatatgccccactgttatggcttgaattctgagttgtcaaagagtatgtcccctcaggcaatggtgatttttgtgctacaagaagtcggggggtcaataccaataatgcactcacaagtgagaaccatggtcactgacatccaatatggaccaaagccatatcacaggttgataagcactactggtcaatgcattcattctaaaaccttccagtgtcaccagtttttctccctaagaggacctggaaatattatgtggactcctgtatcaaaaaaaaaagtctgaatttctttcttttctcctcttaccttgacagaaatataaggcctttggcctccatttggggacccygagaccttggtcccatttctgactctgccattcagcccaatacattggatttgcaatgtcctttcatcaaagaaacatgcctggcctttctctatatctgtcctttagataatgagtctccctttctgtgaaggcctttatcacatgtattgattccttctcagatgcctcaaggaagatctgaggacccctttcttctttccctctcaggtgccttagtgtctggttgagtacacacttccctcactctct

SEQ ID NO: 61669 - DNA, 1044 bp, Homo sapiens
gtgtttatcactcaagtgtctcattctacaactgcagttaattttacaagaaataatttgtcattttctaaaatgaccctttaaatgctgctggcaaaagccattgtcagttgattgcctctgaagccagtgatctgtgtggtgttgtacagaacaaccagtmttgtgctaccatacctgaaagagacaaagaaaacaagacactgatgtatatgagcttgtttttttttttctattcatacattttcctttttttttttttttggtttttgttttgttttgttttgtttgcctgttggtttgtttttaatgattgcctcaaaacatgtgtgctttctaggaaatctaccctcagcagtgcctttcatttttattatctaagtcaatactgatccccagagtatgactgctattcatgactgttgttggatggctaaacatcttttggattttagattctctgtgcttttggacagcattttaatactattgctagctgactgttctaaatgtggttactgaaaatgttctaaggaactagttcctttctaagacagaatatgtaataaaattataaaactcatgaaatttactcttagttttttatataatgtacctacagagtaaaaagttaaggtccttatgattaagactaagtcatataagcttatacagcctatattaattttttgaatacttttatttagtttggaaaataatgcgttcaaactttgaagttcttatactgaataaaataataacatttttttccccaggtctgctattttctgtgtatctgactcagttacagactgtgaagttaggttttaactaacctaaagaaagtacccaagaaataaattatttgaactcttttttactgctttgtgttattacaaaatatgtgaaacacaatatgagcatacttcaaaatatgtgtgcatttatgttgtaattcatgttaatgtcctcatttgtatatagacaaaatatacttaattcataaattgtggatcagctttcaattctttatttactaagtat

SEQ ID NO: 61670 - DNA, 1118 bp, Homo sapiens
gagtgtcaactaaggttgatttctttctcatgccataagtccatcccaggtaagtaaggaatgtgtcccaggttgtctcctacaggaactcaggtaggtctttagagcctctggaaatggctagtcattgtgatagggaaagggcatatgtgaatcacacactgcatcttaaaggatctgcatagaggtgacacttatcactccttaactggcttaagtgacacttcacctatcacgtggccatacctaacttgaagggcctggagaatcataatcctagcttgtgtctagargagctaaaatattggtgagcagcactaatgaccatcacatatggattctttccattttctacagtggaataccttttgcatcaaagaagccttctagatgtttctcctgttactaataacactacattctttctgtgtagctgttaacaaacaagtagactttcttaattttatattttcccagtttcaaggatttgctggcattaaaaattttagtagccttgtagcagaatattctagtttctttcaaagaagataaataattttataaaatccctctttttttgccagacattgatgaatgctctgatggttttgttcaatgtgacagtcgtgctaattgcattaacctgcctggatggtaccactgtgagtgcagagatggctaccatgacaatgggatgttttcaccaagtggagaatcgtgtgaaggtcagtacaaggagaagacctagaatttaagaacttctcttgaacttgaggaatatatcataagctataaatagaagacattgagccaatgttagtgtttttactatatgtgtatacaacagtgattggaaatgtgttaaaatctaactttttcttgctaattatggtatctaatgttatttttagataattaaagtttgtgacactaacccagttttctgtggattcttgcaactgttaaatggtgtttttagaatgaaaaaacatgtagtatcacataaattttttaaaacgaaagcatgcaagcatctgatccaaaaacaggtagcaaaaatacatgagaaaagcaagatagagggaaaatggggatagaggaaatgcaatgatgatgtg

SEQ ID NO: 61671 - DNA, 545 bp, Homo sapiens
gcctcccaggttcgagtgattctcctgcctcagcctcccaagtaactgggactacaagcatgttgccaccatacctggctaattttttgtatttttagtagagacaaggtttcgccatgttggccaggctggtctcgaactcctgacctcaggtgatctgccccmcttggcctcccaaagtgctgggattacaggcgtgagccactgctcccggccttccttcttatttaatacccactttgtttatgcatgctatctggatttttctctatatttttaattgtaaggttaggatatgtgcaaacaaattaggaaaccatctcatagccctgtgccttaaatcattaaatctcattatattctgagatttctttttatgattcttaacatctcaggtttatttttgatttatatcacattatccaggtatttgagttcaaaccttgtttcaacttcttctgtaatggctttcagtacctgtttctttcctgcatgttccatattgctacaatctgttttaagcattcataaccaaatcactctaa

SEQ ID NO: 61672 - DNA, 963 bp, Homo sapiens
ttacacagacattaaaacaaataaaatcatgtcctttacagcaacacagatgcagctggaggccattatcctaagtgaattaatgcaaaaacagccaaatactacatgttctaactyacaagtaggaggtaaacattgggtacatatggacacaaagatgggaacaataaacactggggactcaaaacagaatggagggatggagggaagagttgaaaaactacctattgggtactatgttcactatttgggtgacgggttcagttgaagcccaaacctcagtatatgtaatacatccacgtaacaaacctgcacatgtacgcccgaatctaaaataaaaaataaaaataaaaagttggctcacatagtttaatataaaaaggcaaacctactgttgccttctatacatgtctactttagaaatggaaagcttcctataagagctgtttataagagctataaactctgtttacagacaggaaaaggaaaaagaaagcacagttggctgagaaaaaagactttaatactctatttacttatttgggtccatgctttgactgtcaaacatgtattaacaagctttcgagaaaatactaactatatacagttctttagaaaagaaaggcagaaattacatttcatttttttaaaaatggctaggtacatagaaaaaacacaatgacaatccaccaaaatattaacaatgattatctttggaagatgggactgtgaatttaccctttattcgcacattttaagaaatactaaaaaagtaatcacgccactgcactccagcctgggcgacagagccagactccgttaaaaaaaaaaaaaagagagaaatactaaaaaagtaatacatgtaatcgaacaagagaaagttacccttgaccagtcccttactcctgccctcagccaaatcccaagagtgggctacacagataaccactgtttggtccagac

SEQ ID NO: 61673 - DNA, 963 bp, Homo sapiens
ttacacagacattaaaacaaataaaatcatgtcctttacagcaacacagatgcagctggaggccattatcctaagtgaattaatgcaaaaacagccaaatactacatgttctaacttacaagtaggaggtaaacattgggtacatatggacacaaagatgggaacaataaacactggggactcaaaacagaatggagggatggagggaagagttgaaaaactacctattgggtactatgttcactatttgggtgacgggttcagttgaagcccaaacctcagtatatgtaatacatccacgtaacaaacctgcacatgtacgcccgaatctaaaataaaaaataaaaataaaaagttggctcacatagtttaatataaaaaggcaaacctactgttgccttctatacatgtctactttagaaatggaaagcttcctataagagctgtttataagagctataaactctgtttacagacaggaaaaggaaaaagaaagcacagttggctgagaaaaaagactttaatactctatttacttatttgggtccatgctttgactgtcaaacatgtattaacaagctttcgagaaaatactaactatatacagttctttagaaaagaaaggcagaaattacatttcatttttttaaaaatggctaggtacatagaaaaaacacaatgacaatccaccaaaayattaacaatgattatctttggaagatgggactgtgaatttaccctttattcgcacattttaagaaatactaaaaaagtaatcacgccactgcactccagcctgggcgacagagccagactccgttaaaaaaaaaaaaaagagagaaatactaaaaaagtaatacatgtaatcgaacaagagaaagttacccttgaccagtcccttactcctgccctcagccaaatcccaagagtgggctacacagataaccactgtttggtccagac

SEQ ID NO: 61674 - DNA, 622 bp, Homo sapiens
agacaccagtccttttaaattttactgtgaaattcaaatgagctgcaaaatctgagacccccgaaatgacagaaatgtcctcttcttgacttagaaatgaaggacttagagttcctttttttttttttttttttttttttgmgatagaatctggctctgtcacccaggctggagtgcagtggtgcgatctcagctcactgcaaattccgcctcccggattcaagcaattctcctgcctcagcctctcgagtcactgttattacaggtgcccaccaccaagcctagctaacttttgtattttttttttttttcgaaacagagtcttgctctgtcgtgcaggctggagtgcactggtgcgatcttggctcactgcaacctctgccccctgggttcaagcaattatcctgcctcagcctcctgagtagctgggattacaggcacctgccaccacgcccagctaatttttgtatttttagtagcgatgaggtttcaccatgttggccaggctggtcttaaactcctgacctcaagtgatccaaccacctcggcctcctaaagtgctaggattacaggcgtgagccaccacacccggcctaatttttgtatttttagtagagatggg

SEQ ID NO: 61675 - DNA, 1092 bp, Homo sapiens
attttttggttaacttgttctttaaagatgaatctagctgggcccgaggcaggcagatcacctgaagtcaggagttcgagaccagtctggccaacatggtgaaaccctgtctctactaaaaatacaaaattagccgggtatggtggtgggcgcctgtaatctcagctactcgggaggctgaggcaggagaattgcttgaacccaggaggcagaggttgcagagagccaagatgtgccactgcactccagcctgggagacagagcaaaaccatgttaaaaaaaaaaaaaaaaagaatcctctggtcttgggaatctaatgccctatattataattcatagccagacacagagtaattacttgtttgcacccagcgttctaaccacaggaagggaatgggggaagtgggtttttgcaagaacctgctttgaggtgcacacctccacagagctaagcaatctagtctgggagataatactcatacgtgtccaggaaatgaggaacaaccagatagcacataattaaaacaccatattttatgatgcagatcatttaagaaatgtgggaggctggatgcagtggctcatgcctgtaatcccagcactttgggaggctgaggcgagtggatcaagaggtcaggagttcaagaccagcctggccaacatggtgaaaccccgcctctactaaaaatataaaaattagccagrcgtggtggcgggcacccgcaatcccagctactctggaggctgaggcaggggaatcacttgaacccgggaggcagaggttgctgtgagccgagatcatgccactgcactccagcctgggcaacaagagtgaaattccatcacacaaaaagaaagaaaaggaaaaaagaaaagaaaagaacaggaaagaaagaaagatgggatgagtcacactgcacacttgcagaagtttcaggagcaagatgacaaaaattaaagggaacatctttgtttccttagaagtgtctgcaaaaccctaagtctgagcaaagggggaacttgcagcaccagacaggtgtatgcatatatcatgtgtgaatatgtgtatgtgtgtgtggtggggggcggtaa

SEQ ID NO: 61676 - DNA, 1092 bp, Homo sapiens
attttttggttaacttgttctttaaagatgaatctagctgggcccgaggcaggcagatcacctgaagtcaggagttcgagaccagtctggccaacatggtgaaaccctgtctctactaaaaatacaaaattagccgggtatggtggtgggcgcctgtaatctcagctactcgggaggctgaggcaggagaattgcttgaacccaggaggcagaggttgcagagagccaagatgtgccactgcactccagcctgggagacagagcaaaaccatgttaaaaaaaaaaaaaaaaagaatcctctggtcttgggaatctaatgccctatattataattcatagccagacacagagtaattacttgtttgcacccagcgttctaaccacaggaagggaatgggggaagtgggtttttgcaagaacctgctttgaggtgcacacctccacagagctaagcaatctagtctgggagataatactcatacgtgtccaggaaatgaggaacaaccagatagcacataattaaaacaccatattttatgatgcagatcatttaagaaatgtgggaggctggatgcagtggctcatgcctgtaatcccagcactttgggaggctgaggcgagtggatcaagaggtcaggagttcaagaccagcctggccaacatggtgaaaccccgcctctactaaaaatataaaaattagccaggcgtggtggcgggcacccgcaatcccagctactytggaggctgaggcaggggaatcacttgaacccgggaggcagaggttgctgtgagccgagatcatgccactgcactccagcctgggcaacaagagtgaaattccatcacacaaaaagaaagaaaaggaaaaaagaaaagaaaagaacaggaaagaaagaaagatgggatgagtcacactgcacacttgcagaagtttcaggagcaagatgacaaaaattaaagggaacatctttgtttccttagaagtgtctgcaaaaccctaagtctgagcaaagggggaacttgcagcaccagacaggtgtatgcatatatcatgtgtgaatatgtgtatgtgtgtgtggtggggggcggtaa

SEQ ID NO: 61677 - DNA, 1092 bp, Homo sapiens
attttttggttaacttgttctttaaagatgaatctagctgggcccgaggcaggcagatcacctgaagtcaggagttcgagaccagtctggccaacatggtgaaaccctgtctctactaaaaatacaaaattagccgggtatggtggtgggcgcctgtaatctcagctactcgggaggctgaggcaggagaattgcttgaacccaggaggcagaggttgcagagagccaagatgtgccactgcactccagcctgggagacagagcaaaaccatgttaaaaaaaaaaaaaaaaagaatcctctggtcttgggaatctaatgccctatattataattcatagccagacacagagtaattacttgtttgcacccagcgttctaaccacaggaagggaatgggggaagtgggtttttgcaagaacctgctttgaggtgcacacctccacagagctaagcaatctagtctgggagataatactcatacgtgtccaggaaatgaggaacaaccagatagcacataattaaaacaccatattttatgatgcagatcatttaagaaatgtgggaggctggatgcagtggctcatgcctgtaatcccagcactttgggaggctgaggcgagtggatcaagaggtcaggagttcaagaccagcctggccaacatggtgaaaccccgcctctactaaaaatataaaaattagccaggcgtggtggcgggcacccgcaatcccagctactctggaggctgaggcaggggaatcacttgaacccgggaggcagaggttgctgtgagccgagatcatgccactgcactccagcctgggcaacaagagtgaaattccatcacacaaaaagaaagaaaaggaaraaagaaaagaaaagaacaggaaagaaagaaagatgggatgagtcacactgcacacttgcagaagtttcaggagcaagatgacaaaaattaaagggaacatctttgtttccttagaagtgtctgcaaaaccctaagtctgagcaaagggggaacttgcagcaccagacaggtgtatgcatatatcatgtgtgaatatgtgtatgtgtgtgtggtggggggcggtaa

SEQ ID NO: 61678 - DNA, 618 bp, Homo sapiens
tcccactaattatgacagaaatgatgatacatttaaatgacttggatgttttataggtatgatctcgtgaaaccttgagagaaactgaatgacgaatgaaactattgttcctgtttcacacagaagaaaactgaggttaaaaggggtaaagtaattttgcatggcatgaagtagaaattcaaagtacaggaatttgaacttggttctgtccttttctgaagcccttgaccactatagactcaaacatcaccttgtttttccactcattcaacactttttttttaaattatctaataggttggcactcatcatgagcccctgttctcattctgcaaatggtgaagctctctattgtcctgaccccacagttcctgtcccatgaccaggaccagctcaccaaggagctgcagcagcacrtaaagtcagtgacatgcccatgcgagtacctgaggaaggtgagtgagtgcaacagatggggcctggtgcccttgagcagttcccgggtctcagctgccacacatctcaaaccgggtgatgctgggggaagcttacgcagtcacagtactggcttcttcctctttttctttccatacaagtggcttagggatggggtagagt

SEQ ID NO: 61679 - DNA, 1353 bp, Homo sapiens
  misc_feature (1)...(1353): n = A,T,C or G
cagcagcttgccctgcaccggcagctcttctttctcctcctcttccccctcctcctcctcttcctcctcttcctcgcccgctgatgacaaggagaagttatcctgactcacacaggccatgagctttttcatggaggattcgtggccccggccatggcccgtgctgtggcctgggctgtggcctgggctctggcctgtgttgagcttggcacagcgggaacccatggtctacgttgcctgtctctctgggcaaggaggtgaggcggtgggtgaaggggctgcgagtgggggcaggatgctgacatcacaaagggagcccatccccacttgggaacctgggtctgagccaacagttaactcacacctcagccactggcagctcccagcccccacaggggaggtctgcaaggctgagcactggggccagttcggatgccacaccatagtcctcatttgccctggagaaagtttcccttgtagctgggatgggagttagggattgaatttctagaagcaggaggggcacacacagactcctccccacatcccagaaatcgccagccagagagagctgtctctgttgagtttcttgactgttaacccttggaaataaatcatcaagctgtgtgcttaaaatgtatgcactctgtaagctcataaaactcaggaacccttggaagtcttccttcgggggcctgaaagtgtgaaatcttcttgaaaggcaatggcttctaagcattgtttgtttgtccaaagcatggggacaagcccagaaaccaaactgggatgaacaagagttgcctttgttccttacttgatcaaaattgacaccacccaccataagcacctttacccagtaaggtggggtgaccttctcttaatgttttggggcccccaaaagacataatggaccttccctttgccagggtccacatnnnnnnnnnnnnnnnnnnnnnnnnnnnnnnnnnnnnnnnnnnnnnnnnnnnnnnnnnnnnnnnnnnnnnnnnnnnnnnnnnnnnnnnnnnnnnnnnnnnnttattggactagacttcatcaaatgaaaagatgctcaatatcattagtcactaggaaatgcaaaaaagcactaagctgaattcgaacctgggtctgcctgamtccacagacctgggctcctgggtctgctcccttcctgtccccacacctgtccacaccttctaagggccactctagggagctgaagcagccaggcctcccaggagtgtcatggccatggtggggctggagatgatgagattcagtcttggtgaaatctaaaaactcgatggccagtatccctacacaaacagtcctggtctgtctggggttgctgct

SEQ ID NO: 61680 - DNA, 705 bp, Homo sapiens
ggggctacagggccttgtggagtcttgccgtgaggactcgtgtgaaccccttggtggtttaactacaaaagcccacactgccctctgggggatgccattttcagttccttgcccgagggtgggctcctgggggtggtaggggaagctgaagtagttgaccccggccccactggtccctgaccctttgcctggctctggtggagccgcctgccctgggccaggcagcaggccaggctcatcatcgcctgcatctccctcaggagaggccgagaggaaggagctgtcaccccaggatgaaggcagaggtgtctgtggaatcgagcctgctgtacaagccctctacttttagccttgagtgagtccttgagaagtccggctcttcctggcctttccctcctactgcttaggaagctgtgctcttgaccttgctaagagaactgccatttttccattggattcagattccaaaacgtggctgtccatcctgattttgtcctcacgcttaaaaaaataaaaatccctttttactgccattttagtgggaatttgggaggccgcaggggttcatggctggattcagcccatgatccttcactggtcacccgcatgccatggggacgtgatgctgacctgaccccaggtgctyactttcccaggctcacagggaggcagaccacaagtaaaacaaatacacagagaagtaga

SEQ ID NO: 61681 - DNA, 705 bp, Homo sapiens
ggggctacagggccttgtggagtcttgccgtgaggactcgtgtgaaccccttggtggtttaactacaaaagcccacactgccctctgggggatgccattttcagttccttgcccgagggtgggctcctgggggtggtaggggaagctgaagtagttgaccccggccccactggtccctgaccctttgcctggctctggtggagccgcctgccctgggccaggcagcaggccaggctcatcatcgcctgcatctccctcaggagaggccgagaggaaggagctgtcaccccaggatgaaggcagaggtgtctgtggaatcgagcctgctgtacaagccctctacttttagccttgagtgagtccttgagaagtccggctcttcctggcctttccctcctactgcttaggaagctgtgctcttgaccttgctaagagaactgccatttttccattggattcagattccaaaacgtggctgtccatcctgattttgtcctcacgcttaaaaaaataaaaatccctttttactgccattttagtgggaatttgggaggccgcaggggttcatggctggattcagcccatgatccttcactggtcacccgcatgccatggggacgtgatgctgacctgaccccaggtgctcaytttcccaggctcacagggaggcagaccacaagtaaaacaaatacacagagaagtaga

SEQ ID NO: 61682 - DNA, 598 bp, Homo sapiens
acttcatggcttaaaacagcaatgatgaattattcttgaagattctttggtttgactgagtgattcttcagctgatcttacctgggctcacttgtgtggtgggagccaccaagaagctttcatcgcagcatcttcaaatgatgctaagaatgtaccaaagcaggagctctccagccttggaagttgcaggtcatttccactccattctattggtcaaagcatgtcacaggctaccccagaggggcaaggagtgggggaaatggggaaatagacctcatatatatatatatatatatatatatayatatatatatatatatatatttatttatttatttattttgagaaagtcttgctctgtcgcttgggctggagtgcagcaacgccatctccactcacagcagcctccgcctcctgggttcaagctattctcctgcctcagtctatcaagtagctgggactataggtgcctgccatcatgcccagctgatttctgtattttttgtagagacagggttttgccatgttggccaggctggtcttgaactcctgacctcaggtgagctgcccaccttggcctcccaaagtgctgggatta

SEQ ID NO: 61683 - DNA, 598 bp, Homo sapiens
acttcatggcttaaaacagcaatgatgaattattcttgaagattctttggtttgactgagtgattcttcagctgatcttacctgggctcacttgtgtggtgggagccaccaagaagctttcatcgcagcatcttcaaatgatgctaagaatgtaccaaagcaggagctctccagccttggaagttgcaggtcatttccactccattctattggtcaaagcatgtcacaggctaccccagaggggcaaggagtgggggaaatggggaaatagacctcatatatatatatatatatatatatatatatatatatatatatatatatttatttatttatttattttgagaaagtcttgctctgtcgcttgggctggagtgcagcaaygccatctccactcacagcagcctccgcctcctgggttcaagctattctcctgcctcagtctatcaagtagctgggactataggtgcctgccatcatgcccagctgatttctgtattttttgtagagacagggttttgccatgttggccaggctggtcttgaactcctgacctcaggtgagctgcccaccttggcctcccaaagtgctgggatta

SEQ ID NO: 61684 - DNA, 676 bp, Homo sapiens
ccgcatccacatggttttctaagaggttttacttctagcaaacagagagaacttgtaagacaaaaacaacaaaaacaaaaataggttttctcctgtcttcccaaaggtccaccaagatattaaagatgggacttgggtgtccatctctaaaacactaaaaccagaccaatctgcattgtagagactccaaccagtgtcttcaattccaagcactttgcctgagggagaggttgggcagtgggcagggatggagatggatgagtgggaacagccgtgggcttggaggattgtccatggggttggaggtggggtctgtccttgctccactacytctgccaggcctctgcagaccctattgggttggcgagatggtgagacttggggcctggggtagggaggggattattccaagtggtggagaaattccaaaaggcagagctggagataggagggtgattcccagggccactattctggggggaccttacacatataaaatcaaaggaatgagtctctgggtcaccaatgtctactatccctgttctagggattcaaacagctgcttttagacacccagtttttactctacagccgtatacattaaccaggaggagatttgtgacatcaacaagcaatgctaagataacacacacatgggcacgcacacacacatgct

SEQ ID NO: 61685 - DNA, 567 bp, Homo sapiens
atccccccagaatttcttgttcaggaggtcgagggtaaggtctagggatctgcttttttttttttttttttttttgacagggtcttgctctgtcacccaggctggagtgcagtggtgcaatctcggctcactgcatcctcgacctcttgggctcaagccatcctccccactcagcctccctagtagctgggactacaggcatgtgccaccacgcctagctaatttttgtattttttgtagagatgagtctctctatgttgcccaggctggtctcaaactcctgggctcaagcaatccacctgccttggcctctcaaagtgttgggattacaggcatgagccaccatrtccaaaataagatttgcgtgtgtaataagtacctggatgattctgatgctggtgctgctggtctgggaactacactttgagaaccactggatctgaggaacattcaatccagacattttggatatgatcaatgtggagtgtccttaaagagattgaatgcaaaacttgaaaagccactcccaaagtgtagagtggagggaagaatataacatctaactcc

SEQ ID NO: 61686 - DNA, 567 bp, Homo sapiens
atccccccagaatttcttgttcaggaggtcgagggtaaggtctagggatctgcttttttttttttttttttttttgacagggtcttgctctgtcacccaggctggagtgcagtggtgcaatctcggctcactgcatcctcgacctcttgggctcaagccatcctccccactcagcctccctagtagctgggactacaggcatgtgccaccacgcctagctaatttttgtattttttgtagagatgagtctctctatgttgcccaggctggtctcaaactcctgggctcaagcaatccacctgccttggcctctcaaagtgttgggattacaggcatgagccaccatatccaaaataagatttgcgtgtgtaataagtacctggrtgattctgatgctggtgctgctggtctgggaactacactttgagaaccactggatctgaggaacattcaatccagacattttggatatgatcaatgtggagtgtccttaaagagattgaatgcaaaacttgaaaagccactcccaaagtgtagagtggagggaagaatataacatctaactcc

SEQ ID NO: 61687 - DNA, 567 bp, Homo sapiens
atccccccagaatttcttgttcaggaggtcgagggtaaggtctagggatctgcttttttttttttttttttttttgacagggtcttgctctgtcacccaggctggagtgcagtggtgcaatctcggctcactgcatcctcgacctcttgggctcaagccatcctccccactcagcctccctagtagctgggactacaggcatgtgccaccacgcctagctaatttttgtattttttgtagagatgagtctctctatgttgcccaggctggtctcaaactcctgggctcaagcaatccacctgccttggcctctcaaagtgttgggattacaggcatgagccaccatatccaaaataagatttgcgtgtgtaataagtacctggatgattctgatgctggtgctgctggtctgggaactacactttgagaaccacyggatctgaggaacattcaatccagacattttggatatgatcaatgtggagtgtccttaaagagattgaatgcaaaacttgaaaagccactcccaaagtgtagagtggagggaagaatataacatctaactcc

SEQ ID NO: 61688 - DNA, 586 bp, Homo sapiens
aagtgattcacaaatggacacaaggaatatgattagtcctctgtgagtgattctgaggggccgtggtatagagagagagaggggaaggaggatgggaaaatgcgggcagttccctccccaacccattctgacagtttgctggttagagaaaaatccccatgtcagagaatttttttctttgtttatttcctgtgaaatagaatgtgggtctggcattggggaggactctartaattcatattttctgcttatttggctcctggctgaacaggaatttacattacttaatgtctgggtttttcctggggaatcaaaataagttttctattcaattattaagcaaatttcacagccaaataatcctcttatttttacaagtggtattttccctggcagagggttttctggcttctctgggtagttgatccgtctcctctcttctgtttcctctgtccttgtctggctatgaaggaagctaaagcccctcattcatggattaggggcttctcaatggcagttggcagactttggctttgcaagctagagatgaatctttttcttctttctttttttttttttttcgaga

SEQ ID NO: 61689 - DNA, 675 bp, Homo sapiens
cctcctgggttcaagcgattctcctgcttcagcctccctagtagctgggattacaggcatgcaccaccatgcccagctaattttgtatttttagtagagatggggtttatccatgctggtcaggctggtctcgaactcctgacctcaggtgatccgcccacctcggcctcccaaagtgctgggattataggcgtgagccactgtgcccggctcataatttttatttataacaaaaagtaaagtgaacctcctgtagacagagtayagttggatcttgttttttcaaccgattcacctactctatgtcttctaattggggaatttaattcatttatacttaaagtaattattgatagataattgatagataatttatttactatctattattgatagataaattatttacttagtagaagtataactttgagcctgttatttaccttttctaaatgagttttcatttctgtgaaatgggcacaattaaagaggccgcctcctgggactggggtcaggattagttgagatagtctgtgtaaggctaggatggtgcttgacagccagtgttaattattattttttgatcctgtgggatagggcaacccagatactccggtgggaaacacttgcaaccagagaaccttgactcaaaatcttggtcttacttggtttgaa

SEQ ID NO: 61690 - DNA, 614 bp, Homo sapiens
taatgacctctttaagtgacattagagaaatgctgttgtacatgcaggatctgaataagtctggccagccggctactgctttactaattctatcttttttctttgggtcctccagaaccactcttgaaagaaagtgtatgcagaaggcatcataagaatagctgctgctctgtttgcaatcaattagagatggcagaggggttatctacttcctcatcagaggccagcagcagcactgttccaaatacaatcaaatgtttgatttctttggrtggccacatgagtaaacgtgaccagaggctgctactttccctctcagttgaagcttctgctaaatgaatcatagcagctctatgagaaagtgaggggaaaacccaccaatgactagccaagaaactttcaagtataactgaggaagtcattggaagaaaagaaaagaaagcctaccaaatcagctgcttttcagatggcacctcctatgacccctgaatagcctaagagttctctaaaatagaacatgtattgcactaccttgattggctttattaaattagagtgtaaactccctaaggacaaaatctcacctggcatagtggcaacagtagatttggtga

SEQ ID NO: 61691 - DNA, 614 bp, Homo sapiens
taatgacctctttaagtgacattagagaaatgctgttgtacatgcaggatctgaataagtctggccagccggctactgctttactaattctatcttttttctttgggtcctccagaaccactcttgaaagaaagtgtatgcagaaggcatcataagaatagctgctgctctgtttgcaatcaattagagatggcagaggggttatctacttcctcatcagaggccagcagcagcactgttccaaatacaatcaaatgtttgatttctttgggtggccacwtgagtaaacgtgaccagaggctgctactttccctctcagttgaagcttctgctaaatgaatcatagcagctctatgagaaagtgaggggaaaacccaccaatgactagccaagaaactttcaagtataactgaggaagtcattggaagaaaagaaaagaaagcctaccaaatcagctgcttttcagatggcacctcctatgacccctgaatagcctaagagttctctaaaatagaacatgtattgcactaccttgattggctttattaaattagagtgtaaactccctaaggacaaaatctcacctggcatagtggcaacagtagatttggtga

SEQ ID NO: 61692 - DNA, 1162 bp, Homo sapiens
tgtttaaaagggacatttgaaataggaggagctcaaactacagtttttaatcatcttcaaacctaaattcaggagagaatatgtttattctcatcacaattcttacagtccaaattctaaataatttatttatatttgtcaaccacctttatttcttgtagcttgtttcttttctacagcactaacagatcaggaaatttataatttcatcttcctatgtaaatgaactatatgattgattatatcacattcaacaccaacatacaatttcaatacatttacaactttattcttttaagatctttttttcatggtggatccatgatggctcattaggaaataactacaaaaatgcaaaagagagtacaggtagatttcagttaataattgtgaacttatacataccttacaggttaagcaattgccaacttttgatgatgaaagctctatagattttgtaggtttttaaattaaaaaatgttttttgaaaatttgaactcagttttaatttttattaattttatttttgaaagatgaactttatrtaacagttaaattatataaggtgaaatggaattaggcaagaaggatgaaacaattttaatgattctttgcagatgcaaatatgactgctgatttttacttaatatttttaaagtgcttaattatgaaatacaattgtagtgaatctatatgtcataaagtattgaatatctaaaatattagcagatatatcataataaacacactttcaatagagcaaatataaagacataaattttatttttttgcattatggtaaacttcagccacttaatctatcacctgcatcaggcagtcctgtttcccagagattctcaagcatcaatgctgctcctataacttgacatggtcatgtgactaagtttagaatctatttttaaacgtaacttctgctgtagttctttgtaactcaatacattgtccctacatttttactttgtttaaaaattcttagatatttaatcattttttctttgttgcatttgctatttactcatttactctgctcatttcaaagaggtccagtgaaagagacataaaggtatattgatgcactattttgtttcaccagtgcaattattatttcacattttcttatttctgtgattaattaaaaaca

SEQ ID NO: 61693 - DNA, 846 bp, Homo sapiens
ggagaaaagggtacatttcagaaaaatatacatcatatcataagagttaccaacaaagcaaaagaatatattctgtttcagggaatcatatattaatctaattatgatataaaagaaggcatagaaataaacatcaaattcagtaccttgctgacaggagagacagggaaatggaaggcacagggaaggaggggatatggtcagagaaggctatagaaagaacctaaaactgtatttgcaatctcttctttcttagcttaattaggggtacacatgaatttttatgttayattttttacttttctatatgcctaaactattttatatttttaaatgaagaaaggaggtgtgttaaatagaatatggtacttaaaaagacttaatgattaaacgacaaaataggaaaataactcacaatcaataagaaaaagacaaataacccactgggaaaaaaacagcagagaaaaagatatttcaccataaagaaaagtggacgtccatcatttgaaaaggtactcagcataattaaaaattatagggcacaaatttacctcaatgatgtaatatttaaattactagattgacaaaagttaatgttgaatcatattaggcttgtcaaggataggtgataaactggtacgaatattttgtaaaatgatggacctcatcatttgaacattcacataccttatgcccaaggcacttgactctgagctgtatgatctggagaatcttttgcttatgaacccctggtgaaatttataaaaatgttcatagcaacattgtttataatagcagaatcctggaaacaactgcaatgttcttagacaagagtgtgatacatgc

SEQ ID NO: 61694 - DNA, 568 bp, Homo sapiens
cattccttgtcccgaactgttacaaactgcaaaaccaattagagctaaatgtttatattagttgtttcttgatttctccaagaaactcttaatatgtagtgcaacrctgcaagtaaattcgtattcatgctttaagaactaagatagtactaccaacaagcaatgggaataactgactaatgactcctttatatttaaccagcagttattattggatttaatagaatacttcatttctgagatttttcataaatacataaaacaaacatttattgtttgtcttggtgtagaatacataaccagaaacaatggttttcatttgttctgcatatcagtgaagaagttaatcctttcacaatgttatctagctgtaatccttttttcattaatcataagattttaatggagtgtgctgaagtgttttttccaagattataaaaacatggaggactaacatcatgaactgtttatcttcatatttactgcattgtaattttttagttccaatttatatttttaatatcagcagttctactttaattgtttactacattgacttaatatggta

SEQ ID NO: 61695 - DNA, 730 bp, Homo sapiens
gttcatacatccccaagaaagatcaacccacagaaacattatttcaaaacacattttaatcaagttgctaaaagtcaaagacaaagagaaaatcttgaaagcagcatgaaaaaaggagaattctcacatacaaaggaactttcatatgactgaaagtagatttctcaacagaaaccttgcagacaagagcagaatgaaatgacatattcaaagtactgaaagaaaaaaattgcgaggtaagatagtatggccagcaacactgtccttcagaaatgaagaacagttagatagacagtccccaaaaaatgttgacggagttcatcatcacttaacctgccttacaagaaaagttaaagagacttctttccgttgaaacaaaaaagtgctaggaaacagcatgaaaacatatgaaaattaaaaactcactgaaaaagaaaaatatatagtcaaattcagactatattaatactgtaattgtggtacataaaacagttttaactatagttttgaagttaaaaacaaaggtattaaaataagtacatataaaataatttttaatagatacacaagataaacagatgaaaactgtgatgtcaatagcataaaataaggaggagaggaagaagaagtgtagggttttagtakgcaattaaagttattatcagtctaaaattgactctaagacaaagatgcctcaaaaaatagaactaaaggccaatatccctaatgc

SEQ ID NO: 61696 - DNA, 1107 bp, Homo sapiens
ctaaaggaaaagaagtcaccttcagggttccattttcatcccagccatttgagaacagtgcatcctcaggtgagttagagcctccctgaacttcagctgcctcacctgcaaagggggattatcagacccacctgcagggctctgggagttaagcgcatatgatcagcagcagtacagtgcctggcaccaggggacgaaggtgggcagacatgtgcttgtactgggagctcacagcccctaaggcctgcctgcgtctcagctctgaacttgtaatttccagacacccttgaacacagtgatttcagttctttgcctgccctcctacccccagccctgggcatatggccgaggaatcagatccaacaggctgtcctctgatgtcttctcatacagggactcctcagtgaggatgtccttgcccaagtggatccaacagaccacctctagccctacgtgtcaaaagctccccttcctgtgagccctctcttctgaggccctgcacattctgctctcactgctgccttacccacgtgggcttgctcgatgctcctggcaggctgtgtggccacaggtggccaaactcagcggagaagtgtagccgggacacctggtaatcttggctcagttccaggcacagggaggaacgtttccattgttctcacacaaacagggcctggagcctgctttttcctgcattcgcagtttctgccttgtgycaggaatgtcgaggtgaataagacaggtcactcagggagtgcaaactgaggaagagatgggccagctcggtgcagtgtgaggaacgctctgatatctaggcggggaccatcattctgcgtggggtcacaggatcacttggaaaatgcctctttgtagaggtctagccatcgtctgcagcctctggcatgggtgcgtgtgacaacagctgcgtcgccgtgtttctatctagattggctctggggagaggaggcagggagctcgtcctgtgtgggccatgccactcttgtgcagaggaaagtgatttaagacaagagagaagtcccagaacatggaaatgcaaagctgcacaaacggccgtgctttgttttaatttttgtgggtacgtagtag

SEQ ID NO: 61697 - DNA, 698 bp, Homo sapiens
actcatcttttgagaaaacaagcatcttcatttaatcatcatttctaaaggaaaagaactatcatttactaagcaccttccacctgccagacatcgtgctcagacctgccacacgcatttgatcacctcatctttgcagcaatacaatggtgtacatgttgttaccctcatttttcagacaagcaaaggagatttctgagaggctagaacatttgccagacccccagcagacgtaaatctgtgtttgtctgcttgacttctaactgcattcccaatctgtaaatcagctctgaatcctggactgagattgcrctgaggaaaggagagagagtagcttcagccatgacctgcgcgcacctggaggggatactccagggccctgtgctggcccagccttggaaagcggcactcttgactcccctaagccttcttcaaacctctgccatgagaagtcctggaaacctagtggggagctttggctgctgggcgtgtggttctgtgagagaagttggggaagtgaggtgagaggaagttcgtaagtcccactagaaggtaagctgcctacgcagggtcctcgcttgtttcgttcactgctccatccccagtactgaggagaactccacataaaataggcactcaagaaacagttgttgaatgagtagatggaaggaagaggcaccttcgcacgtaatgccacc

SEQ ID NO: 61698 - DNA, 1505 bp, Homo sapiens
  misc_feature (1)...(1505): n = A,T,C or G
acagagcaagagactccagcttaaaaaaaaaaaaagacggtccatcctcctaaggccacctcatttcctaaagtaccaattgctagcccttgggtaggtttgctgtcagccttttttgtgatttgcacctggctgtgaagttctgctgctgctgatttaaacacagatgcaccatgctttagcaccacagtgtwtcctcaaacataacctgatctccccaatgaccctgctgctatttctaatttgtagacgaagaatctaaagctcagagaaggtaagtggcttgcccaaggacacacagcttatggatctgggtctcaaacctaattctataaaaccctcaaactagtccctggaactaggtctggcccatactcctctcttgagggtgaagctccaaggtgtgaatgctcaaattccaaagagtgtggtgatggggctcgggggggaagggtagtggggggtgaggtgtcaagagtgccatcactaagccggagccaatttttatcctcacatattaggaacacagatcaaacacactgctgacagagtaatcagtgcaaagggaaaagaacaaatgttaagaaaaatctcaaattgaaacacagaaagagaaatattgaaccaagtaatgaagattctgcatgcagcagaatggccttggcatccctcgtctccaggggccagcctgggccccagactcacatgagctcaggccggaagcggtggatgatggcacacagggccaacccactgcgccaggatgtggtcaggtcggtgacgttgacatgctggtagccctctgtctgctgctggcaccaggtcaggagcttgctgggccggatatctgactctgcaagaaggagagcgcaggcagtgaggctctgcaggaatctcacacggtctgccctggcgctcccttctcattgccaccatggctggggaccaggacgagcggccccaaggcaaggggccagggcagggggccactggcacgggtgcagctccctgaggactgctgcttgggggcctggtcaggagtgtggcaggaggggagaggaagcatgttctcttccagcagagttcctaagacctactgtgtttaggccctgccaacaacatgctcatctagtggggaagatagtcacagagggggtgatgatgacacagtgctgcaatggagggagaaacagggggctgtgggagcacattagcaggtttgcctgagtctgcgctgggaggggaattcnnnnnnnnnnnnnnnnnnnnnnnnnnnnnnnnnnnnnnnnnnnnnnnnnnnnnnnnnnnnnnnnnnnnnnnnnnnnnnnnnnnnnnnnnnnnnnnnnnnngtttactttggtctcattttttttcttctgtaaataatgcaacctaaagcttttttaaaaaaattcagggtactttactttgggtagagtcctaaaagtgcaattacagggccagagtgtgataattagcttatcatcaataggttagaactgata

SEQ ID NO: 61699 - DNA, 2161 bp, Homo sapiens
tttacaaagaaggcacacaggtcctgtttccatatcaagctaagggaaaggaggagcagagtgaatgatttggaaaaggctgggcttggtggctcatgcctgtaatcctagcattttgggaagccgaggctggtggatcacctgaggtcaagagttgagatcagcctgacaaacatggtgaaaccccatctctactaaaaatacaaaattagtccggcatggtggcacatgcctgtaatcccagctactctggaggcagaggcaggagaatcccttgaacctaggaggcggaggtttcagtgagccgagatcatggcattgcactccagactgggaaacaagagaaaaactccatctcaaaaaaaaaaaaaaaaaaaaaaagaggaaataatccttctgataaatctgttaatagcagcataagagtctttaatttggagatataacaaaataagcatgtagctcagagattcttaggggagactctgaggaatgaaatgaattcttaaaatcattccacttcccatgttattatttgcacttttgaaaaggtcctttccatttgtttatttacagaagtaatacctaccttgcaggtagttttagggttagagaagtttttgtttgtttgtttgtttgttttactgtagaaagagagatggcatagtaatggggatacattatggctcagtaaatactaaaaattatcagaggccacaaaatatatcagtttaagaatgtggtctttggccaggcatggtggcttacacctgtaatcccagtactttggaggctgaggtagacggatcccttgaggccaggagttcaagactagcctgggcaacacaatgagattccatttctttaaagaatgaaaataaattaaccaggtgtggtggtatgcatctgcagtcctggctactcaggaggctgaagtgggaggatggctggagcccaggagttcaaggttaaagtgagctatgatcatgccactgtcctccagctggggcaaaagagcaagggyctgtgtaaaagaaaacaaaaacaaaaacagaatgtggtctttaatgtcgatcagaactgagtttgaattcttagctctgccacttgacatctgcatgacctcaaaattactgagaatctgagacttgcctttctttgtatgtaaaaatgagaaaataaaccttcctggttaaactgttttgagttaacctaaaggagttatgaacatgtttactgaaactaacttagcaaatgttatgtgctggttccattgtaggatacgaagccaaatctgtctttgtatctctttttcactgattattgcccttggtgcagctcacttggttggtggcctacaacactgtcctgcctcactccttgagaactaaacccttttcctaagcccctggcaacagtccttgtattagacagctaatgcaagatatgagctatctattgctttgtaataaattagccccaaatttaacagcttaaaatagcaaacatttattagctcacacagttaacttaggtttaggagtccaggagtacaagtagggtgggtctgactcaggatctctcatgaaattgtactcaaaatgtctgcgggaactccagtcatctgaaggtttgctggggctgaaggagctgctttcgtactctctcacacatggccattaggcatggcctcagttccccacttgtgcgcctctgcataacactgctcatcacatggccactggctttctccaaaggagttgattcgagagagagacagggggattgaaacggaagctgagttgtcttttataaccccatctcggaagtacttccaccatattgtatgggagggaactacacagtgtgtgaacaccaggattcccagatcattgggaaccattatgaaacctaggtataactatcttccacggaatgacataagcaccaacaagttgatgtcatctcatgcctgatctcaagttagatactctgtgtggtatttcttgttcatcacattataatcttctatcatacttctaaaaacacatgacacttactaaatgcaattggtagtttgtcattttgttttgttctgttggccaaccctatatccaggtaagtttctcaactgaggccccctgagttcattacaaatgca

SEQ ID NO: 61700 - DNA, 2161 bp, Homo sapiens
tttacaaagaaggcacacaggtcctgtttccatatcaagctaagggaaaggaggagcagagtgaatgatttggaaaaggctgggcttggtggctcatgcctgtaatcctagcattttgggaagccgaggctggtggatcacctgaggtcaagagttgagatcagcctgacaaacatggtgaaaccccatctctactaaaaatacaaaattagtccggcatggtggcacatgcctgtaatcccagctactctggaggcagaggcaggagaatcccttgaacctaggaggcggaggtttcagtgagccgagatcatggcattgcactccagactgggaaacaagagaaaaactccatctcaaaaaaaaaaaaaaaaaaaaaaagaggaaataatccttctgataaatctgttaatagcagcataagagtctttaatttggagatataacaaaataagcatgtagctcagagattcttaggggagactctgaggaatgaaatgaattcttaaaatcattccacttcccatgttattatttgcacttttgaaaaggtcctttccatttgtttatttacagaagtaatacctaccttgcaggtagttttagggttagagaagtttttgtttgtttgtttgtttgttttactgtagaaagagagatggcatagtaatggggatacattatggctcagtaaatactaaaaattatcagaggccacaaaatatatcagtttaagaatgtggtctttggccaggcatggtggcttacacctgtaatcccagtactttggaggctgaggtagacggatcccttgaggccaggagttcaagactagcctgggcaacacaatgagattccatttctttaaagaatgaaaataaattaaccaggtgtggtggtatgcatctgcagtcctggctactcaggaggctgaagtgggaggatggctggagcccaggagttcaaggttaaagtgagctatgatcatgccactgtcctccagctggggcaaaagagcaagggtctgtgtaaaagaaaacaaaaacaaaaacagaatgtggtctttaatgtcgatcagaactgagtttgaattcttagctctgccacttgacatctgcatgacctcaaaattactgagaatctgagacttgcctttctttgtatgtaaaaatgagaaaataaaccttcctggttaaactgttttgagttaacctaaaggagttatgaacatgtttactgaaactaacttagcaaatgttatgtgctggttccattgtaggatacgaagccaaatctgtctttgtatctctttttcactgattattgcccttggtgcagctcacttggttggtggcctacaacactgtcctgccycactccttgagaactaaacccttttcctaagcccctggcaacagtccttgtattagacagctaatgcaagatatgagctatctattgctttgtaataaattagccccaaatttaacagcttaaaatagcaaacatttattagctcacacagttaacttaggtttaggagtccaggagtacaagtagggtgggtctgactcaggatctctcatgaaattgtactcaaaatgtctgcgggaactccagtcatctgaaggtttgctggggctgaaggagctgctttcgtactctctcacacatggccattaggcatggcctcagttccccacttgtgcgcctctgcataacactgctcatcacatggccactggctttctccaaaggagttgattcgagagagagacagggggattgaaacggaagctgagttgtcttttataaccccatctcggaagtacttccaccatattgtatgggagggaactacacagtgtgtgaacaccaggattcccagatcattgggaaccattatgaaacctaggtataactatcttccacggaatgacataagcaccaacaagttgatgtcatctcatgcctgatctcaagttagatactctgtgtggtatttcttgttcatcacattataatcttctatcatacttctaaaaacacatgacacttactaaatgcaattggtagtttgtcattttgttttgttctgttggccaaccctatatccaggtaagtttctcaactgaggccccctgagttcattacaaatgca

SEQ ID NO: 61701 - DNA, 2161 bp, Homo sapiens
tttacaaagaaggcacacaggtcctgtttccatatcaagctaagggaaaggaggagcagagtgaatgatttggaaaaggctgggcttggtggctcatgcctgtaatcctagcattttgggaagccgaggctggtggatcacctgaggtcaagagttgagatcagcctgacaaacatggtgaaaccccatctctactaaaaatacaaaattagtccggcatggtggcacatgcctgtaatcccagctactctggaggcagaggcaggagaatcccttgaacctaggaggcggaggtttcagtgagccgagatcatggcattgcactccagactgggaaacaagagaaaaactccatctcaaaaaaaaaaaaaaaaaaaaaaagaggaaataatccttctgataaatctgttaatagcagcataagagtctttaatttggagatataacaaaataagcatgtagctcagagattcttaggggagactctgaggaatgaaatgaattcttaaaatcattccacttcccatgttattatttgcacttttgaaaaggtcctttccatttgtttatttacagaagtaatacctaccttgcaggtagttttagggttagagaagtttttgtttgtttgtttgtttgttttactgtagaaagagagatggcatagtaatggggatacattatggctcagtaaatactaaaaattatcagaggccacaaaatatatcagtttaagaatgtggtctttggccaggcatggtggcttacacctgtaatcccagtactttggaggctgaggtagacggatcccttgaggccaggagttcaagactagcctgggcaacacaatgagattccatttctttaaagaatgaaaataaattaaccaggtgtggtggtatgcatctgcagtcctggctactcaggaggctgaagtgggaggatggctggagcccaggagttcaaggttaaagtgagctatgatcatgccactgtcctccagctggggcaaaagagcaagggtctgtgtaaaagaaaacaaaaacaaaaacagaatgtggtctttaatgtcgatcagaactgagtttgaattcttagctctgccacttgacatctgcatgacctcaaaattactgagaatctgagacttgcctttctttgtatgtaaaaatgagaaaataaaccttcctggttaaactgttttgagttaacctaaaggagttatgaacatgtttactgaaactaacttagcaaatgttatgtgctggttccattgtaggatacgaagccaaatctgtctttgtatctctttttcactgattattgcccttggtgcagctcacttggttggtggcctacaacactgtcctgcctcactccttgagaactaaacccttttcctaagcccctggcaacagtccttgtattagacagctaatgcaagatatgagctatctattgctttgtaayaaattagccccaaatttaacagcttaaaatagcaaacatttattagctcacacagttaacttaggtttaggagtccaggagtacaagtagggtgggtctgactcaggatctctcatgaaattgtactcaaaatgtctgcgggaactccagtcatctgaaggtttgctggggctgaaggagctgctttcgtactctctcacacatggccattaggcatggcctcagttccccacttgtgcgcctctgcataacactgctcatcacatggccactggctttctccaaaggagttgattcgagagagagacagggggattgaaacggaagctgagttgtcttttataaccccatctcggaagtacttccaccatattgtatgggagggaactacacagtgtgtgaacaccaggattcccagatcattgggaaccattatgaaacctaggtataactatcttccacggaatgacataagcaccaacaagttgatgtcatctcatgcctgatctcaagttagatactctgtgtggtatttcttgttcatcacattataatcttctatcatacttctaaaaacacatgacacttactaaatgcaattggtagtttgtcattttgttttgttctgttggccaaccctatatccaggtaagtttctcaactgaggccccctgagttcattacaaatgca

SEQ ID NO: 61702 - DNA, 584 bp, Homo sapiens
atgtgcagaatgtcgagaaccaacagcctggttgacttgactcacctgggtcctgctgaaagccaacagcttgactgccaaaaacacagcactatgttgcagtcagaaaaaaagaatgagacattttaatgtgggctggtcagttcccttaaaaagaaatcaatgaatcttctgctagagaataatgctgactgttagtattctgagacccaagtgaagggacaggaccagaggtctcactattgaagatgtcaactttcatttgatctgcctrttttcaatatggcactatattaggctatttttttattactataaataaatacctgagactgggtaacttgtaagaaaataggtttaattggcttgcagttgggcaggctatacaggaagaattgtgccagcatctgctcatcttctggggaggcttcaagaagcttacaaggagggacgaaggtgaagcaggagaagacaggtcacatggcaaaagcaggagcaagggatgggggaggtgccacacttgataacaaccagacctcatgagaacttactattgcaaggacagcgccaagccatgagggatc

SEQ ID NO: 61703 - DNA, 584 bp, Homo sapiens
atgtgcagaatgtcgagaaccaacagcctggttgacttgactcacctgggtcctgctgaaagccaacagcttgactgccaaaaacacagcactatgttgcagtcagaaaaaaagaatgagacattttaatgtgggctggtcagttcccttaaaaagaaatcaatgaatcttctgctagagaataatgctgactgttagtattctgagacccaagtgaagggacaggaccagaggtctcactattgaagatgtcaactttcatttgatctgcctattttcaatatggcactatattaggctatttttttattactataaataaatacctgagactgggtaacttgtaagaaaayaggtttaattggcttgcagttgggcaggctatacaggaagaattgtgccagcatctgctcatcttctggggaggcttcaagaagcttacaaggagggacgaaggtgaagcaggagaagacaggtcacatggcaaaagcaggagcaagggatgggggaggtgccacacttgataacaaccagacctcatgagaacttactattgcaaggacagcgccaagccatgagggatc

SEQ ID NO: 61704 - DNA, 998 bp, Homo sapiens
atagatttgttgttattagataaggtttagagactgccytatttttatacgtttggactttgatagtatatatcacacaaataactctttcttagcctgaattaatgaagcataccaccaccttttagacaaccctgtcaaactagaatgtagctaggaaatgctgctgactcagtatggtaaaactaatacaattagtaagttctaccaatggaaactgaaagaccacttcctagtcttgtttatttaacaataacagctaatgtaccttgcataattaataaattctaatattgcagtagttattttacaggtattatgtctttaaatccctgcaaaaatctgattagctaaatttaattacagccagtatccagataaaaagtagaaggtttagagatattgatgctttggcaagatccattccgtacataaaggtaagaatgcaaatagtgtccatctagaaccttaaattcaattccatattttatgtagtttctcatgtgtataacagatgtttggaaggagctagatgactccactaaaattatgtgtttttttttttaaatttcatgtctagaatatttagaacatttagaatgtgtcctgaaacaagaagttgtgtgctggtggtagcttatttcggaagtgatcctgggaagaataatgggagaaatggtacagtgagacagaagaagaatgtctagggaaaaaaagttattttattaaactctctgatgctatggatagctgggactcaattccattgggtatcatcccaggagccttgtagaatgttcctcacatgtgaatcaccaaagaatgggaagtctaagtcctttatcaaacacccttttccctggttgaggtttacctctttgggcattaactactctgaactaagttgacactatctgtattctaagtgtcattttatgtctctggagaaatccctgaggtgcaaaacaaagagctaccagggcacaaagcttgagata

SEQ ID NO: 61705 - DNA, 1256 bp, Homo sapiens
atcttattgagaataaggtaacaggcatgtcaaatcctatattgatatccacgtaaaaaaccattgatacttacctcctgaatatggaacaggttattctgcataagaaacctacaggaagatgacagctttggaaaaccgaggcactttgagtctagtstttctcctattcaactcaaaattttctccacagtatttcaagcgggatgctggccaagtaaaagaaagttaggatcctttttctatgtagttttcatatcacttagcaatttaaatacaaaacactaaatatactctatcaaaacacaagggttagaaatatctgaaattcatgaaatagggctaagaaattcaaatgctgacaagagccaagtcagtctctcttcataggaaatttcaacaaaataccaaaacaaactaagaagaaaggaaatttcaactttagacatatcaggatcagaattcttggtttgttccctgccttagttatacttttcttctctttccaattctaatttagtttaattaatattccaaaaaaagttatgaaattataatttaattccataatgtcggttggtttgcaaaaattagtggcataaaaagggtttattagatttcatgatgtttttcagattgtctagggtcagctggacccctcagttccagagagcattacttgaggaaatttaggcaaacatatttagctggaagttggactatagctgcaccatcaagttggcctcagttacatggctgatacctcagctagggtgaatggaacagccagagactggctggtcctctctctccaacaagattcaacttcttacttggtgcttggctttcaaaacagcaaaagtggaaactgtcagatctcttaagctctacacccaaaactgatatagggtcaaagcaagtcacagggccagcacagattaaaagagaggagtcacagaccccatcttttgataaaggagaagcatacatagaataggaatgggaggaattgctggttcccatttttggagacaatctaccaaaaaattactctctcccattagtttattcatttaatgtaattgtaaaatcaaacacatctccctaccctgttaaagaaattctaaaccttatcaaataagtacgaaaattcatttgtggctataggtgcttccatgaaccatctatttcagatacaggtaaaactgatcgcgcatctagaaaagattcagaaatttctacaatttacagcttaa

SEQ ID NO: 61706 - DNA, 2093 bp, Homo sapiens
atatttataactaaatgtgccattgtaactgcagcatccttaaactcgaataaccttcccagacagatgctccagaaagtagtatctttgtgataatatgattaaatgataggtatcatggtacaagcagctggatgagtaaaaccagaggattatgtttatgataaaataggaaaataagagaagttaaatattcggtatttaagagtttaacatgtcataaagagaaaatagatggtgcaactgaatgcatttttaaattgaaatctaccatgtaaaatttttttattatttcaatagactataagttccattaagtgtaggacaaagatagtctttcctaccactacactgcaatttctccaatagttgtgttttaataaacatttgtggatttctggtaatattataataatgccaattgtgatgatgatagtaaaggtattttgcagtaacatgtgctaattatttgttactggtacattttaggtgctcagtaaattttagtggataaaagataaaagagtaattttttacacatttgggttttttaaattttttaaaatttaatttaattttatttgaaattccaggatccatgtgcaggatgtgcaggtttgttacataggtaaacatgtcccatggtggtttactgcacctatcaacccatcacataggtattgagccctgtatgcatcagctatttatcctgatgctctctctccccctgccccccgcaataagccccggtgtgtgctgttcccctccctgtgtctagtacacatttcttttataagttggagatagctagctctaggttgtgggtagagattcctaattctggagatagcttcgccaggcatgggtgtgcagggaagaacggaaaagtagttgctgatactatagacgcacatctcctagagaatgyaggggagggtgggcgagataggggatagaatttctaggttcctctttcacacccatcctggcttttcaagcttccattgggaatgaaggtcaaacagaagaaacagatatgttcttagtttctttgtgccagtcccagatgcctcagaacaacaaataatagtttccagaaaataatgagagactgtatgtgtgtgggtgtgtttgtgagattggtagggacagaacaggagtctcagtaaaatagtaaatagagatgacaaatgttactcagttcctgggtgtatcgggagctaagcttctttccagctgtggagaaagaatacgtgtaagaacaagagctacaggtgtttctactagatatcacctaggctagtgctattacagacagacacacacagacacacacatataaatataaccatatataaatataattttaaaaccatgattataaatatcatattatatggttataaaactgtgattaattttcttaaatctaaggtgctaagtaagaggaaaggtcatttgccaagaattaacagtgtggagtcaggtttgtagttaaaacattatcaaagttatttgagaaaaattcattgtgaaaggtaataggaagtcactgaaatgcagagcaatagtaaaagtcaagagaaatcagcctgtggttttagtgggaaaaaaaatactttcgtgattgtcttcagcaagcatgatttcgtctaaattttcaaaatttgtagaaaagaggtaccacattatttctttacacagataaagaattaaggcacagagaggatagttcctaccctgagatcatatagcttaccagtggtttttcagtctgtattgtgagttgacagaggttttcttccctccaaaaccttgtccttgatttatgtcatataaaggaatcactgaggaggtttcaaatgcaggtttaatgcagaatagaattttgtttctttattcagttatctctgaaattgacaaattgctagttaaaaacaaaacctaaacagaaactttcattcattgctggtggaagtagaaaatggtgcacccattttgaaagacagcatggcagtttcttacaaagctaaacttagtgttactgcataatctagccatcgttcttacagatatttatacacatgatttga

SEQ ID NO: 61707 - DNA, 2093 bp, Homo sapiens
atatttataactaaatgtgccattgtaactgcagcatccttaaactcgaataaccttcccagacagatgctccagaaagtagtatctttgtgataatatgattaaatgataggtatcatggtacaagcagctggatgagtaaaaccagaggattatgtttatgataaaataggaaaataagagaagttaaatattcggtatttaagagtttaacatgtcataaagagaaaatagatggtgcaactgaatgcatttttaaattgaaatctaccatgtaaaatttttttattatttcaatagactataagttccattaagtgtaggacaaagatagtctttcctaccactacactgcaatttctccaatagttgtgttttaataaacatttgtggatttctggtaatattataataatgccaattgtgatgatgatagtaaaggtattttgcagtaacatgtgctaattatttgttactggtacattttaggtgctcagtaaattttagtggataaaagataaaagagtaattttttacacatttgggttttttaaattttttaaaatttaatttaattttatttgaaattccaggatccatgtgcaggatgtgcaggtttgttacataggtaaacatgtcccatggtggtttactgcacctatcaacccatcacataggtattgagccctgtatgcatcagctatttatcctgatgctctctctccccctgccccccgcaataagccccggtgtgtgctgttcccctccctgtgtctagtacacatttcttttataagttggagatagctagctctaggttgtgggtagagattcctaattctggagatagcttcgccaggcatgggtgtgcagggaagaacggaaaagtagttgctgatactatagacgcacatctcctagagaatgtaggggagggtgggcgagatagggkatagaatttctaggttcctctttcacacccatcctggcttttcaagcttccattgggaatgaaggtcaaacagaagaaacagatatgttcttagtttctttgtgccagtcccagatgcctcagaacaacaaataatagtttccagaaaataatgagagactgtatgtgtgtgggtgtgtttgtgagattggtagggacagaacaggagtctcagtaaaatagtaaatagagatgacaaatgttactcagttcctgggtgtatcgggagctaagcttctttccagctgtggagaaagaatacgtgtaagaacaagagctacaggtgtttctactagatatcacctaggctagtgctattacagacagacacacacagacacacacatataaatataaccatatataaatataattttaaaaccatgattataaatatcatattatatggttataaaactgtgattaattttcttaaatctaaggtgctaagtaagaggaaaggtcatttgccaagaattaacagtgtggagtcaggtttgtagttaaaacattatcaaagttatttgagaaaaattcattgtgaaaggtaataggaagtcactgaaatgcagagcaatagtaaaagtcaagagaaatcagcctgtggttttagtgggaaaaaaaatactttcgtgattgtcttcagcaagcatgatttcgtctaaattttcaaaatttgtagaaaagaggtaccacattatttctttacacagataaagaattaaggcacagagaggatagttcctaccctgagatcatatagcttaccagtggtttttcagtctgtattgtgagttgacagaggttttcttccctccaaaaccttgtccttgatttatgtcatataaaggaatcactgaggaggtttcaaatgcaggtttaatgcagaatagaattttgtttctttattcagttatctctgaaattgacaaattgctagttaaaaacaaaacctaaacagaaactttcattcattgctggtggaagtagaaaatggtgcacccattttgaaagacagcatggcagtttcttacaaagctaaacttagtgttactgcataatctagccatcgttcttacagatatttatacacatgatttga

SEQ ID NO: 61708 - DNA, 1106 bp, Homo sapiens
tcctatttctactatatattttttttatattttattgagagtctcactctgttgcccaggctggagtacagtggcatgatctcggctcactgcaacctccacctcctgggttcaagagattttcctgcctcagcctccygagtagttgggattataggcccccaccaccacgcccggctaatttttgtatttttttagtagagacagtttcaccatgttggccaggctggtctcgaactcttgaccttgtgatccgcccgcctgggcctcccaaagtgctgggattacaggcatgagccactgcgcccggcctattcctactgtatttttcatatgtttaaatctgtgttttcaatttggaataaatttcattgacttttttcagcttactaattgtgttttcagttttctctaaatagtcgtaaaatcagtctgtattattttaattttagttaatatgttttttacttctaggtgacctttgtgtttatagatttgctttttattcaaatgtacctagatcattctgataatctcttttctgtcagaaactttgactcaggatatgtatttttttgtcaacttaattttttgttaatattctatttttaaaaatgaattttggagattatttgaaggcttgacttaaagttttgtgggggtttttttttttttttttttttttgagactgtttctgttgtttctctcaggtaagtatagcaagggcctgactaggaccacttccagctcaatgttcatcttgttatttcagcactacttcatacattctggtatcaagcaagtttggaagcagaatgtagttaagaaatcccaggagacatatttatattttttcaagaaagtgtcccaaacatctccttctgtattttaggattttttgagacatactcagttgaaggtaaagccttcccagagttccaactttagaaagatctttttgatccaatcccctgtctagactttgccctgttgatagtgcacagacagttaaaccaaagttccagaccacctcagaccaaaggtcagcagatgcttctagagcaatttagtgctttcttatgtctgttgaattgcatgttatttt

SEQ ID NO: 61709 - DNA, 1106 bp, Homo sapiens
tcctatttctactatatattttttttatattttattgagagtctcactctgttgcccaggctggagtacagtggcatgatctcggctcactgcaacctccacctcctgggttcaagagattttcctgcctcagcctcctgagtagttgggattataggcccccaccaccacgcccggctaatttttgtatttttttagtagagacagtttcaccatgttggccaggctggtctcgaactcttgaccttgtgatccgcccgcctgggcctcccaaagtgctgggattacaggcatgagccactgcgcccggcctattcctactgtatttttcatatgtttaaatctgtgttttcaatttggaataaatttcattgacttttttcagcttactaattgtgttttcagttttctctaaatagtcgtaaaatcagtctgtattattttaattttagttaatatgttttttacttctaggtgacctttgtgtttatagatttgcttyttattcaaatgtacctagatcattctgataatctcttttctgtcagaaactttgactcaggatatgtatttttttgtcaacttaattttttgttaatattctatttttaaaaatgaattttggagattatttgaaggcttgacttaaagttttgtgggggtttttttttttttttttttttttgagactgtttctgttgtttctctcaggtaagtatagcaagggcctgactaggaccacttccagctcaatgttcatcttgttatttcagcactacttcatacattctggtatcaagcaagtttggaagcagaatgtagttaagaaatcccaggagacatatttatattttttcaagaaagtgtcccaaacatctccttctgtattttaggattttttgagacatactcagttgaaggtaaagccttcccagagttccaactttagaaagatctttttgatccaatcccctgtctagactttgccctgttgatagtgcacagacagttaaaccaaagttccagaccacctcagaccaaaggtcagcagatgcttctagagcaatttagtgctttcttatgtctgttgaattgcatgttatttt

SEQ ID NO: 61710 - DNA, 914 bp, Homo sapiens
attaatagaactcccttaaacaaacttaattgtttttcagagattgagcttaacaattataatcaaatcaacctgtttttgaatcatttgcagatacaaatgcttattagtgaagacacttagcgtcttttaaagaggtgaactggaaatttaaaatacacagattctaaacccacctaaccctgcccagacatacaaacaacctgcacaactgttggaaaagaacacacaaggagagctttagaactttatrtatcgtctggcctacagttgcgttacaggaggtacttgtgttttgtttcatttccccaaatactctttagcagctcccgttactgtattgttatagtgtaatcaatttgttaaaagtgccaaaatagtcttccttgagcatactttttcatgtacgtgtgtgtgtatatatagtattgtatacacacgcaatcaggttaggtagtcaaaccctttatatgctaacaacttccttaactaacaaaattgtcataacgtgatcaacattggtatctttcaaaattgatataacctgaggtaccgcttgagcgtccctaatccaaaagtccaaaatccaaaatgctccaaaatccataattttttgagcatctacatgactcccaagtgggtaactgcacacataggaaacactacatgtaagtacttaacaaaaagtttgtttcatgcacaaatttaaaatatgtataaaattaccttcaggctacatgaatgaggtatataggaaacctaaatgaatttcatggttagacttgggtcccatcccccaaatatctcattatgtaaagcaaatattcccaaatccaaaaaaatctgaaacccaaaacacttgtggtcccaagcatttcaacccatactttacaactgatctacttgtttgatgc

SEQ ID NO: 61711 - DNA, 914 bp, Homo sapiens
attaatagaactcccttaaacaaacttaattgtttttcagagattgagcttaacaattataatcaaatcaacctgtttttgaatcatttgcagatacaaatgcttattagtgaagacacttagcgtcttttaaagaggtgaactggaaatttaaaatacacagattctaaacccacctaaccctgcccagacatacaaacaacctgcacaactgttggaaaagaacacacaaggagagctttagaactttatgtatcgtctggcctacagttgcgttacaggaggtacttgtgttttgtttcayttccccaaatactctttagcagctcccgttactgtattgttatagtgtaatcaatttgttaaaagtgccaaaatagtcttccttgagcatactttttcatgtacgtgtgtgtgtatatatagtattgtatacacacgcaatcaggttaggtagtcaaaccctttatatgctaacaacttccttaactaacaaaattgtcataacgtgatcaacattggtatctttcaaaattgatataacctgaggtaccgcttgagcgtccctaatccaaaagtccaaaatccaaaatgctccaaaatccataattttttgagcatctacatgactcccaagtgggtaactgcacacataggaaacactacatgtaagtacttaacaaaaagtttgtttcatgcacaaatttaaaatatgtataaaattaccttcaggctacatgaatgaggtatataggaaacctaaatgaatttcatggttagacttgggtcccatcccccaaatatctcattatgtaaagcaaatattcccaaatccaaaaaaatctgaaacccaaaacacttgtggtcccaagcatttcaacccatactttacaactgatctacttgtttgatgc

SEQ ID NO: 61712 - DNA, 914 bp, Homo sapiens
attaatagaactcccttaaacaaacttaattgtttttcagagattgagcttaacaattataatcaaatcaacctgtttttgaatcatttgcagatacaaatgcttattagtgaagacacttagcgtcttttaaagaggtgaactggaaatttaaaatacacagattctaaacccacctaaccctgcccagacatacaaacaacctgcacaactgttggaaaagaacacacaaggagagctttagaactttatgtatcgtctggcctacagttgcgttacaggaggtacttgtgttttgtttcatttccccaaatactctttagcagctcccgttactgtattgttatagtgtaatcaatttgttaaaagtgccaaaatagtcttccttgagcatactttttcatgtacgtgtgtgtgtatatatagtaktgtatacacacgcaatcaggttaggtagtcaaaccctttatatgctaacaacttccttaactaacaaaattgtcataacgtgatcaacattggtatctttcaaaattgatataacctgaggtaccgcttgagcgtccctaatccaaaagtccaaaatccaaaatgctccaaaatccataattttttgagcatctacatgactcccaagtgggtaactgcacacataggaaacactacatgtaagtacttaacaaaaagtttgtttcatgcacaaatttaaaatatgtataaaattaccttcaggctacatgaatgaggtatataggaaacctaaatgaatttcatggttagacttgggtcccatcccccaaatatctcattatgtaaagcaaatattcccaaatccaaaaaaatctgaaacccaaaacacttgtggtcccaagcatttcaacccatactttacaactgatctacttgtttgatgc

SEQ ID NO: 61713 - DNA, 914 bp, Homo sapiens
attaatagaactcccttaaacaaacttaattgtttttcagagattgagcttaacaattataatcaaatcaacctgtttttgaatcatttgcagatacaaatgcttattagtgaagacacttagcgtcttttaaagaggtgaactggaaatttaaaatacacagattctaaacccacctaaccctgcccagacatacaaacaacctgcacaactgttggaaaagaacacacaaggagagctttagaactttatgtatcgtctggcctacagttgcgttacaggaggtacttgtgttttgtttcatttccccaaatactctttagcagctcccgttactgtattgttatagtgtaatcaatttgttaaaagtgccaaaatagtcttccttgagcatactttttcatgtacgtgtgtgtgtatatatagtattgtatacacacgcaatcaggttaggtagtcaaaccctttatatgctaacaacttccttaactaacaaaattgtcataacgtgatcaacattggtatctttcaaaattgatataacctgaggtaccgcttgagcgtccctaatccaaaagtccaaaatccaaaatgctccaaaatccataattttttgagcatctacatgactcccaagtgggtaactgcacacataggaaacactacatgtaagtacttaacaaaaagtttgtttcatgcacaaatttaaaatatgtataaaattaccttcaggctacatgwatgaggtatataggaaacctaaatgaatttcatggttagacttgggtcccatcccccaaatatctcattatgtaaagcaaatattcccaaatccaaaaaaatctgaaacccaaaacacttgtggtcccaagcatttcaacccatactttacaactgatctacttgtttgatgc

SEQ ID NO: 61714 - DNA, 914 bp, Homo sapiens
attaatagaactcccttaaacaaacttaattgtttttcagagattgagcttaacaattataatcaaatcaacctgtttttgaatcatttgcagatacaaatgcttattagtgaagacacttagcgtcttttaaagaggtgaactggaaatttaaaatacacagattctaaacccacctaaccctgcccagacatacaaacaacctgcacaactgttggaaaagaacacacaaggagagctttagaactttatgtatcgtctggcctacagttgcgttacaggaggtacttgtgttttgtttcatttccccaaatactctttagcagctcccgttactgtattgttatagtgtaatcaatttgttaaaagtgccaaaatagtcttccttgagcatactttttcatgtacgtgtgtgtgtatatatagtattgtatacacacgcaatcaggttaggtagtcaaaccctttatatgctaacaacttccttaactaacaaaattgtcataacgtgatcaacattggtatctttcaaaattgatataacctgaggtaccgcttgagcgtccctaatccaaaagtccaaaatccaaaatgctccaaaatccataattttttgagcatctacatgactcccaagtgggtaactgcacacataggaaacactacatgtaagtacttaacaaaaagtttgtttcatgcacaaatttaaaatatgtataaaattaccttcaggctacatgaatgaggtatataggaaacctaaatgaatttcatgkttagacttgggtcccatcccccaaatatctcattatgtaaagcaaatattcccaaatccaaaaaaatctgaaacccaaaacacttgtggtcccaagcatttcaacccatactttacaactgatctacttgtttgatgc

SEQ ID NO: 61715 - DNA, 728 bp, Homo sapiens
aacaagtaaactttaacaagttttaaaagatatgaggcattaaaatcatttcttacccctattcctcaatctagttctcctgaaatagaaaaggccaaacaaaaaggtttggaaaataaaatatatgttaagtatttagtttgctagcatagtagcttaagatcaattacatttacaattaagtggtatttttatgtttgcttatgttaaaatgcactaggaatttatgtaaatgaagaatacagtctaatgatgcttacttaataaaaaatctcttagaaaagggactatagtataatgtagaagaaagagcatgccatagagaatcagaagacattctgaataactattaagtaattttatgatttttggacaagtcattttacctgaaaagtaagcagattggacagttgcgacagctcctatttattggctctcattgtgagttaagatactttatttgaatctaaataatctctaacttcgcttgaagtaccaatattctaattcttggaatatagcactctcattttaaatgattataaaaatgtatgcttgtgtcatattttcttttacaataattcttggtcagagctatgacatattgatgctattgcttgggtagaaattctgctgtgtgcttatgaaatggataatgaagagagagcactcacctctaactctcagyatagagattcctggcctttactctgagtggtcatccactg

SEQ ID NO: 61716 - DNA, 815 bp, Homo sapiens
aattagcctggatatggtggggtcactggtaaacatttaccatagaggtttgtcacctcctgcctgcctcatcaccctggccctgcccctgcttgtgctctgagagtggtcttcgcagaaggaggttctcagttctcagtttgaactgttgcttgcattgttgacttgggaccacagtggaggaaagagagcgggaaaagtgtcctacagctggaatggagctttctggagatgcactttcttgctgtaacagattccaagccattctttgtgactgctgatttgtggtgcactttgctgcagttgcagaaatagctgtgctatagttagccaaaggctatatgtcaggcttgctctataacagctagctgcaaagccaaggcctgcccttacttgtaaggtgctgatgaatgtggagctaggactgaaaaatccacccgcctttcaggcaagtcagatcacctgtccctttcatgaacaaagaagactgtgtgtgtttggaaatgaatggggagacggaaagagggtggttcggcttctgagtctagggtgtttgagcaatgtgggggtcaggtagtgggtaatgaggatgcctgtgacaaagcgaggctgcttcctcagcagcttgggaaggaaccggccaatggagcaggccggcacaagggagaacactgttkgggtcccatttctgagaataggccgtagagggcacgagggatacattgaaggagggacctgaatggtcctgcttgcagaatttgcaggtcttggcaatggtgttgtgtttgcaggtctcaggctaagcagacccttgg

SEQ ID NO: 61717 - DNA, 815 bp, Homo sapiens
aattagcctggatatggtggggtcactggtaaacatttaccatagaggtttgtcacctcctgcctgcctcatcaccctggccctgcccctgcttgtgctctgagagtggtcttcgcagaaggaggttctcagttctcagtttgaactgttgcttgcattgttgacttgggaccacagtggaggaaagagagcgggaaaagtgtcctacagctggaatggagctttctggagatgcactttcttgctgtaacagattccaagccattctttgtgactgctgatttgtggtgcactttgctgcagttgcagaaatagctgtgctatagttagccaaaggctatatgtcaggcttgctctataacagctagctgcaaagccaaggcctgcccttacttgtaaggtgctgatgaatgtggagctaggactgaaaaatccacccgcctttcaggcaagtcagatcacctgtccctttcatgaacaaagaagactgtgtgtgtttggaaatgaatggggagacggaaagagggtggttcggcttctgagtctagggtgtttgagcaatgtgggggtcaggtagtgggtaatgaggatgcctgtgacaaagcgaggctgcttcctcagcagcttgggaaggaaccggccaatggagcaggccggcacaagggagaacactgtttkggtcccatttctgagaataggccgtagagggcacgagggatacattgaaggagggacctgaatggtcctgcttgcagaatttgcaggtcttggcaatggtgttgtgtttgcaggtctcaggctaagcagacccttgg

SEQ ID NO: 61718 - DNA, 815 bp, Homo sapiens
aattagcctggatatggtggggtcactggtaaacatttaccatagaggtttgtcacctcctgcctgcctcatcaccctggccctgcccctgcttgtgctctgagagtggtcttcgcagaaggaggttctcagttctcagtttgaactgttgcttgcattgttgacttgggaccacagtggaggaaagagagcgggaaaagtgtcctacagctggaatggagctttctggagatgcactttcttgctgtaacagattccaagccattctttgtgactgctgatttgtggtgcactttgctgcagttgcagaaatagctgtgctatagttagccaaaggctatatgtcaggcttgctctataacagctagctgcaaagccaaggcctgcccttacttgtaaggtgctgatgaatgtggagctaggactgaaaaatccacccgcctttcaggcaagtcagatcacctgtccctttcatgaacaaagaagactgtgtgtgtttggaaatgaatggggagacggaaagagggtggttcggcttctgagtctagggtgtttgagcaatgtgggggtcaggtagtgggtaatgaggatgcctgtgacaaagcgaggctgcttcctcagcagcttgggaaggaaccggccaatggagcaggccggcacaagggagaacactgtttgggtcccatttctgagaataggccgtagagggcacgagggatacattgaaggagggacctgaatggtcctgcttgcagaatttgcaggtcttggcaatggtgttgtgtttgcaggtcycaggctaagcagacccttgg

SEQ ID NO: 61719 - DNA, 1089 bp, Homo sapiens
gatgctacctgcccattagtcactctgtagctggcttggttatcagattgactgccagccacagtgtcacagtgcttgtgttcaagtcactctaattttacataatcatggccccaaagtgcaagagtagtgatgctggcatcccatgatagttgttctattttattagttattaatctcttactgtgcctagcttgtacattaaactttatcctagcaacgtatgtgcagtacaggaaaaagcacagtgtacatagggttcaatactatttgcactttagacatctgctggaggtcttagaacatatctcccacagataggagggattagtgtgtgcctaaagaattacaagataacaaacaacaaggatatcataaatgccaatagaaatatgttgcaaagaatcccaaaaggatccagttgaatgagaaagaaaaaaaaagtcagcaagatggattaggggaaaagagagaaagatgaaatgggaaggaaaggaggacagtgggaaagaatgaaacaaatacatttgcatggatttcagccatcagtagggttcaaatgagtttcaatgtccaattcttctgagaattcatccattgctaatgctaaccatgacaagtaaaaatccatcaatgtcattctgtagatcctggtgacctcaaggcgaaaagctaaatgcaatttgatttctgatctaaattcagaagggaaccattcagagggctgttcagcwtcaaggtataaagggtcttactgtttgggaatgtgcatgcatttccctgatgcaccatttgaatgctgcataacgtttataggtcaaggtggtcattacacaatgctctattttattttcttaaaattattcgctacaaataataaagagctattgaaaagccgtgaaatttaagccaggctatatatttttgagaaaaatatctaaatagcaaaggacctgcatacccacagaatatgtacaatatatgttttgaatgtgattttttttttttttttgctttttgcagtagtatatttgagaagatctttctacgcagagactgtgattgcttaaactgtacacaaacacctgg

SEQ ID NO: 61720 - DNA, 2177 bp, Homo sapiens
gcttggatccatatacaggctatcttccaagataataggtacaaaatgcctagsaaaatgtacgtacatagtaggtttattagcctgttctcacactgctgataaagacatacctgagactaggcaatttacaaaagaaagagatttaatggatgtacagttccacatggctggggaggtctcacaatcatggcagaaggcaaaaaggatcaagtctcgtcttacatggatggcagcaggcagagagagagcgcgcaagcttgtacaggggaccacccgtttttaaaaccatcagatcccgtgagacttattcactatcatgagaacagcacaggaaaaacccacccccatgattcaattacctcccaccaggttcctcccatgacacgtgggaattgtgggagttacaattcaagatgagatttgggtggggacacagccaaaccatatcagtaggtgattacttaatttcagctgtccttttttaaaatctctattatcaaccagcctctcctttcaaggagtctactctattatagttgtccagacactaccctgactccactttctgtaatttctatatggcaatgtttgcttaaacttctttctgcattctacacatttaaattatatcctctagtggtagaagagactcttagatctttaaagacaacaataaataatagctaatgtatttattgagtgtttcccatgaaccaaaatgttctcagtactttatatgcattatctcaccttcacaataactctaaaggaaggttctattattatctgttttacagacaaggaaactggagcatgggttgaccagtcagtcagtgtcaagatcaagagggaaactcatgcaacctaactctagagcctataatttaatcaccacatataaaataaatgttttcttgagtgtcgggagacaagcaaattttgtgagttgctctacataaaagggtcccatagttaaatgaccttgaaacactgaatacatagatatctataaaagtctttcaaaaaggaaacatttgagtagtcctattgcaaagaaatctgcttaattttgtttaatcgattgtttttcaaattttaaaccttgaaacctattttcatgtggtttctaaccacatctcctagaattgacacctgtgcacaagactttgggaaagtgttcagaaacagtctcttacctgtggcactgaaagatttggaggttcatggctgtcccacaggacaaattgaaaagaatcttcaaagatttctccaccaaaatgacgataataaatgattccattaaacaaatccctctgaaggaagccatggacaggatagcctattgggtccataaaacaccacatacttttgtacaagcctatcaaatatcgagggacaatgatattggacttatcttcaaaagtcttatctgtctagtacattctatgtacccaaggaatctgcattaaatgttttcatcaaagataaataataaagcagaaaaataataaataataaagcaggaaaactaaagtcactatatctgtcttgatatatggaaaaattagcattagaaaaatattttcaagaaacttactcttatttcaaatatacaaagtaacactaactacttacttgatccctattttgtcaaactccggatctacctactttaagaagtagttacaaaatgattctaacaaaatgtaaacaaatgttattcatgaaattatcaataatctagaatagtcaaaaaatctccttttagactaatttgttctatcaccttgctcggctgacttaatttttcatagtgtaatggttactttgaggctcagctctggaaatctgtagatgcacaaccttggacagatcaaattaactttcctaaatctcaggcttcctcattatgaaatgggaataaaaatactatcttacttcagaaacttgatgttcaccttaggacaaactcggacacaatttcagcaaacccagaaggatgcatagaaggttctctatggaagagtgaattccattcaaatgatcttaactgcccagaacttacctatcagtcctggccctggcttcttcatgatctccccagcctgtggaggctttgtgatattgaagaagatgtagtcatcactggcgtccacatctgaagctcgcagcat

SEQ ID NO: 61721 - DNA, 2177 bp, Homo sapiens
gcttggatccatatacaggctatcttccaagataataggtacaaaatgcctagcaaaatgtacgtacatagtaggtttattagcctgttctcacactgctgataaagacatacctgagactrggcaatttacaaaagaaagagatttaatggatgtacagttccacatggctggggaggtctcacaatcatggcagaaggcaaaaaggatcaagtctcgtcttacatggatggcagcaggcagagagagagcgcgcaagcttgtacaggggaccacccgtttttaaaaccatcagatcccgtgagacttattcactatcatgagaacagcacaggaaaaacccacccccatgattcaattacctcccaccaggttcctcccatgacacgtgggaattgtgggagttacaattcaagatgagatttgggtggggacacagccaaaccatatcagtaggtgattacttaatttcagctgtccttttttaaaatctctattatcaaccagcctctcctttcaaggagtctactctattatagttgtccagacactaccctgactccactttctgtaatttctatatggcaatgtttgcttaaacttctttctgcattctacacatttaaattatatcctctagtggtagaagagactcttagatctttaaagacaacaataaataatagctaatgtatttattgagtgtttcccatgaaccaaaatgttctcagtactttatatgcattatctcaccttcacaataactctaaaggaaggttctattattatctgttttacagacaaggaaactggagcatgggttgaccagtcagtcagtgtcaagatcaagagggaaactcatgcaacctaactctagagcctataatttaatcaccacatataaaataaatgttttcttgagtgtcgggagacaagcaaattttgtgagttgctctacataaaagggtcccatagttaaatgaccttgaaacactgaatacatagatatctataaaagtctttcaaaaaggaaacatttgagtagtcctattgcaaagaaatctgcttaattttgtttaatcgattgtttttcaaattttaaaccttgaaacctattttcatgtggtttctaaccacatctcctagaattgacacctgtgcacaagactttgggaaagtgttcagaaacagtctcttacctgtggcactgaaagatttggaggttcatggctgtcccacaggacaaattgaaaagaatcttcaaagatttctccaccaaaatgacgataataaatgattccattaaacaaatccctctgaaggaagccatggacaggatagcctattgggtccataaaacaccacatacttttgtacaagcctatcaaatatcgagggacaatgatattggacttatcttcaaaagtcttatctgtctagtacattctatgtacccaaggaatctgcattaaatgttttcatcaaagataaataataaagcagaaaaataataaataataaagcaggaaaactaaagtcactatatctgtcttgatatatggaaaaattagcattagaaaaatattttcaagaaacttactcttatttcaaatatacaaagtaacactaactacttacttgatccctattttgtcaaactccggatctacctactttaagaagtagttacaaaatgattctaacaaaatgtaaacaaatgttattcatgaaattatcaataatctagaatagtcaaaaaatctccttttagactaatttgttctatcaccttgctcggctgacttaatttttcatagtgtaatggttactttgaggctcagctctggaaatctgtagatgcacaaccttggacagatcaaattaactttcctaaatctcaggcttcctcattatgaaatgggaataaaaatactatcttacttcagaaacttgatgttcaccttaggacaaactcggacacaatttcagcaaacccagaaggatgcatagaaggttctctatggaagagtgaattccattcaaatgatcttaactgcccagaacttacctatcagtcctggccctggcttcttcatgatctccccagcctgtggaggctttgtgatattgaagaagatgtagtcatcactggcgtccacatctgaagctcgcagcat

SEQ ID NO: 61722 - DNA, 2177 bp, Homo sapiens
gcttggatccatatacaggctatcttccaagataataggtacaaaatgcctagcaaaatgtacgtacatagtaggtttattagcctgttctcacactgctgataaagacatacctgagactaggcaatttacaaaagaaagagatttaatggatgtacagttccacatggctggggaggtctcacaatcatggcagaaggcaaaaaggatcaagtctcgtcttacatggatggcagcaggcagagagagagcgcgcaagcttgtacaggggaccacccgtttttaaaaccatcagatcccgtgagacttattcactatcatgagaacagcacaggaaaaacccacccccatgattcaattacctcccaccaggttcctcccatgacacgtgggaattgtgggagttacaattcaagatgagatttgggtggggacacagccaaaccatatcagtaggtgattacttaatttcagctgtccttttttaaaatctctattatcaaccagcctctcctttcaaggagtctactctattatagttgtccagacactaccctgactccactttctgtaatttctatatggcaatgtttgcttaaacttctttctgcattctacacatttaaattatatcctctagtggtagaagagactcttagatctttaaagacaacaataaataatagctaatgtatttattgagtgtttcccatgaaccaaaatgttctcagtactttatatgcattatctcaccttcacaataactctaaaggaaggttctattattatctgttttacagacaaggaaactggagcatgggttgaccagtcagtcagtgtcaagatcaagagggaaactcatgcaacctaactctagagcctataatttaatcaccacatataaaataaatgttttcttgagtgtcgggagacaagcaaattttgtgagttgctctacataaaagggtcccatagttaaatgaccttgaaacactgaatacatagatatctataaaagtctttcaaaaaggaaacatttgagtagtcctattgcaaagaaatctgcttaattttgtttaatcgattgtttttcaaattttaaaccttgaaacctattttcatgtggtttctaaccacatctsctagaattgacacctgtgcacaagactttgggaaagtgttcagaaacagtctcttacctgtggcactgaaagatttggaggttcatggctgtcccacaggacaaattgaaaagaatcttcaaagatttctccaccaaaatgacgataataaatgattccattaaacaaatccctctgaaggaagccatggacaggatagcctattgggtccataaaacaccacatacttttgtacaagcctatcaaatatcgagggacaatgatattggacttatcttcaaaagtcttatctgtctagtacattctatgtacccaaggaatctgcattaaatgttttcatcaaagataaataataaagcagaaaaataataaataataaagcaggaaaactaaagtcactatatctgtcttgatatatggaaaaattagcattagaaaaatattttcaagaaacttactcttatttcaaatatacaaagtaacactaactacttacttgatccctattttgtcaaactccggatctacctactttaagaagtagttacaaaatgattctaacaaaatgtaaacaaatgttattcatgaaattatcaataatctagaatagtcaaaaaatctccttttagactaatttgttctatcaccttgctcggctgacttaatttttcatagtgtaatggttactttgaggctcagctctggaaatctgtagatgcacaaccttggacagatcaaattaactttcctaaatctcaggcttcctcattatgaaatgggaataaaaatactatcttacttcagaaacttgatgttcaccttaggacaaactcggacacaatttcagcaaacccagaaggatgcatagaaggttctctatggaagagtgaattccattcaaatgatcttaactgcccagaacttacctatcagtcctggccctggcttcttcatgatctccccagcctgtggaggctttgtgatattgaagaagatgtagtcatcactggcgtccacatctgaagctcgcagcat

SEQ ID NO: 61723 - DNA, 887 bp, Homo sapiens
tgcatcaaaacaccccattatatatcataaatatatacaatgtttatttgccaattaaaaaataaaaattttaaaataatttaacctagaaaaggtaataatacatcacagaaataggggatgaagaaatagcattcacctactttattcatttgtctctcaagggctctctctaggcytggattaatgtaggacaggaagccctaggtagaggtagtaggtaattgaaaaggcaacaacatgttttctttcacttttagactaccattaaaaatgatatttgagtttttattgtattttcactcaaacatttaatgctatagtaaaaaaaatcctttttaaaactattgagatcatgaaactacagtttaagagactggtctgccaaaatttccacagttgaaacaaatatagaaccacatataataatgctcattattttctgaggggataatttactctttagagaaatggcacattgcatagcagcctgaattattttttaattactcttttaaaaaattcaatcttatcccacttttcacatatgaaaatacttttaaaaatctgagaaaagtgtgcggttcctgaattactgcttcctcccattctccttccttaggtgttttcttttcccagcctgtaaggtccttccccctctttgccaggctagccaaggctgtgccttcagaacgcaccttctgttaacctctgcttgagccccacccaaggtctccaaaccactccttctctgtgcttgtttcatcttagcacttgtttaacatttttccaacttcttttagttatttgtttccccaactagtgtgtaagctttctgccccaaaggtttttttgtaattgttgcaaaaatcatctcaggtttaaat

SEQ ID NO: 61724 - DNA, 887 bp, Homo sapiens
tgcatcaaaacaccccattatatatcataaatatatacaatgtttatttgccaattaaaaaataaaaattttaaaataatttaacctagaaaaggtaataatacatcacagaaataggggatgaagaaatagcattcacctactttattcatttgtctctcaagggctctctctaggcttggattaatgtaggacaggaagccctaggtagaggtagtaggtaattgaaaaggcaacaacatgttttctttcacttttagactaccattaaaaatgatatttgagtttttattgtattttcactcaaacatttaatgctatagtaaaaaaaatcctttttaaaactattgagatcatgaaactacagtttaagagactggtctgccaaaatttccacagttgaaacaaatatagaaccacatataataatgctcattattttctgaggggataatttactctttagagaaatggcacattgcatagcagcctgaattattttttaattactcttttaaaaaattcaatcttatcccacttttcacatatgaaaatacttttaaaaatctgagaaaagtgtgcggttcctgaattactgcttcctcccattctccttccttaggygttttcttttcccagcctgtaaggtccttccccctctttgccaggctagccaaggctgtgccttcagaacgcaccttctgttaacctctgcttgagccccacccaaggtctccaaaccactccttctctgtgcttgtttcatcttagcacttgtttaacatttttccaacttcttttagttatttgtttccccaactagtgtgtaagctttctgccccaaaggtttttttgtaattgttgcaaaaatcatctcaggtttaaat

SEQ ID NO: 61725 - DNA, 1291 bp, Homo sapiens
atatactactgctttggatacctaatcctactgaattctcaccacaatgctgtaggcatgtttttcaaagaaggaaaagtagattcagaagagttaaagaactctttaaggtcagacggctaatacattgcaaagcagaaattcaaagctaggtctgtctgactccaaagcgtgtggcttttgctcctttctgtgctaccatcaacactcacggtcagtcattagcacctatgaggggaccatatctctttcattcatattaatattgctgttttgctgtagatgcataatctgtacttgaatgaaagaggaaaagaaattaaaaaatagttcttggccaggcgtgatagctcacgactgtaatcccagcactttgggaggccgaggcaggtggatcatttgaagtcaggagttcgccaccagcctgactgacatggtgaaaccgtgtctctactaaaaatgcaaaaaagttagctgggcatggtggcacatgactataggcccagctactcaggaggctgaggcaggagaatcgcttgagcccaggaggtggagattgaagtgagccaagatcacgccactgcactgcagcctgggtgacagagagagactccctctcaaaaaaaaaaaaaaaaaaaaaaarttctcgatgtcactgttttcacatctctggcaaatgaactgtgtttttcatacttgcctgaatggtgaataaaacaggttcttcccacactctcccattcacaataaagccttggtttgtcccatctgtggccatgaaagtaaagcagtcagtctgggagtcccctcctgagtgccgataggccacattcttgctgtccacatcctgctgggtgaaattgtgttgaagtagccctgtcccccacaggtagagctggccatgctgggggagctgaaccaagaggaaggtgaggttctccgcaggtgtatcagggtcggtcagctgaaggaggtcaggggaaagcaggcccacggccccttgggccagtctcaaccccttgttcctggttaccacaggcagggctctgtccacagtctccagtgtgatctcaaacaccccgtgctcggtccgcagtccattgctgatgatgaatctggtaaagagaggcaaggcagccttcagcatggattcttgtgtcaccatctactggaatgaaatgataacaatacacacctttactaaagggtattgtcgtgttgtgactcaaatgaaaaatcaagggcagatcttgcagaaaaatccctatcattaaaccagtcactagagtaa

SEQ ID NO: 61726 - DNA, 853 bp, Homo sapiens
catttatttggactggaagaatgaaagcaataaaagcaagccccagctaattcagctccttatgactcctctctccctcagctacagttactcactctagaggcttaaatattcaatattccttggaacaaatatgtgctcaaattgctcattacctagagtttccttcaccagcccacatcctttcttaagacaagcaaaagacttgaaaaaaggaaagtgaaccgaaagagaaagtcattggccacagattccatttggtgggtgatttcctacattttactcttccagtcttttgcaagatttccctctaattcagtcttacacacacttactgagtgcctgtctcatgacctcccctgtgtcagtgatacagagatatgtgacagataataaaaaccacttatttagtgtagcctgtgggccaggtactgagagttgggagttttagatccattaacttactaatcctccctgcaacttacaaagtaggtaagattattgttattttgcagatgaagaaactgaggcttaatggcagaatgacttaagtgtcagggccaggattggaattcatttgtgttctatattataccaaaaccaatgtcaataataattgtgaatccaagagtaaagggggctgggaatgaaaatgtagtcaggattaggtcatggaaagcatcgaatgytgtgataacagtagcaaaaaaggcacagaccatatgacagcctggaacaaactccatccagcatgaagctgcaatatctctggggacagaattgggcatgagctcaactgatccagacaatatatgggttatatatttataattgctagacatggacacatgca

SEQ ID NO: 61727 - DNA, 673 bp, Homo sapiens
gtgtagctcagaatattaaacgatttttaaaaggctgcttccttgggtcagtgtggtgtgcttgagttctgggaatgcagcaaaatgaagtttagaaataatgaaattgaccaatgcttcctatctctgtagttggccattgtggggtcagtgtttactgatctttgctcactgtcctgatgagataaacttgatatttttaatggaataacttgtttgtatcagtcctcactccacattatgaaagaattgtggagaagcttgcagaaaactcttggtatgttatctttcactcaggaagtgtttctccaggaaacttccagagagggagattttgaagctgaacagctgtggttggactctgagcctcactgcttactggctgtgtggatkgggtcctcccagtcctatcctttccagctgttgagaaacacagtttttgtaaatcatgatcactagacttttcagtccccagaacctgagtttgggtgggttaggatttgagataacaagtccgttttctggtgtaagaacagcagtctctaccaggcttcagggatttcttgaagtagcggtaatgataacaatatacaaaaatagcagcaagaatcacgactcactgctattgaacacttactacgttacaggcaccgtgccaaaccctttacatgca

SEQ ID NO: 61728 - DNA, 502 bp, Homo sapiens
tgactattgtaaataatamttccattaaaatgtgtatataaacattgatttgagtacctgttttcaattctttggttacatccctaggagtggaactgctagatcacagaataagtctacactgaactttttaaggaactcccaaattgttttccacagcagctgtcccattttacattcccaccagcaatgtacaatggttccaatttctctacattctcgccaacatttgttattcggtttgtttggacattttttggagtagccgttctagtggggatgaagtgtgcctacttcataccacttcactgttatctggtgaaatcttaactcatccttctgtgcccagttttcatgtcaccgtgatttgaaaacttccctgagtttacaagctcaccgctgaggagtgaactgcctgagctctgtgccctgaagcccccccgggggcggggggagccagctatgtcagtgtctccctgggaggctgtgcccttctctaggg

SEQ ID NO: 61729 - DNA, 540 bp, Homo sapiens
aacgatggaaaatgatactagagatcacgctcagtgctasggagggcatggcgagatagtcacggtaacaggattcgtgggagtgcaaattggtggcaaggttttggagagacgatcagaaaatctttatcgtgagtcttaggaaacgtccgtattctaggaaatattcggaaacgcaagacagtgtgtccacggtgttcaacggtctgactcagtgaaaaagtggagcaaaccaacagggaggcgcaaaggaaattctggtgcagacatgccagcatatggcgcagtctttaaaatcatgattttcaggaatatctctctgtgagataagcattatcagtgtactgtgaatctcaacaagctgagagtgccctattttcttaagtgggtaaatgcctttgaattctggctaatgtagaattaagggccgaaagcagtggctcacgcctgtaatcccagcactttgagaggccgggaggatagcttcagcccaggagttggggaacagcctgggcaacatagtgagacctccatctctag

SEQ ID NO: 61730 - DNA, 1890 bp, Homo sapiens
ttgcagatgtaataatcaatagtaagaattttctggtaatcaatagtaagaattttctggtaaacaatagtaaaaattttctgaaaatagtgttacattttacatgtgaaaaacttcccagttcaggtgctgaaatacaagagcaacaagaaacccacaaaagtagaacctggacaatgaaaaaagaagagaattatggatatggcaagaattaagtccatccttttagccaaagatgactatgtgatttgggtggtttcttaatatggaggattaagtttttattgtaaaaatcctattatatttgtttttatagtctgtttatattcaccatctcaccatctagctgaaaatatttttatttgactcagtaatatttttattatttctgactcagtaaatatttgttgattggctaattaaatacatgatgcagttataaataaaagaataataaggaatgcatagttgagagtaacaacaccatcccctatgatgacataagattattcataatctgtgtgatagttgaaaacaatataatgaattagaatagaaaaagctagaacctctgtttctgcaaacctaataaacaactttaaagatgcccagtattttaagataatcgattttgacctgaagttatttcaagtgacagcaaatttctttaaaatggtctgcttatgttttgtttctaatttagagataattactccaagggtgatgtaaaatgtgtatagaagtatacaggaatagtacagatttccttttttttttwaagtgtttaattcaagcctatatttgtagtttctaaactgttgatccatccagcgttttcttgtcacaaatgtgcaccaatgaaaaaataaaaagtcaaagagaatcactgtcatccctatcaaaggaatggctcctttcctaaaattcttcgaaaatatgtgttttacaatccttacacctcaacaaaagcggcaatggagtaaataccctggtttatgttgttctcacaattaaatggatatccacaaactacctgtcataaaagccctctctttttttcccggtgcttcttcattgttttcttgttttccctgggacattgggacagaaccactggccctttggtttatgactgagtcccagactcagtcataaaccaaagggaagtggaggccactccctggggcactcgtggttgtcacagccgctcctttctctgtagacctgaccagcacgctgtctgtctccttgcggtccatggcaaggtctgcgggggcctctgctgtagcactggagtggttctttttcttcaaggtctttgctttcttgccttggccgttcctgtggtgatctcgtcgtggtcgtgatcattggatgcatcctctcgattctcatcgttgcactgtcgcggagaacactttgttatccggcgtttctccctgcgtgattatcattcttccccgcattgtggcgggctctgcagctagcagggaacctgatctctggctgctgcccaaggagctcggcgagaccgcccatctgtccggtcctgctctccaccagctccttcgtcggactcagtctggatcttctcaacgcccagctcctggctccgagtcagggctctctggatgcacggtaacaccctcctcttctgggtaccctccctccgtctcatgttattatgagagatttatgtgataaataatgtagccatccaactccttcaggattttctgcagggccagcccaggcttgtctggttctccctgttccggggacatcaccttccaaaaaagtctccaagcctggggcggtgagcgtgggcacaacccctagggtcactcacacttccctggccatcttttttattataaaagaaaaaaatta

SEQ ID NO: 61731 - DNA, 714 bp, Homo sapiens
tgcatatttaaacaaatatttatgatcattttgcataaatgctaacatgctttatacacttttttatcttgctttttggttgatgaaatagtcaatttcccttttacctttctgtctattttttcttctatatttaaaatttgttttttcaaatttttttgttcatttttctattcctttcacaggtatggatacttttctgtttattatctttttgtattggttagaaattccagtataatattgaatagcaatgggaacattttcacttttcctgatttatagtggctgctttattaagtatgatgtttaccataccttaaaaataatatcctctattagattgaggaagtctattcttaggttgctgtgaatttttattgtgaataaaatgtgtaaaaagtgtaaaattttatcatgatattttaaatcaatagagatarttatgtgataattttctcatttcaaggcatccctcagatatattgtgggctctgttccagactcaataaagtgagtcatataaattttttggtttcccagtgcatatgcaagctatgtttatactataccatagtccattaattttacaatagaactatgtctaagtaaacaatgaacataccttaattaaaaatatttaattgctaaaaatgttaacaattgtctgaaccttcagtgagtcgtcagctttttgctgatggtgggtcttgc

SEQ ID NO: 61732 - DNA, 715 bp, Homo sapiens
atacctcaaacctcagcatcaggcaatatatccatgtaacaaaactgtgtaggtacccccgtatctaaaataaaagttgaaatgtacaacaaaattattggtttcaagtttttgtgaattcccactaatacatattttttttaaataatagattttattatttagagcagttttaggttcacagcaaagtagacaaaatgaaagaaagtttattcatctcccctcttccccccagcatcccccaccatcaatatccctatctgtatggtacatttgttacagacctctagggaatttaaatttagtttacaaatctgcataatggccagctattatttatgacttcctagggacatttctttcttctctgctcaacacaaaaacaaattttcttcaagtgctctcatgttgggagaagcagcaattcgcctctgatttgaacttaaactgaaagtagaactttatgagggggagggtctcgcattaaactkcccttttggcaggctctgagcttggttttctgttcgcacaccagtgaggtcatgaaaagtgaagttcaagtttgtaaagttcaaataatgctctcagggcaaaagtgattctaatgtatttttatgagtttcctcctgcaggtagaatttggcctgaaaaatccctacaatttttcaaagatttcagtgcaaataaaaaggcttaaaggtattttcttcagtat

SEQ ID NO: 61733 - DNA, 595 bp, Homo sapiens
ccaaagcagaactcttgggttttgcccccttcgcttcatttcccccaagtctttcccagcttagtaagtgataccactgtctacccagtggctcaagtcagaaacctgaggatcatcttttcctctatctcctttacctccttcgtcaactcatccttaagtcctattggttatacttagaatttctatcccaaatcccttcctcttctttccacctccagcgtcagcactctaatccaagccactgtctcatctagactgtcacaatagcctcctaactgatctttmtactttatttactcaacacttatttatggagtatcttctattttttttagaacaggaaccaaacattaaccaatagtcacctaaagaaatgtaagatctcatatttgataagtattccaaagggctggagttgcagcgagaatcaattatagcacagtttgacttaggaaggagagggggaagggcttccccaagaagtactgcctgagctgagactttaaggatgatgaagagagaaagactgagggttctaggcgaaggacactgttaaatcctgtggtgggagaagcgcagagctggcaaagag

SEQ ID NO: 61734 - DNA, 554 bp, Homo sapiens
cttgacccctaagttcttttctatctcggtagttctccaatgcttccaaacagatattttaaaaatatttttgaacagctttcctaactgttcttgatgggaggcttggtctggtttgcaatgtctttgggtgatttctatttattctgcctagctcagtgaacttgaaaaaggaagccattaacagtacccagggtatttctcaaaacttctcaaatgtaaaattctgccagtaataactttgagaacccatyggaacaaaacaagacattgtgacacataattcagcactgctcctggcagcgatgctgagatggaccattctaaagccttttctttcccttggctttctttatctctcccaaactatcaagcaaaaaaaaaaacaaaacatctacaggtacaaacctcttttacgctttcccagtagcctgttaggcctctatttctaattattcccaatgttaggaattcaaattcatgtgtttctaaccttaaattttggagattgcaaaaaaaggctcacagaagtgaaaatacattataagagttca

SEQ ID NO: 61735 - DNA, 554 bp, Homo sapiens
cttgacccctaagttcttttctatctcggtagttctccaatgcttccaaacagatattttaaaaatatttttgaacagctttcctaactgttcttgatgggaggcttggtctggtttgcaatgtctttgggtgatttctatttattctgcctagctcagtgaacttgaaaaaggaagccattaacagtacccagggtatttctcaaaacttctcaaatgtaaaattctgccagtaataactttgagaacccatcggaacaaaacaagacattgtgacacataattcagcactgctcctggcagcgatgctgagatggaccattctaaagccttttctttcccttggctttctttatctctcccaaactatcaagcaaaaaaaaaaacaaaacatctacaggtacaaacctcttttacgctttcccagtagcctgttagscctctatttctaattattcccaatgttaggaattcaaattcatgtgtttctaaccttaaattttggagattgcaaaaaaaggctcacagaagtgaaaatacattataagagttca

SEQ ID NO: 61736 - DNA, 1077 bp, Homo sapiens
gtgctggtatgagccagaaatggactgtcatggcctgagcaaggtcactctgaaggatagcagagaaaggaactcttcttggtggcagttggagcaaggcatgtggttttccactgtctcgaggcagagatgtcttgaaatcagaatcaacattgaatcacaggccatggttactgaaggaagcaagatgagagaataaaaagtttaggagaggatgggcacggtggctcatgcctgtaatcccagcattttgggaggccgaggcaggcagatcacttgaggtcaggaattctagaccagcctggccaacatggcgaaacctttgtgtctaccaaaaaacacaaaaattagccaggcttggtggtcacgcctgtaattccagctactcaggatgtgggagcacaaaaatcacttgaacctgggaggtggaggttgcagtgagcagagatgacacctctgcactccagcctgggcaacagagtgagatcctgtctcaacaacaacaaaaaaagtttgggagagagaaacaaggatagacccgctgaaatagacccagccattagaatattcatgactatgtaaatgattgtgacaaggctccactgtaaagaaaaaattatatgagagcctggttttcagatggcagattctgaaagagcaagaaacagttttatgaaaatggttatatggccccaaaggatgctggagaaggaaattcctcaataggcagaactgtaagcagtgcatttcattgtccactttkcctggtaggaaaaatggcctgaggtcaggatctataccagttcacgagccaatgacaaatagtgtgagtagctcagcatcttaaaagattgcaagttaatgacaaagaggtttgggaaaggtggatttcctggaatggtcacagatcatgagacagcaggtgtgccaaatgattgctcaccatgggcccccgctgtgcaggaagctttcactaatcagcagatctgttctgtggatattaactagatggccttttccaccagccagtccagttcttgttcaatgggttcatggacaaaggacgatagtgacagg

SEQ ID NO: 61737 - DNA, 1094 bp, Homo sapiens
ccctatgtaagagaaatacagataaagtactcacaggagggatagtagcaatatgcaatgtccttgctaagcaagccaaagaaggctttttttgtgtgcttgtttgggcatactttagcatctgtttttaactgatcaggaaaagtgtaggcttggggtctaagagaaaatattgtttcacgcaatcaggagagacaatgtggagatgggtcttataaacattacgttttcttataagcattgtgttttgttttgtcagcacactgtttaattcttttccttttcttaattgaaatgactttctgtgggcacaaactttgctgttctccagagcacccattagtccctgcacacctagcccttctacacagctgttatctgcctgcccaggaccatttggattttagatttcataatcctttcactgaaacatatatatttcagaaagaaatgggagtttcaagyagcagctaaaaactaatatatctgtatgaaagttatatctatatatctatatctatatctatatatataaaatgtacagctctattcaagtaggatattaagactatgaaaccataacagtgcaggcaacaacagaagtcaataaaaaactggggatagacaacaccttgagggtaaactaacattttttttctgtaaccctaaaagaaaacttaacagctaagcaacgattgaaaattaagcttggattgggttagttgagagagccactgacttaaatataatattcaatttaattttctttcttattcttaatatgtccccatcaaacttattcttatcttttatactttgagatccaaatataaagcaattggaaaaaggttgtgtatataattggctcttcatctataatagtagccctgggaccaaaccttgaaaaaactgctttatagatgttatcttgtaaatccacccatttgagagatgggagaagattgtgtggttaggtaactttgagactgcaaattcaagtcaagtccatgatgaaaagctctgcttgtcctggtaatatggcttcctgtgggcagtcctagctggagctacttggaagttcaaaatcttccttc

SEQ ID NO: 61738 - DNA, 797 bp, Homo sapiens
cttctccaaagcctcgtagatgaatatgatgcaaataagggctgcaaaagcctcttctgtaaatcgagtaatataacacacaaggctgcttgcatctgttgcaaccaaaacaatgcacaaaaaagaagtccacagaccaatactggttcttaaagacagataagaaagttgataatctctgtttagaaagaaaaatatgaatatgataaacatatgtggaatagtatttgtacctaaaatttttcattgcaagcaatgggaacagcaaccccccacgattcttaaaagagaatgaattacagaatgacaaaataacatctagaaataactctatatctttttctgcttcggctgaagactagcttattagtagatttattattaataaattaattagtattaattattaatagtttattacacttatataaaagatttacagtgaaaatctaccaggcgataaatatttcaaaatcattacagctcactttataaatcagttatgagtaaatgacaggtatggtgtctatatgaaaaaacaattgcatcttactccctctaaagatccagacrtcatatgtatcaatacagtaaccagctccaacatcattaccatcactaccactaccctcctctcccaccattatcaccacagaaagtgatttcttattttaaacttcaagaaattaccagaatctatacttcgggtcactgcattctctattagtctatgtggcatgccagattggaatcagattaagcttgtttagtgagtacagaatcagaaaaagagagct

SEQ ID NO: 61739 - DNA, 540 bp, Homo sapiens
ttaaatgatattatctgagtatcttctgtgtgttccttattatataagtagccagtatgtgagttaaatgagtgggcccatccactttcatgccccacttaggttccaaattccagaaaaatgaaataattcaaggakactagaaattaacaaattgacacataaatcccatccatcagctaattatagtattaatattacagtatctagagcactttgttaatcgagtccctagaatctaagtatggaaggagtcagagttggaagatggtgtcaaatgacaggtgaagctgccaccataatcctggaacacgatattttcctgtaagaaaagtgagtagaatggtttaaagaagcatgataaagggaacaatgattaacattctcctaagatagttgaagtttattttcaagatggtaaacatggactctaaaccacttctatgttccaagtctcagctgctgaccccaaaagaccccatattatgttttaaaaatcccaaaacatacctatgtggggattgtaaaccatagatttca

SEQ ID NO: 61740 - DNA, 540 bp, Homo sapiens
ttaaatgatattatctgagtatcttctgtgtgttccttattatataagtagccagtatgtgagttaaatgagtgggcccatccactttcatgccccacttaggttccaaattccagaaaaatgaaataattcaaggagactagaaattaacaaattgacacataaatcccatccatcagctaattatagtattaayattacagtatctagagcactttgttaatcgagtccctagaatctaagtatggaaggagtcagagttggaagatggtgtcaaatgacaggtgaagctgccaccataatcctggaacacgatattttcctgtaagaaaagtgagtagaatggtttaaagaagcatgataaagggaacaatgattaacattctcctaagatagttgaagtttattttcaagatggtaaacatggactctaaaccacttctatgttccaagtctcagctgctgaccccaaaagaccccatattatgttttaaaaatcccaaaacatacctatgtggggattgtaaaccatagatttca

SEQ ID NO: 61741 - DNA, 540 bp, Homo sapiens
ttaaatgatattatctgagtatcttctgtgtgttccttattatataagtagccagtatgtgagttaaatgagtgggcccatccactttcatgccccacttaggttccaaattccagaaaaatgaaataattcaaggagactagaaattaacaaattgacacataaatcccatccatcagctaattatagtattaatattacagtatctagagcactttgttaatcgagtccctagaatctaagtatggaaggagtcagagttggaagatggtgtcaaatgacaggtgaagctgccaccataatcctggaacacgatattttcctgtaagaaaagtgagtagaatggtttaaagaagcatgataaagggaacaatgattaacattctccyaagatagttgaagtttattttcaagatggtaaacatggactctaaaccacttctatgttccaagtctcagctgctgaccccaaaagaccccatattatgttttaaaaatcccaaaacatacctatgtggggattgtaaaccatagatttca

SEQ ID NO: 61742 - DNA, 459 bp, Homo sapiens
tggagaacacggcacgggccagggtggcgccggggctggtggagggatcagctgtgctatcagggcactaagcctgtcctgtttcttctcattgctttggggttttccactcacccctggcttcctcccttcgatttctgaagtaacagcagatccacaagcatctccactttctcccagcctcccttccttgaccccataagtcctggggtgggccccaggactggcgttytccccctgcggcccagcacatcctccagagctccagctccccgcacccccatactgggcatatctgctgggaccactgattcctccaaccgacgacctttagttcttggttaggtagtttactacttagaatcctacttaggtggtctcctacttggaatccttgtttgaacaggaaatgggaggccccatggcctgtgcaggctcaccctggccggctggcgctgc

SEQ ID NO: 61743 - DNA, 574 bp, Homo sapiens
taaaaaggtgtaacaacaagggaacaccccacactaacagaagtgtagtatcccattattctctgtaaagaccacaccatgtctgagatataaayagggtttgggggggtatgactttaatggaacactggaaaattaaatgcattcagtgaaaagcaaatccaaataagagactgatatgtgacaacaatattatacacaataatgttaaaaacttaggctcttttagcttgcagaagaaaaactccggagtataaaatggtcttcgagttaaatagaattatatctaatttagtgatagagttttaattgtaggtcttactgtgaaaatcaaattatcctgaaaaatccttaggaaaataccatagtccagcatgttacacaaatttcaattggtccagcaccccaggatcaacaggtttcctcctattttaggatttatggctatttgttttccatgaagcactagaaaatgttacatggttgccttgtgtttagttgcatgtaaaggtttatctttaaatgcagtgctcacataatagaaagatagcgggaactcaaacagctagggaaa

SEQ ID NO: 61744 - DNA, 560 bp, Homo sapiens
tgatctctacgagacaacttggacactgttgaacactctactgaaattcctctcttgatttttttttcttaataactatcaatttccagatcttatgttttgggcactttgctatgggttttccatgtattaccttgttaatccttaaaattacttcataaagtacttattattactatcttcattttatttataaggaaaacaaggcttcagagaggttaagtgactttcccaaatcacaaagcctttattcttatattttgtcattatgacaattaaaaaatattttttcctagttggtaaattattctttgatcaaatactaagtgaaagcccatcaaagcatagtttactttccaaagctgtttaaattttaggactttttttattagcctctaaaaatgtatggggaatagataagggtaaattaaaaaggaagttktttttttttttaaacacattcaagctgaaagatttcccaatgctgttaagctaagagatgactaatgaaagtacaagtatatgcttgtctatgaacaaaactagcaaaactgttagag

SEQ ID NO: 61745 - DNA, 1084 bp, Homo sapiens
ccaatttctgaaaaacatatatgatataagcccttcaaaacttaggaataaatgtaaatgttcttacctgataaaacaaatctacatcaaacatatagaaatgcaataatgaaccacaaaaaagattaaccataaaggaaaagattgttaaatataactacgttagaaataagactccattcctcaagagacatctcaaaataagtgaaaatgtagtccacaaactggagcttgcactttttgtatatgttgcatatatataaaaaataatactttatatcatgtacaaagaatttctatgaataaatgagaaaagacaatctaatagagagtatagcaaaaatatggacagattttcattgaagaggaaatgcaaaggtcaaataaatatatgaaaagataatccatcttattaaagatcagaataggcaaactaaaggcatttcattacactctaaaatttgaaaatatagttatgatcaaacattagcaaaactgtacagcaataagaatactcaaaactaaagcttgagcttatttgtagtgtttaccctaaacccaaggttggctaatacccatatggacaacttcataacctccaaaactttctcccttctctagaatttaaatttttctagtcctacttttatgtgtataatttttgtaaaatttctggcttgaatagttgtttcaaaggaagaatatgcctgctccaaagtgttatattccactaggaaatggaacttgctctttttcagctctatttttttttttttttttttttttttgagacagagtcacactctgtcaccaggctggagtgcaatggcacagtctcagcttactgcaacctctgcctcctgggctcaagtgattctcctgcctcagcctccctcagctctgccttttacatataaattaatagaagtcatttataaatggatggayggtaaaataatgaaaaggtgaattagtaacaatggtgagttgtggcagaattgtaaattaatttaactagtttggaaagtaacatggcattacttttgcaaaatgaatatacacatattttataatagagtaattt

SEQ ID NO: 61746 - DNA, 786 bp, Homo sapiens
cgcttgtttgctctccctgccccatgtccagttcggctgctgaccaactcctgactcttctgaccaagagcgaccccagtctcaccataggtgaagacttcttcaccggctctctttcattgtccccaggccagcagcttaatgtgactaacttcacagattccctggcaagctctgactcggccccctctkccagtgcttcaaaaggcttatttgtgatatttctctgatcctccaattctccctattagaccattattttcccccagattctcccacagttgtgtaaagtcttatttctgtaataattctttattccacaatacgtagaaattctgcttccctaatttgccgatagtgtagtagtccgggactattgttatccctaaggtgaaaggaaaaaaggagagaatcatgtagagaaagcctctctgagacaaggtgggaccttcagtgtggaacaaagctacttcaagacggctccataggaaggacaattgggaagaaaataccctgattttattctcctcccctctcccggtttactgcctgggcgcctcattgacagaacacaaccagaacccaccattgacataatccacacgtgtcagcctctggcagagagcagggcatgtggaatctagaagatatgcagcacatagagcgcacatgacacaccagacctttctaccattgctcaccatcattttctcacactctagatgctacagtcactctgactttcttttacatcctagaatcttccatatttttactttgttgggg

SEQ ID NO: 61747 - DNA, 1003 bp, Homo sapiens
attcaagtgagcttcatcaaataaaaatgtatggaatacctatattatgctgaaaactgctaatacgttaagggccagagaggataccaagaggtagaagggccrggcacggtggctcaggcctgtaatcccagcactttgggaagctgaggtgggcagattgtgaggtcaggagatcaagaccatcctggctaatatggtgaaaccccacctctactaaacatacaaaaaagtagctggtactaaacatacaaaaagtagccgggcatggtggcacgcacccgtagtcccagctacttgggaggctgaggcagagcttgaacccagaaggaggaggttgcagtaagccgagatcgcaccactgaactccagcctgggtgacagagcaagactccgtctcaaataataataataataataataataataaacaaaaaatttaaaaagaggtagaaggcagagtccttttcctcataaggcttatgacttaattatagagacaagatacacaaccataaaatatgtatgaactgttacaggacagtgcatgattaaatgtcaaaagatgggccttgatgagcagtgtcaattacatctgtcaagagagattttagggagctgtagcaaaggaacaaaattaaacaagatcctaattatcttttcttataccctaagtggtgtgtttttgcctctatcctgtatgacattatgtgtaattttgtcaggtgccaggaactagaaaatctcccctctgctgacaggtatagtttacctggaaaagagaatgtcagtgattcaaaaggcatgagctctagctggctctcgtcttcattatgagttctcccttgggcaaaaggtataaaagagcacatcacttacatacctgaaccataatgacattgcatgttttgaaacgtcagaatgacagaatgtgtgactatattagtcaggttccctagagggacaaaactaataggatatatagttctgtcacttgagggaa

SEQ ID NO: 61748 - DNA, 1003 bp, Homo sapiens
attcaagtgagcttcatcaaataaaaatgtatggaatacctatattatgctgaaaactgctaatacgttaagggccagagaggataccaagaggtagaagggccaggcacggtggctcaggcctgtaatcccagcactttgggaagctgaggygggcagattgtgaggtcaggagatcaagaccatcctggctaatatggtgaaaccccacctctactaaacatacaaaaaagtagctggtactaaacatacaaaaagtagccgggcatggtggcacgcacccgtagtcccagctacttgggaggctgaggcagagcttgaacccagaaggaggaggttgcagtaagccgagatcgcaccactgaactccagcctgggtgacagagcaagactccgtctcaaataataataataataataataataataaacaaaaaatttaaaaagaggtagaaggcagagtccttttcctcataaggcttatgacttaattatagagacaagatacacaaccataaaatatgtatgaactgttacaggacagtgcatgattaaatgtcaaaagatgggccttgatgagcagtgtcaattacatctgtcaagagagattttagggagctgtagcaaaggaacaaaattaaacaagatcctaattatcttttcttataccctaagtggtgtgtttttgcctctatcctgtatgacattatgtgtaattttgtcaggtgccaggaactagaaaatctcccctctgctgacaggtatagtttacctggaaaagagaatgtcagtgattcaaaaggcatgagctctagctggctctcgtcttcattatgagttctcccttgggcaaaaggtataaaagagcacatcacttacatacctgaaccataatgacattgcatgttttgaaacgtcagaatgacagaatgtgtgactatattagtcaggttccctagagggacaaaactaataggatatatagttctgtcacttgagggaa

SEQ ID NO: 61749 - DNA, 631 bp, Homo sapiens
ataagactgtatttggagatagtgcgtttaagtaggtaattaggttaaataaggtcatcagggtggggccctatctaagcccaaggaactggttttcttataagaagaggaagagacaccagagccctctcccacccctctcctctttccatcttctctccctcttccatatacctcaaaagtgtggtggaaccctgagtttcatcataggcatgggagaattagtcttccctacaggtagatcagaatgggctggctttcggataggggtgcagtggctcacgcctgtaatcccatcactttgggaggccaaggtcaaacacctgaggtcaggagtttgagaccagcctggccaacatggtgaaactccgtttctactaaaaatacaaaaattagctgggygtggtggtgcgcacctgtaatcgcagctactcaggaggctgaggcaggagaattgcttgcacctgcggaggcagagggtgcaatgagccaagattgtgccactgcactcaagcctgggtgacagagcaagactctgtctcaaaaaaaaaaaaaaaaaagggctggctttcttccaactgtttcacagtcaggcagacagactgtttctctctttcatttgcttgggaaa

SEQ ID NO: 61750 - DNA, 1132 bp, Homo sapiens
gctaataacatactgtctcgaggcatataacttaataattaacatgaagtcaaacaatatacatgctccaactttgttattctttgagctgtttcatttattatatgttcttagcacttccatatgatttcagaaataacttctcaatttataataaataaaaaatagcctgcttgcagccaggcgcagtggctcagcctgtaatcccagcactttgggaggccgaggcgggcggatcacgaggtcaagagatcgagaccatcctggctaacactgtgaaaccccgtctctactaaaaatacaaaatttagccggcgcctatagtcccagctactcaggaggctgaggcaggagaatggcgtaaacccgggaggcggagcttgcagtgatcagagattgcgtctctgcactccagcctgcgcgacagagcgagagactccttccccccaccaaaaaaaaaaaaaaaaaaaaaaaaaaatagcctgcttgctaggatcatgatgaggacagcattgaattgacagattgctttggagagaattgacatttcaactatgatgggtcttttgatgtacgaacacaatacagcaatcttctattttagatctgccttaattttactcagcaacatttcctctttttttgtttgccttttgagtatacactaattatgcttatttttagacagacttatccttaagtatatacatattatatataaagtatatatatataaagtacatatatatatatatatatakagagagagagagagagagagagagagagagagagagagtcttgttctattgtctaggctgacctcaaattcctgggctcaagcaatcctcccacgtcaacctccaaagtagctgagactacaaacgtgcagagcaccatccaagctaaatagaacataattttactagtatttctaattatgtattttatttccatttttgaatgttctttgcaataaattttagttttatcttgatcttgtgccctataaacatgataaacaacattatatttattggcatttttgtatatttgaccaaagtttctatttagtttatataaatactctgaattaagttggtattacttcttcatttccaatctgtatgca

SEQ ID NO: 61751 - DNA, 617 bp, Homo sapiens
tccctcaagtgacagaactatatatcctattagttttgtccctctagggaaccctgactaatatagtcacacattctgtcattctgacstttcaaaacatgcaatgtcattatggttcaggtatgtaagtgatgtgctcttttataccttttgcccaagggagaactcataatgaagacgagagccagctagagctcatgccttttgaatcactgacattctcttttccaggtaaactatacctgtcagcagaggggagattttctagttcctggcacctgacaaaattacacataatgtcatacaggatagaggcaaaaacacaccacttagggtataagaaaagataattaggatcttgtttaattttgttcctttgctacagctccctaaaatctctcttgacagatgtaattgacactgctcatcaaggcccatcttttgacatttaatcatgcactgtcctgtaacagttcatacatattttatggttgtgtatcttgtctctataattaagtcataagccttatgaggaaaaggactctgccttctacctctttttaaattttttgtttattattattattattattattattatttgagacggagtcttg

SEQ ID NO: 61752 - DNA, 746 bp, Homo sapiens
gttagaactcactattggtatttatgtaactggcacgcatcaagttttgtgaatgagttctaagggtctggggcacttgatctsgttgtttttaggaggtgagagagagttaaaagcagtcattaaacaagttagtctgctcagcccatgaccagtctcactgagccatttgttaggaatcagtaacactgcctataactatcaggacaagagaagacactgtggcacagaagagggtcgccaccattctacacacacacacacacacacacacacacacacacacacacaccacacatggagataggaatctcagcaaaattaaaatagcactattttacttaattgtgacaaggctgtcttcagcatttgctttgctgtgtgcaagtaggaatgtcattaccttgccatcccatgctactgttattggtttaaattattgatgcacagtattctattgatgcacagtattctagttgaagtaaaattgtctcaaggaattaagctgtttagaacacaatacaagaaaggacaaaggatatgatcatggcaccccaaaaatttgcagagtcaacagtgtcactggttgtaacagcaatttaagaattatatgtcctgaatttattttgtctttacaatgatatccatggtttatacctaaggtttttcaccttaaatagtgacatgataatgtaataagctagagaataacgtgaataaaattaaagtgctttgaaaattgctaa

SEQ ID NO: 61753 - DNA, 719 bp, Homo sapiens
agtcccagaactttgggggtccgaggtgggcggatcacttgaggccaggagtttgagaccagcctggtcaacatggcaaaaccccatctctactaaaaatattaaaaaattacccaggcagggtggcccacggctgtaagcccagctactcaggtggctgagacaggagaattgctggaacccaggaggtgcaggttgcagtgagccgagattacaccactgcactccagcctgggcaacagagtgagactctctctctctctctctmtatatatatatatagatagatagatagatagatagatagatagatagatagaaacatttttgtacttttactgtatatatatatatatgtatatatatataacagaatgagactgtctctgtatatatatatatatagaaacgtttttgtacttttactgtatatatatacagtactttttgtaatatatatacagtatatatattcgtatctatatacagtatatatattcgtatctatatatatacagtatatatattcgtatctatatatatacagtatatatatttgtatctatatatatacagtaaaagtacaaaaacgtttctatctatatatatagagtaaaagtacggaaacattcacaggatctatacacaccagctttaggatagcacttcttcatttcctttaggaatgagaaagaattagatgagtttcagctggatcc

SEQ ID NO: 61754 - DNA, 719 bp, Homo sapiens
agtcccagaactttgggggtccgaggtgggcggatcacttgaggccaggagtttgagaccagcctggtcaacatggcaaaaccccatctctactaaaaatattaaaaaattacccaggcagggtggcccacggctgtaagcccagctactcaggtggctgagacaggagaattgctggaacccaggaggtgcaggttgcagtgagccgagattacaccactgcactccagcctgggcaacagagtgagactctctctctctctctctatmtatatatatatagatagatagatagatagatagatagatagatagatagaaacatttttgtacttttactgtatatatatatatatgtatatatatataacagaatgagactgtctctgtatatatatatatatagaaacgtttttgtacttttactgtatatatatacagtactttttgtaatatatatacagtatatatattcgtatctatatacagtatatatattcgtatctatatatatacagtatatatattcgtatctatatatatacagtatatatatttgtatctatatatatacagtaaaagtacaaaaacgtttctatctatatatatagagtaaaagtacggaaacattcacaggatctatacacaccagctttaggatagcacttcttcatttcctttaggaatgagaaagaattagatgagtttcagctggatcc

SEQ ID NO: 61755 - DNA, 1317 bp, Homo sapiens
tggaggagccgggccccatgaggatgctggtctgttcttccccagaatctgcctatggctcagcctcagaacctcaggaatggaaacaggagcagagagctgtctatgcggggaggtcctgggtccagtttccatctcactccccgatgggcttgtgaactgaggcggtggcattctctgcctggcccttttgtctggttggagaatgagacctactgcctggagcaggtggggcctggatgcaggccttggcgcagggcgctttgcaaactgcctggtgctttgcagatgcctctcaccgcaaccttcccctccaagcctgcagcctttaggacttcctgctcctctgctgctccctccctccctctcccctcgctggcactctctgtctggctgcccagggcactgactcactggagtgcccctggctcaccgccagcagacatttccctgtcaccgccaagggctgaggaggtggctgaggctctggccccggagcctggaggccagggcagctgcagaggagcagctgggtgccatgcgggcctctgggaaatgtcccagacacctgccttggaagccccaggggcaaaacagccactgaactctacaggagccccacccygaggccacttctccctcagggaaccagtgcgctgtgtggggtggagcgagtgaggtcgggaagctggggccatgtccggtgacaaggaggatccctcccggacatgggcgaggctgggagtgggcagccaactagccagccatgggtcctgggagctggcttattttggttgttaggtttatggccatattaagagaacagcagttttggcaaatgccctacaagtagacactcaaaacctacattggtagagaataaatatttcttattttatcagtgcaaaagaacacaaaactgtcttttctctctctccactctttttttttttttttttttttgagacgaagtcttgccctgtcgcccaggctggattgcagtttgcaatggcacgatctcggctcactgcatcctctgcctcccgggttcaatcgattctcctgcctcagcctcccgagtagctgggattacagacgtgcaccaccacttctggttaattttttgtatctttagacaaagtttcaccatgtcagccagactgatctcgaactcctgacctcatgatctgcccaccttggcctcccaaagtgctgggattacaggcgtgatccaccactccgggccctctctctccactctttaaaataatccttgtctcctttttgctgtgatttcacgtcctgcaggtgggaggt

SEQ ID NO: 61756 - DNA, 1695 bp, Homo sapiens
ccaggttgctggtggacactgatccctgtggccagggcctccgagcatttggtgttcagctcatcggggactctgtggacaccagagggcagaatggggtctgtctgccccaaagccccgtggggagtgagcgtgaattaccccagagtctgtgtagggaagcctcctggagcctggygctttctcctttacagtggctttcagtttgtggatttttctgaagttattggccttggagcttgcgtcaagtttcccgaagaccactcccagtgttggtgattttctcaggaggactcacagccctcatcacgtggtgctatcctcacagcatggttcattactacgaaaggacacagagcaagccagcaggggaaagtcacgtggggcagagtccggggatctgggcgcaagttcccaagagcctgtcctggtgcagctacacaggacaaggttattttctccagtgtcaggttatgacaacacttgtgaactgtcagctacagggatactcttagggactcagcgcccagggtttttactagggcgtagcatgtacccaaattctaggctccctgagggaaagcaggtgttcagtggaaagcacacttgttaaaagtggctgaggcacagggagccacccttaccatctggggacgctggggatcctgcagcccactgtgcagggatgggggtgccgtgctgcatcccagggctgaggaggattgtttggctggggggctctgtcagtagaatgcagaggggagggtccctcctgatgttcccaggagtgaaggcagctcttcatagtgagtctagtgttgggccctgcactaacacaagcaggtgcccggcaggcgtttgccgagggaggggaagaatgaagcaatgtatggtggggtttctagaaccctccctggggatggcttctccgtggagggtagtgaatcccacagccccacaaggccctcagctggggtgagtttcaggccacagcggctcactggccctgtgacctgatgtgagggccaccagggcagggcttttagatgcttcccctgtgctgtgttctcggaggcctgaacacagaggctcactaaatacttgcttgttgagaaaggccaatccctaaacaaaccactgtgatgggggcttagcagatgccagttgacttagcttgtccccactgtccttggagcctgaggcaaaaggagcttcccctcatgcaccagagacccttcccttctgtgggaagaggaaagggttacctgggagactctgtcctgttctggcacaggaagggggaaaggacatggctagcaagcttggcgggggccactgcatgtggcttgggctgctgcccataggcaggatgtcctctgtggccaggggctggctgatttccgccttgtgtttttgcctctttgctcttctgggaggaggaagctggatctgggagtggggcaaggggaggctggcggctgcaggagggatgcctgaaacccagccttccttggtccgtggcctgaggtgaggccacacagggtggtgatggcctgcccttgctggagcacgtgcagcttctgcgtcatgagcttggagaccagggccacgctctgtgttgtcatctgtgctgcttccctgtccccagggctacttagccccttcgggaactgccccttcctgcaggggtgacag

SEQ ID NO: 61757 - DNA, 694 bp, Homo sapiens
ggatcccttcaccttcaccagtcactatcactgtcactgcagagagctagggacagtcctaggctatccatgagaacagcactggcaagtctgtccacctaaaccactacaccatgtggcctactgcacctcacagtcctgttctgaggataataacaggagtagagaaatttagagattctaacaaagatgcaggcttggaattattaaataattggcccaaagtcatggaagaatgccaaagctaggatactaaaattctatccacatcccccagatttaactcattaaagcatattgtaaacagggcattccaatttgtcaaaatggcactccacatttccacctgcagagtagaatgtactgtcaactttaagttctacctgaagtaacggcaacatcaaatagctttcaggacctgtgcagccacattcaccaccctcaggggcatcccctactatcaagagatgctcaacactccaggaaaggaagagcacggagataacacctgctgcagtytgccttagacacacaaaatcagcgtaacatggcatccgtttttgtcaaatgtctgttcccttgcacagggagaagagggggtggcctggtattcctcccctaaatcaggagagattaatggcgaggcatggcctgcccatgctcctagcagaagtggtgctcaggggaacactgt

SEQ ID NO: 61758 - DNA, 713 bp, Homo sapiens
catatatatatactttcaaaattatatttccatttaaattgttagtaatataatttcttaaattcacaattatcacagacatggtacttatttcattttctgtttgggaagttatatgtcaacagggatgaatgacaaagataagctcttctaatctaagcttctgtaatatagaagtaaatgtatgaaacaacaagaaaccaagttatcttctcaaaaaaggattggatcagtacatagttgaggggggtgtgtgtgtaygtgtgtgtgtgggtgtgtatgtgtgtgtgtttataaatatacatatcaagtcaataaatgacttatgaatatttctgtaaaacagaattgcctttatagcatcaggcaagattgtgaaaaaagtattaatattttgtagtgcaactggttaagcaaaagaagaatctgaataacattaaatatttgctattatatatttgcaatttgggaaggtaacagactgcttggatctgtcatgaatccattcatcagttggctgccatatttatggaacttatgtagagtctcagtactctacataaataggagaacaaaaaaaaattcttaaattatattctttggccattaaaaaatacaccacacaattatctgagctacttgactgttacagtcttttgggtatagttttcctgaaagacaacaataagtccctgaagtagttcttattaatg

SEQ ID NO: 61759 - DNA, 591 bp, Homo sapiens
tgcagattctttttggtgttattctgtttctgttgcaagactacatttgggtgtgtgtgaggaagatatcttttagtttaatatcttagttcattttctgttgtttgtaacagaatacctgacactgggttatttatttaataagaaaggtatttcttacaggtgtggagtctaagaagtccaaggttgaggagctgcatctgatgagagccttcttgctggttgggatcctctgcagagtcttgagttgggtaagggcatcacatagtgagaggactaaatgtgttggctcagttcgctcttcctcttataaagccaccagcatcactcccatgataactgttcaatgtgttaacccaatattccattaatctgttaattcacgaatgaattaatcaatttatgagcacagggctctcatgacccaaccatctcttaaaggcccacctctcaatactgccatattagagattacattttcaacagaagttttggaggggatgaatattaaaaccatagcacttcrctttacagatcagccttttaagggaactacatctagacctgatgtgactcataaagtcctgtaat

SEQ ID NO: 61760 - DNA, 873 bp, Homo sapiens
ctgtcgctagttcccactatgatttggcttggactcgatttccactgctaacattagcccctctcacttctcaacacacatacttagtcaagagtttccaaaagtcacataatgtgaagttgcagttggttagccatttgtggccctaaaccttcaatggaggggatgctcctgagtcaggtacagtattgaaataaggcaaaycaaaacaggaaacctcctcaggttctgtgactgggagcttcctctctagacctgaagactttctagactctcctgggccttgtaagctgtgcagaaaaatcagctattactcatctgttcctctttcagtccggggtcgagtcagagctgggaaccaacccaggtgttcattgctagacaatatcttacttttctttgacagaaaaatagtttactgaagcaccatagtgcttctattctttttatacttgtacactgttctggagaagattaacaaccccacaacccaagtcagtgagtcagtgaattcccagacctaaaaatacttagaaccagccggcaaggtcccactccttttcttcctgccaggttgtaagcattgacgttacagcactgggctatttcaggaactctcaaacattcaactttgacagaaacaagcaagaaagacatcagtgcacaataggaagaaaaaagtttctgtgatgttagaacaaatttgctagtacaaacccacagtgtatgttcctaagtcaaccatttgcgaaggctgacacttccagcggtggagaggttacagatgaatggagtgcagcctgactacaccttcactcctcctctggacactctcattcttctgggagtttgaagtcataagttcactcagac

SEQ ID NO: 61761 - DNA, 849 bp, Homo sapiens
ggataaaggggggggggatataacaacatttcattatttcaataaattgtacctctcagaattgtttcctctgaattcagaattccattagtattctagggcacgttctgccactccactcttatgaaagaggcactccacccagctgtatttctttttatctatgtctgtaaaatggtaaactccttgaaactatttccactgcagtctttgtacataaaacaataatttaacacttgctataattgctttaaaaatatgtgcacacacacgcgttggtcatttaattcttatttacccttaggtcaatcaagtaattggtataataactttaaaggtaaatcaaatcttattaacgctttctaagtactttaaaaatcttaagtcaatgagtatttgtgtgaagtactactactgggaagaaatgcagaaacattttaatatctggttcctgaaaaaggtttttcacttatttagagtctcaggaaactctgctggttttgattcttccaggaaataagactgtctgcagaaactgctagaggagtttaatatggtttggactgtgagttatcgatacattaatagctacagttcaaataataaactacccagaaactataacacgcaaggactatcttggatattaggatgcaagcctgctcggcctgcaggctgctcacagatttgctggggaaaaccatccacrtccccactgggaatgaacctgctgtgcagggaggtatgccctgcgctgaaatacctgatggtctggtctgaattttggaagcaccagagtgactttatgaccaggaccaaaggtcacataaatatcgattggcttaaaaa

SEQ ID NO: 61762 - DNA, 1253 bp, Homo sapiens
aactctcttgtcttgttggtaaaatggctcgttttgcttctggaattggacattcctcagtctactggcctcattcccatgggaggtgtctgcatgatgatctgtttcatgaggtaggttcccactttggagaagacatttaagacatttgagatgttaattcactttgtccatacctaccagttccggaccctgaccagataaaactttcaagaggtttccagagaagtttcccaggcctcttcccagccagcacaggactgggcactttcccataaatgcaccctgcccaaggaccactgtctccggggagccgcatcggcctcagcatttcctgtatcctttgcttcaccaggcttgatggatgacaacttatctgaactctgtgacactgagggagacctttgagataggctttgcccggcgagcaactgagcacagcctcacaccagccctgccaggagagacaatcttccacaaagccaaccagttacacttggccacacagctgttgcccacaaaaccttggcagccaccctttgcatggctaaagtcaccagtctctctgatggacagtccatttttgccattttgtaaacagcagagtccctgtacagacatgagaggttgaggaagcggtataggatcattgatgctggacagctaagctgctaagaccaccagcattggcaacaacaactcctgtgcttagcccagcaggggagcgtaggaatggcatggggagaaagtgggaaacctctctccctaccccagacatgctctgctgctgttcggaaattatggagaatttcaaaatagtggcagcagagcctacattaagcaggggacttataatttcataggctgcgacyccgggaagattgtctgctcagccctataccagctactttcaacccagcataaacatcccaggaaagaatattctctaggcttcatgggccatttctgaatccactggcacagagcccatgccctgtattgctctcctctcaacaagccctgccctccagccgtggtgcattcccatctctgcttcttcacttacccctggcttagaatgcaggtgtgacctcttggggccctctagacagatgcatattttctccctgcattccagcagaacatctgctggctgactcagagatgcctggtaatgatgggcagggtcccagagaccctcctgtccgaatcccagcatctgacaagtcacatcccttcatggtttcaatgca

SEQ ID NO: 61763 - DNA, 1253 bp, Homo sapiens
aactctcttgtcttgttggtaaaatggctcgttttgcttctggaattggacattcctcagtctactggcctcattcccatgggaggtgtctgcatgatgatctgtttcatgaggtaggttcccactttggagaagacatttaagacatttgagatgttaattcactttgtccatacctaccagttccggaccctgaccagataaaactttcaagaggtttccagagaagtttcccaggcctcttcccagccagcacaggactgggcactttcccataaatgcaccctgcccaaggaccactgtctccggggagccgcatcggcctcagcatttcctgtatcctttgcttcaccaggcttgatggatgacaacttatctgaactctgtgacactgagggagacctttgagataggctttgcccggcgagcaactgagcacagcctcacaccagccctgccaggagagacaatcttccacaaagccaaccagttacacttggccacacagctgttgcccacaaaaccttggcagccaccctttgcatggctaaagtcaccagtctctctgatggacagtccatttttgccattttgtaaacagcagagtccctgtacagacatgagaggttgaggaagcggtataggatcattgatgctggacagctaagctgctaagaccaccagcattggcaacaacaactcctgtgcttagcccagcaggggagcgtaggaatggcatggggagaaagtgggaaacctctctccctaccccagacatgctctgctgctgttcggaaattatggagaatttcaaaatagtggcagcagagcctacattaagcaggggacttataatttcataggctgcgactccgggaagattgtctgctcagccctataccagctacyttcaacccagcataaacatcccaggaaagaatattctctaggcttcatgggccatttctgaatccactggcacagagcccatgccctgtattgctctcctctcaacaagccctgccctccagccgtggtgcattcccatctctgcttcttcacttacccctggcttagaatgcaggtgtgacctcttggggccctctagacagatgcatattttctccctgcattccagcagaacatctgctggctgactcagagatgcctggtaatgatgggcagggtcccagagaccctcctgtccgaatcccagcatctgacaagtcacatcccttcatggtttcaatgca

SEQ ID NO: 61764 - DNA, 1253 bp, Homo sapiens
aactctcttgtcttgttggtaaaatggctcgttttgcttctggaattggacattcctcagtctactggcctcattcccatgggaggtgtctgcatgatgatctgtttcatgaggtaggttcccactttggagaagacatttaagacatttgagatgttaattcactttgtccatacctaccagttccggaccctgaccagataaaactttcaagaggtttccagagaagtttcccaggcctcttcccagccagcacaggactgggcactttcccataaatgcaccctgcccaaggaccactgtctccggggagccgcatcggcctcagcatttcctgtatcctttgcttcaccaggcttgatggatgacaacttatctgaactctgtgacactgagggagacctttgagataggctttgcccggcgagcaactgagcacagcctcacaccagccctgccaggagagacaatcttccacaaagccaaccagttacacttggccacacagctgttgcccacaaaaccttggcagccaccctttgcatggctaaagtcaccagtctctctgatggacagtccatttttgccattttgtaaacagcagagtccctgtacagacatgagaggttgaggaagcggtataggatcattgatgctggacagctaagctgctaagaccaccagcattggcaacaacaactcctgtgcttagcccagcaggggagcgtaggaatggcatggggagaaagtgggaaacctctctccctaccccagacatgctctgctgctgttcggaaattatggagaatttcaaaatagtggcagcagagcctacattaagcaggggacttataatttcataggctgcgactccgggaagattgtctgctcagccctataccagctactttcaacccagcataaacatcccaggaaagaatattctctaggcttcatgggccatttctgaatccactggcacagagcccatgccctgtattgctctcctctcaacaagccctgccctccagccgtggtgcattcccatctctgcttcttcacttaccyctggcttagaatgcaggtgtgacctcttggggccctctagacagatgcatattttctccctgcattccagcagaacatctgctggctgactcagagatgcctggtaatgatgggcagggtcccagagaccctcctgtccgaatcccagcatctgacaagtcacatcccttcatggtttcaatgca

SEQ ID NO: 61765 - DNA, 1253 bp, Homo sapiens
aactctcttgtcttgttggtaaaatggctcgttttgcttctggaattggacattcctcagtctactggcctcattcccatgggaggtgtctgcatgatgatctgtttcatgaggtaggttcccactttggagaagacatttaagacatttgagatgttaattcactttgtccatacctaccagttccggaccctgaccagataaaactttcaagaggtttccagagaagtttcccaggcctcttcccagccagcacaggactgggcactttcccataaatgcaccctgcccaaggaccactgtctccggggagccgcatcggcctcagcatttcctgtatcctttgcttcaccaggcttgatggatgacaacttatctgaactctgtgacactgagggagacctttgagataggctttgcccggcgagcaactgagcacagcctcacaccagccctgccaggagagacaatcttccacaaagccaaccagttacacttggccacacagctgttgcccacaaaaccttggcagccaccctttgcatggctaaagtcaccagtctctctgatggacagtccatttttgccattttgtaaacagcagagtccctgtacagacatgagaggttgaggaagcggtataggatcattgatgctggacagctaagctgctaagaccaccagcattggcaacaacaactcctgtgcttagcccagcaggggagcgtaggaatggcatggggagaaagtgggaaacctctctccctaccccagacatgctctgctgctgttcggaaattatggagaatttcaaaatagtggcagcagagcctacattaagcaggggacttataatttcataggctgcgactccgggaagattgtctgctcagccctataccagctactttcaacccagcataaacatcccaggaaagaatattctctaggcttcatgggccatttctgaatccactggcacagagcccatgccctgtattgctctcctctcaacaagccctgccctccagccgtggtgcattcccatctctgcttcttcacttacccctggcttagaatgcaggtgtgacctcttggggccctctagacagatgcatattytctccctgcattccagcagaacatctgctggctgactcagagatgcctggtaatgatgggcagggtcccagagaccctcctgtccgaatcccagcatctgacaagtcacatcccttcatggtttcaatgca

SEQ ID NO: 61766 - DNA, 932 bp, Homo sapiens
cattaaagaccttgtaaatcagacttgcctcctctgaaaaacaacaaaaagagtgtttagctagtcacagggaaaagataatggagttcagatcacagaatgagaggtctttgggtaacatatcttggagaactgccaaccctaattcaaagttttgcttattttgaccaggaatgagggttagcaattgtcaggtcatccattgtaccctacatggaatccaaagaaaataaagcaaaaattcaggagaacacattttttaaatctggttttctgtgaaaaataaataacagcttatcacaataggartgagtgcttctagagattttgattattttgaatccatggtctgaagtctttgcattccacaggaaagctcctacagattgtgaaatgttctaatttggtgtgacagaaccctgtatgggaagacctatcaaggagtattgtctggcttcttggcttacgttaaatatgtagatcattctttcctttctccaattctcctcattcctcgggctaatctcttctgactgcctcaaaaccatccagccctttaccagaacttctccagaagagatttgtcttagctgggctccctcaaatctccaatggtgctgggtgctctaaccattttcccacccccataatgttcacagactaaataaaatatagatcccttcccctcagattcatgcccagccctaggaaaaatgatgcttcaaacgctcctcctcctgggccatcccactgctatcacccaagtccaaggcctcttcatctctcacctactctcctaaagtagctttccatttggaatccccacatttcatttctcctatccaatatatcctctattcactttttattaagcttcttaaactcagctctcactatatcattgaactgcacagaacccttcctggactcaa

SEQ ID NO: 61767 - DNA, 510 bp, Homo sapiens
cagtttcagctttctacgtatggctagccagttttcccagcaccatttattaaatagggaatcctttccccattgcttgtttttctcaggtttgtcaaagatcagatagttgtagatatgcggcrttatttctgagggctctgttctgttccattgatctatatctctgttttggtaccagtaccatgctgttttgtttactgtagtcttgtagtatagtttgaagtcaggtagtgtgatgcctccagctttgttcttttggcttaggattgacttggcaaaatttaaatgagaaaatgtagattaaaaaatggttttggctggatgcagtggttcacacctgtaatcccagcactttgggaggccaaggcaggaggattacctgaggtcaggagttcgagactagcctggccaacatggtgaaaccccatctctactaaaaatacaaaaaattagccgagcatggtggtacacacctgtaatgtcagctactcaggaggctgaggcagg

SEQ ID NO: 61768 - DNA, 510 bp, Homo sapiens
cagtttcagctttctacgtatggctagccagttttcccagcaccatttattaaatagggaatcctttccccattgcttgtttttctcaggtttgtcaaagatcagatagttgtagatatgcggcattatttctgagggctctgttctgttccattgatctatatctctgttttggtaccagtaccatgctgttttgkttactgtagtcttgtagtatagtttgaagtcaggtagtgtgatgcctccagctttgttcttttggcttaggattgacttggcaaaatttaaatgagaaaatgtagattaaaaaatggttttggctggatgcagtggttcacacctgtaatcccagcactttgggaggccaaggcaggaggattacctgaggtcaggagttcgagactagcctggccaacatggtgaaaccccatctctactaaaaatacaaaaaattagccgagcatggtggtacacacctgtaatgtcagctactcaggaggctgaggcagg

SEQ ID NO: 61769 - DNA, 890 bp, Homo sapiens
taaagtgctgggattacaggtgtgagccaccttgccccaccatgtttaatatattttttaagccatcttataaagtagtatttgttaaaataatccataataatgagtggatggttgcttgggatggagtagaagtcaagtaaggggaaaaaaaaatatgggagtatggaacgtcaggtcccggtaattagagactaagaagttttttggcactttacatacacacacacacaagcttttcatccttccaattgaattagatttttaaaaaacattttgctaagcctttctatgcaaacagcattttgctctttgcttggagtaggagaaatcaagaaaagtgagaaaagatacctggcataaaaggacctcttttgtggttaagcatggtgacattatgaccgtgatcttgaagaatctgagaaacccggtccatcagtagataatggcttccacctaggaacaatgcacaacttcagttctggaatgatgagaatacagtgtctgaagtcagtagtgatcaatccaggagaggaaaggtaaggaaacagaagtggatagtgattggaggaagatgagttttgccagtctcctcatgtccctctgggtaaaacccagcccactcacccagagcatggccgcccatatttttacctgtggctctggtccgtgagagrttgcctcttgtgaatcacggtatccatgtcagtgtaatgagctactatgtgcttagccatgggagttcctcatcctgaggtacatgtatattttaactaaggccttatggagacacagagtccaaaagaaatcacggcattggtggaaatacaggtatggtgttgtacatatgagtgtgaatagttcctaaaaaacaatgagagctgtttctg

SEQ ID NO: 61770 - DNA, 890 bp, Homo sapiens
taaagtgctgggattacaggtgtgagccaccttgccccaccatgtttaatatattttttaagccatcttataaagtagtatttgttaaaataatccataataatgagtggatggttgcttgggatggagtagaagtcaagtaaggggaaaaaaaaatatgggagtatggaacgtcaggtcccggtaattagagactaagaagttttttggcactttacatacacacacacacaagcttttcatccttccaattgaattagatttttaaaaaacattttgctaagcctttctatgcaaacagcattttgctctttgcttggagtaggagaaatcaagaaaagtgagaaaagatacctggcataaaaggacctcttttgtggttaagcatggtgacattatgaccgtgatcttgaagaatctgagaaacccggtccatcagtagataatggcttccacctaggaacaatgcacaacttcagttctggaatgatgagaatacagtgtctgaagtcagtagtgatcaatccaggagaggaaaggtaaggaaacagaagtggatagtgattggaggaagatgagttttgccagtctcctcatgtccctctgggtaaaacccagcccactcacccagagcatggccgcccatatttttacctgtggctctggtccgtgagaggttgcctcttgtgaatcacggtatccatgtcagtgtaatgagctactatgtgcttagccatgggagttcctcatcctgaggtacatgtatattttaactaaggccttatggagacacagagtccaaaagaaatcacggcaytggtggaaatacaggtatggtgttgtacatatgagtgtgaatagttcctaaaaaacaatgagagctgtttctg

SEQ ID NO: 61771 - DNA, 1739 bp, Homo sapiens
catctcacaattaaagaaatgacaattaaaatagtgattttaaaatactatattcagcctagtgttaataaagacatggggaaatgcgccttttcttacactatttgagggagaaattatctggaacataacttggcgatgcataacaaaagtccttaaaatatccagtgctgactcagcaactttatttcaggattactttttttccctaggaaattgccaaagacagtagcacagaatcactaattatacattgttctagttgggaacacaaatgtgaaatcaagtttccaggactggaatcccagctgcaatacttatttttcactttaggtatattattttgtgcctcagttccctcatctgtaaaactgggggagaacaaaatacctaccccgtaaggttgttgaggcttaggtgaaataatgcatataaacatcttaaactcataatctgagacagcaaacactcaataaatttyacttattgttattagtgaaaactggtaacaacttaaatatctaacaattagaaaactttaaataaattgtagtttttccatattatacaacttctaaaaattatgatgtggatccatattctcatagaaaaatcatcacaatatattaagtgagaaaagcaggttagaagccagtacatttcatttttgcatttttatgaacatatgtaaatgtaataatattgggtatatatccaatattaagagtaacaatatagggtaatgagatgtggataacagttttgctggtggttttttgtattttataatgtttttttctttttttgtattttataatgtttcatcaatgaacataagtgatgtatgaaatacatgatttatttaaaaacaatccaaaataatgaacagaaaaatcaagaggtgtgaaataaatacagtggactttcattattaaaagtaattatgttctattaaaagccactacaaacactcaattaatgaatactgaaccattgctcctaaaggaaatagaagttaggttctttcaagcctctggtcacataagcctctggtatatatattgggagctcatccaaattcataagaaaaaaactaatactccaaaggatggctaggccaagggtgtgaacaagtcataacaggagaaacacaattagcaaataaacccatgagaaaaccttgagcccccagcctgggcaacatagtgaaaccccctcaacaaaatatatgtattttttaattagccaggcaaggtggagcatgcctgtactcctagctactcaggaggctgagggaggaggatcccttgagccccagaaggtcgaggctacagtgagccatgatggcacactgcactccaacccaggtgatagactgagactttgcctcaatacaaaacaaaaaccccaggcccattcatttattcatatccatccatttattcattcacacaggcatatataaggtacctccaaaagtcacagatacaaggcattacatcctattcctgggtaatttgggagacacatgctgaatccaggaagtatgcacacgtgggtgtggaggcctcggcctctcctgtctcctactgtgggtgggatacctccactcaccattacaccaaacatggcagtggttactcacttgccctggggcacccaaggaaggtgctgctgatggtgatcaccaactcggcaaacccttaggctctgggatgctgatccgctgtccatttcca

SEQ ID NO: 61772 - DNA, 586 bp, Homo sapiens
  misc_feature (1)...(586): n = A,T,C or G
gatcccacttcataataygggtagcatttacagtaggaagaggtcagattattctgtaaatttgctaaccgtattcatcacattcagggaaaaaaaatgttataaccaaagctttaaaaaaatttcagatgaatggtttaaatatttttaaatgaaaacataaaaataaaaccaccacatgtaggtgaatatttgtgtaatctcagagtagggatgcctttctaaacaggatttcaaaagtcaggaactataatggcaaagactaataaaatcaactacgaaaaaaacctacatgttaaaaaacaaatatgggaaaagattaataaaccctattacagtaaaataatttcttttatcaaaagacatcattaggctttagagagtgaaaagataaactacagagtaagagaagatatttgtatagcatataacggcaaagggctagtgtccagaatatgtaaagaactgctacaaataaataaagannnnnnnnnnnnnnnnnnnnnnnnnnnnnnnnnnnnnnnnnnnnnnnnnnnnnnnnnnnnnnnnnnnnnnnnnnnnnnnnnnnnnnnnnnnnnnnnnnnnt

SEQ ID NO: 61773 - DNA, 604 bp, Homo sapiens
tctcacctctgcctcctgagtcactgagactataggcatacatcaccatgcctggccaatttttaaatttttttttagagatgggatctttctatgttgctcgggctggtctcaaactcttggcctcaagtgatcctcctgccttggcctcctaaagcgctgggattacaggtgtgagccaccatgcctgatgcattctcctaaattatgttctggattatatatcctccttccaaaggtacattattatgctaatattagttacattgcatattgcttactattagctaatagaccaaacattttaataaatactgctgtttttatagaaatcacacrgtgagtagaatagcatgctaattttttgtttggtttttgcctgctaacttttgaccccactataggaagttttcccatttggaccatatctctagcttaagtgccatcattgatccgctggaagttacccaaatttcaggcatgaaccctggaaagaaagaaatggcttatgcatataaaccttgtcaaatttgatctataatgtggccagtgttagtccctaaggccttgctgagaattattcatctctaaggctttgctgaga

SEQ ID NO: 61774 - DNA, 2162 bp, Homo sapiens
cagggctgcaggggcctgtggtgtggaaggaggcaaaagagaacggtatttctgaaaatatatttggtaaccaataaatctcagttataagccaaagcactaacatgtattctattttaaaaacactttaacaaaacaaaaaccttatgaagttgaaaattatcaactttctagctaaatgacactcatactcagatattttacaagacatagccaagcactttgacaacctgacaaagtgaaatttcagaagcaaaaatgaaaaactttactgaatatccccaagtgatctaggacttagattattccccttcatgttggatacgctggcaaatcaggtaagatgcaggccatgggacctgacgtcacttgagtgttggccacttggccagataagcaaaggtgacttttctttcttccttggcggcaggccgaggggagagaatatctgttaaaagttaaaaaagctttctcctcacatctataataaatactttcagaattaacatttttattgaaacacacatctagactaaattggaaaatacgagttttacttttaagtgggaacgctatctttaaacattatgtgaagaaatctgtgccgaaaatgcccactccataattgatttgcataaaggtcagattatggtacttagaatattcaatcggaacttcaccagtaaaaacaaaagcatggaaaacccccaaaacgtgacaagtaccttgtgtattaattacagctacacattttgataacgcttattgtataccaatccagaaacaagtgaaattacacgtgtactgtgagagctctcaacagcaaagacaactagaattctctcatatataatcaaatataacttgttaaggatttcactcaaaatgtgcaatagggaaacccggatatttgatattttcataccctgaagaaaataaaatgaaaattatcttaattagtttcaaaaattttgtttgttctgaattgacatcgatttctagaatcttttctggggtgattataatgtatctatagtaactaaaactagattagttattagttagcaacttaatttaggggcaatgcaggtttgtttcatattctgaacatattttcccccttcttaatttggcatctaaagttattacatgatctgcagtatgcattaaaacacatcagcacagatagggtgctatgcatgtgtgttagctatttgccctaaatgagaaaatccattctaggagtaatgagctagcacttaatccaaaggccagatggccaccttaaatgctttagctatcttaatctccaaaccaaaccagaagctttgttgttagtaaaatgagttttcacatgcactaagtggcctcattacttagtataatggatattagaaatcactagggtaacatgagtggcattaagccatggactgattagaaagagatatatattaacttcaaatagagccttaaaaaaagataaatacataaataaaaacaaagaaagatatatatagaccctccccaatccggggtcaagggaacaagtgttgagactccagcaagtccaggaggctgtattgttgggggtgctcctagagcttgatactaaatggctgtgtgcagccagtgatctggaagatgctggttgcctggtgcagaccatattctgtcactgatactgtcacatttgcctcagtaaatctttcaggtaaacgtttggttagagaaattaaacagagctgggctgcatgcaacttacaaaactgttttcagcaactgccttttgataaatagatatgagggtgcagaatccggacgtgctttcattataacctggtcgccaaactgtaaggaggatgcctagagcccttacctagctttaactgctggaggatacttatctaccaagaggtacataatagttggaaattgccagcctggcttaagtcaacttgkaaaaaaaaaaaaaaaagagagagagaaagaaaataaaaggaaagaaaagaaggatttgtggaaatagagaaagtgattctaactaaaactctgtgagggaagatgtacctgctgatccaaacaatcattttgaaattgaagtccctgtttttaaagtttcattatgagagattctttttacataaatctcctccatctgg

SEQ ID NO: 61775 - DNA, 796 bp, Homo sapiens
atgaacctggaggcagagcttgcagtgagccaagatggcactactgcactccagcctgggtgacagagtgagactccgtctcaaaaaaatatagatagatagatagatagatagatagatagatagatagatagatagagtgaactaaaagctcagaaagaaatttttaatataataacacaagaaagcacagaaataagtctatttcataatgccttttcagtataaaagcattcctactackccacatcctctcctgcatctgttgtttcctgactttttaatgattgccattctaactggcatgagatggtatctcattgtggttttgatttgcatgtctctgatgaccagttatgatgagcattttttcatatgtctgttggctgcataaatgtcttctgtagagaagtgtctgctcatatcctttgcccactttttgatggggttgtttgtttttttcttgtaaatttgtttaagttctttgtagattctggatattagccctttgtcagatggatagattgcaaaaattttcttccattctgtaggttgcctgttcactctgatgatagtttccttggcagtgcagaagctctttagtttaattagatcccatttgtcaattttggcttttgttgccatagcttttggtgttttagtcataaagtctttgcccatgcctatatcgtgaatggtattgcctaggttttcttctagggtgtttacggctttaggccttacatttaagtctttattacatcttgagttaatttttgtgtaaggtgtaaggaag

SEQ ID NO: 61776 - DNA, 796 bp, Homo sapiens
atgaacctggaggcagagcttgcagtgagccaagatggcactactgcactccagcctgggtgacagagtgagactccgtctcaaaaaaatatagatagatagatagatagatagatagatagatagatagatagatagagtgaactaaaagctcagaaagaaatttttaatataataacacaagaaagcacagaaataagtctatttcataatgccttttcagtataaaagcattcctactacgccrcatcctctcctgcatctgttgtttcctgactttttaatgattgccattctaactggcatgagatggtatctcattgtggttttgatttgcatgtctctgatgaccagttatgatgagcattttttcatatgtctgttggctgcataaatgtcttctgtagagaagtgtctgctcatatcctttgcccactttttgatggggttgtttgtttttttcttgtaaatttgtttaagttctttgtagattctggatattagccctttgtcagatggatagattgcaaaaattttcttccattctgtaggttgcctgttcactctgatgatagtttccttggcagtgcagaagctctttagtttaattagatcccatttgtcaattttggcttttgttgccatagcttttggtgttttagtcataaagtctttgcccatgcctatatcgtgaatggtattgcctaggttttcttctagggtgtttacggctttaggccttacatttaagtctttattacatcttgagttaatttttgtgtaaggtgtaaggaag

SEQ ID NO: 61777 - DNA, 1318 bp, Homo sapiens
tgcattgtaagagatacattttgcggattgcagtgagacttattaaagaaattcagaagctttaccatcttacttggggaatgattttatcttcaggattgtcttttctattagattttgaattttaaggaaattaaggaattacaaaatccttcaactatgaagcctctatagaaaatagtcccataggagtgtttaagcatgatcactgttatcatatatatatatgtgtgtgtatatatatacgtgtgtgtgtatatatatatcactcactgctaaaatcataaaatgcttatctgtggtcagtgtttcttgagaataacttgaaaatcaaataagagacacctctgtcatggccatctgataacacaggttgggctcattggttcttaaatgatcttcccttggggcctaacccagcagaggcatctaagacccagcagaggcatctcactgtaaaattagcttgatattcaaatagacaaatcaagcttttaattgttttccactttggaatgtattaacacttaggaaaagtatgctttagatggatatattactggtacttaggaaacacacacaaagatacacacacagtacacatatgtatgcctggtgtgctttcactttgccttcacttccctgaatggctggagagagtggctgagccccctatcctgttgaagggtctcccttctctcttgtgctctgctaaccatccttcctcccctcatgtaattatgtatttttctctgccatctagatgcagactccttttcttcagttggtcacatattggtagatttgttgtctgctttccagacaaatagtgctgtagtgagagccagggccatacaagcctggagctgaagcattttaactaaaaaaaaaattgtcgaaaggatcttaatcagatgagaaaaaaatggtgagcattatcccctaagctttcagaaagataaatacttagtgttggaaatatataaacaggttggggatcatcactggctctggagacaacgaagaccatgatcattaatgtttaaagggcagttctattttcttagtaatatggtggtttgaatggggaacacaattattcagtccagtggttctcaaactataaaagtgcatgtccatgaacatgtcawaccttccaaccagttttggatatgtactcagatttggacataaacttcatacatactgcttcaaaatcctgccacaccacacctctcaagaatcattaatatacacttttgttcacttttcaaatacaagtcacaattaaacatgtttgtccaagccacaagtgttc

SEQ ID NO: 61778 - DNA, 979 bp, Homo sapiens
cattcacatgtatacacttaaattataatggtatttaaaaacatgatggtttaagtgaaaggataatgtctattctttatgaattaaatataattatgtatgatagcagaaatgtgaaaatgtctataatagaagttgttgacatttacataatgaacgtatacaaaaatggatttgaaagccatagaaataaaatagtcataaaattattttcataatgtacataatgaagtattttcaagagattattcctctgcgtctgtcttaaacttgggtaaataacggaatggtgtttaagcaaatatcgctctctttatggattgttactcagagtgaatgtttgagtgtatggatactccattctccatgatgtgcttatttcacattgtatgcctgtatcaaaacatctcatgtaccccataaatatatacacatactatgtacccacaaaaatttaaaaaataatttaaaaaaattaaaaatagataatgatgatattyctgaagctaacttaagactgtaagtctgcctcaactaatcatattattttatattatctggaaactattaatatatctagtttagaacctagtcccttttgtctcacatgatcaatgattgaaaaggaatctttgaaaatatataaatattgagtaatttagtaattaacaggtaatttttatacacaagtatatttgttatgggcaagagaagcataagtcctagtatacattgaaggatttatattcttataagaatataaaataatataaatataaaaagaatattagaaaaatgatttaaatatatccttcttctattccttttcttatattttatctttcttgttttatattttatcaagcttctctcaattttcataaatccaaagccatcacattttacctggttcagctgtattatttcttctaactaaattcctttaataggatgagtttgcttgggaatgcagaagtct

SEQ ID NO: 61779 - DNA, 979 bp, Homo sapiens
cattcacatgtatacacttaaattataatggtatttaaaaacatgatggtttaagtgaaaggataatgtctattctttatgaattaaatataattatgtatgatagcagaaatgtgaaaatgtctataatagaagttgttgacatttacataatgaacgtatacaaaaatggatttgaaagccatagaaataaaatagtcataaaattattttcataatgtacataatgaagtattttcaagagattattcctctgcgtctgtcttaaacttgggtaaataacggaatggtgtttaagcaaatatcgctctctttatggattgttactcagagtgaatgtttgagtgtatggatactccattctccatgatgtgcttatttcacattgtatgcctgtatcaaaacatctcatgtaccccataaatatatacacatactatgtacccacaaaaatttaaaaaataatttaaaaaaattaaaaatagataatgatgatatttctgaagmtaacttaagactgtaagtctgcctcaactaatcatattattttatattatctggaaactattaatatatctagtttagaacctagtcccttttgtctcacatgatcaatgattgaaaaggaatctttgaaaatatataaatattgagtaatttagtaattaacaggtaatttttatacacaagtatatttgttatgggcaagagaagcataagtcctagtatacattgaaggatttatattcttataagaatataaaataatataaatataaaaagaatattagaaaaatgatttaaatatatccttcttctattccttttcttatattttatctttcttgttttatattttatcaagcttctctcaattttcataaatccaaagccatcacattttacctggttcagctgtattatttcttctaactaaattcctttaataggatgagtttgcttgggaatgcagaagtct

SEQ ID NO: 61780 - DNA, 565 bp, Homo sapiens
actaagaaaggcagatttatattagaaatttgtccaaggtatctagaaacctagccgtggtagggggacattctcttaatggaatatgaattcacttatacttttaaaaaatacatatatgtagtttgacgggaaatgtctgaagaaagagaaatttcaatatcacaaacattcrtttttctatcttctcaccatagcaacttgacaaaacacctgccctgttttcaatcatgatttttttgctctgtgaaagtgaggtaagagagctttagcaaatcatgtggagattgctttttatctgcagggattgggatgaaagaccactgtaacagctcatttttatgagcatacacggtcttttaagcaagcacccgttttcacttctttgccttctaatttggatcatttcacagcactcaaagagttacctgtgtaagccttcccttatctagaaatggttgccactaatgtcatgaataggccaatagtctcctatagcctacaacaaacaccccacctctaaggaaatgaattacccccaaattagtgcaatgttttcattttt

SEQ ID NO: 61781 - DNA, 882 bp, Homo sapiens
attagaaaaatatagtctttaagactttcttgacatttataccaaaatagcaatgtagctgaaatcaaatgggaacatttagaaagctagaatgataattgcaaaaaaaagggagggagtgaaatgattttcactgcttttgttaaaaagtttgtacttgtcatactatgccacatcttatttttgaaatgcaacaaaagttgtcgccagtttgatctctcagatggtgtggctgccaattccttccccagcaccctgccacttggcttgtttccagtgatgccatatgtagttttccctttcctcctcccttctaaatagagaggaaaacatgtccattatggcattagcttgcaagctgtaaaattggaattaaaattcaagacatgaatgtcttaaactcagagggccaattgcattcacaattcctcaagtttccatttcaaagaatataactttatctttaaatgtgatagtctcaaagcttataaaagaatgtagtctgggttctagctgaaattgaagtaatttttctttaycaatttttggcttatattttattttctaatagatgtcttaaaagtgaaatgtaattgttctcttcagtgacttctaatttctcaagttttttttcctttttaaatatattatccatttaccagatgatttttatccggtagattttataactgataagatttctcagtatgtgaaatttagagaaggaattcaagctttctataccttgatacatccgtctctttcctctggtgaactgaagacacattacctgcattaggagacaatagtgcttggtttttgtttctaaccttgtcatttaatcttccatgttagtaggcaatccacctattctatctatgc

SEQ ID NO: 61782 - DNA, 882 bp, Homo sapiens
attagaaaaatatagtctttaagactttcttgacatttataccaaaatagcaatgtagctgaaatcaaatgggaacatttagaaagctagaatgataattgcaaaaaaaagggagggagtgaaatgattttcactgcttttgttaaaaagtttgtacttgtcatactatgccacatcttatttttgaaatgcaacaaaagttgtcgccagtttgatctctcagatggtgtggctgccaattccttccccagcaccctgccacttggcttgtttccagtgatgccatatgtagttttccctttcctcctcccttctaaatagagaggaaaacatgtccattatggcattagcttgcaagctgtaaaattggaattaaaattcaagacatgaatgtcttaaactcagagggccaattgcattcacaattcctcaagtttccatttcaaagaatataactttatctttaaatgtgatagtctcaaagcttataaaagaatgtagtctgggttctagctgaaattgaagtaatttttctttatcaatttttggcttatattttattttctaatagatgtcttaaaagtgaaatgtaattgttctcttcagtgacttctaatttctcaagttttttttcctttttaaatatattatccatttaccagatgatttttatccggtagattttataactgwtaagatttctcagtatgtgaaatttagagaaggaattcaagctttctataccttgatacatccgtctctttcctctggtgaactgaagacacattacctgcattaggagacaatagtgcttggtttttgtttctaaccttgtcatttaatcttccatgttagtaggcaatccacctattctatctatgc

SEQ ID NO: 61783 - DNA, 882 bp, Homo sapiens
attagaaaaatatagtctttaagactttcttgacatttataccaaaatagcaatgtagctgaaatcaaatgggaacatttagaaagctagaatgataattgcaaaaaaaagggagggagtgaaatgattttcactgcttttgttaaaaagtttgtacttgtcatactatgccacatcttatttttgaaatgcaacaaaagttgtcgccagtttgatctctcagatggtgtggctgccaattccttccccagcaccctgccacttggcttgtttccagtgatgccatatgtagttttccctttcctcctcccttctaaatagagaggaaaacatgtccattatggcattagcttgcaagctgtaaaattggaattaaaattcaagacatgaatgtcttaaactcagagggccaattgcattcacaattcctcaagtttccatttcaaagaatataactttatctttaaatgtgatagtctcaaagcttataaaagaatgtagtctgggttctagctgaaattgaagtaatttttctttatcaatttttggcttatattttattttctaatagatgtcttaaaagtgaaatgtaattgttctcttcagtgacttctaatttctcaagttttttttcctttttaaatatattatccatttaccagatgatttttatccggtagattttataactgataagatttctcagtatgtgaaatttagagaaggaattcaagctttctataccttgatacatycgtctctttcctctggtgaactgaagacacattacctgcattaggagacaatagtgcttggtttttgtttctaaccttgtcatttaatcttccatgttagtaggcaatccacctattctatctatgc

SEQ ID NO: 61784 - DNA, 410 bp, Homo sapiens
aaacaaaaattgccagtatcaggaatgaaaaagagtacatcattccaaatcttacaggctttaaacaacaagagaatattacgaatgactttataccaatacattttgtaatttagataaaatgaacaaattccctggaaaatacaatttatcaaaaccaacacaagaaggaaatctgaattgtattagagacattaaagaaattgrgtctgtagtaaatatgcaagactgctggttgggaacgaagggaacatggaatggatagaagaaaaaagttacggccgggcatggtggctcacgcttgtagtcccagcactttgggaggctgtggcgggcgtttcacgaggtcaggacttcgtgaccttgctggctttcacgggttatccccgtctcttctgctaatactaaaa

SEQ ID NO: 61785 - DNA, 625 bp, Homo sapiens
atgagttttttaaagtgtagcctcaaaattctccttacctctgaatctatttcctctgatccctgcctcctaggtactaatgcttcagactttcacttcctctcccaagtattagagaagcttgtatctccaaagggatctaaggaagcgctacgctgtgtccttaggcatctaggctatgaacccagggagtcttgtccctggtgcccctcccaatatatagctcttgacatgggcagttatgtgggacccgtttcccaccacccttgccaggaycccaagtttgtaaatggctaggattcctctcccattgtgtaagatgctctcctcccccaatttctacccagcttcccccactgcaatacaatctccaagcctcggctccttggccagggccttagaactgatgacccagtactttaacaactggaactgggtctatgacaacataatagatcaggatgaaagcgaattgagtaaattaaagggaggcacacattcctatagtggcaaatgggggcaacaagctaacgtccttccaccgtgttcccaaaatccatctaccaaaagagagagagggaaagagagaaaagggaaagagagagagaggaaaagagagaaagag

SEQ ID NO: 61786 - DNA, 625 bp, Homo sapiens
atgagttttttaaagtgtagcctcaaaattctccttacctctgaatctatttcctctgatccctgcctcctaggtactaatgcttcagactttcacttcctctcccaagtattagagaagcttgtatctccaaagggatctaaggaagcgctacgctgtgtccttaggcatctaggctatgaacccagggagtcttgtccctggtgcccctcccaatatatagctcttgacatgggcagttatgtgggacccgtttcccaccacccttgccaggaccccaagtttgtaaatggctaggattcctctcccattgtgtaagatgctctcctcccccaatttctacccagcttcccccactgcaatacaatctccaagcctcggctccttggccagggccttagaactgatgacccagtactttaacaactggaactgrgtctatgacaacataatagatcaggatgaaagcgaattgagtaaattaaagggaggcacacattcctatagtggcaaatgggggcaacaagctaacgtccttccaccgtgttcccaaaatccatctaccaaaagagagagagggaaagagagaaaagggaaagagagagagaggaaaagagagaaagag

SEQ ID NO: 61787 - DNA, 561 bp, Homo sapiens
atctaatatggttcttcaaatgaatcatgtacagtttataaacttacagtaataatattcaaagaatgtttcactcaaatagaacaaatatttctttgttaggtaaaaccgtttaacctaagactttttgtcactcttaggactgtattacatcaaagccgtttcagatggcagatcattgtttagcttttggtggtcaatgattataagtggatggatttgtggaaaaaccccagtttgaattaaacctaacatcctttgtttcttaggataatatttgttttaatggtctgaatctttaaaaaacccatattattaatatattacatatattatttttgtaaccttttttatgaacaattgaactgataaataagtgaactttatacacttctttgcttaaattttgacaaccccaatcaccggcaaaataaacaactttgttttaataagtttgtttaaggctcatttttaataaatgaaatccacatacagtatcatgtgatgtagactgcaattttgctattagataamtggggaaaggaactatataaaggttat

SEQ ID NO: 61788 - DNA, 649 bp, Homo sapiens
cttccttacaccttatacaaaaattaattcaagatggattagagacttaaacgttagacctaaaaccataaaaaccctagaagaaaacctaggcattactgttcaggacataggcatgggcaaggacttcatgtctaaaacaccaaaagcatggcaacaaaagccaaaactgaaaaatgggatctaattaaactaaagaacttctgcacagcaaaagaaactaccatcagagtgaacaggcaacctacaaaatgggagaaaattttcrcaacctactcatctgacaaagggctaatatccagaatctacaatgaactcaaaaaatttacaagagaaaaaacaaacccgcttggagttggcgtgtagcgttaaaagctaaactccaaaggcttttggggctctattgctcttggggacacattgaaataaagaaatgtagagggcactcagagactggactgtgttagctgggaaggatcacagtctgccaggaaatcagttctcaccttccaatgggacaggatttgagggtgggagttggggtaggagaaagggagcagagaggaaaaatttgtaactgtcatgcaaaaggccagttaagagaatctcaactactctgggcaccaaagagcagcttttagtagatagt

SEQ ID NO: 61789 - DNA, 649 bp, Homo sapiens
cttccttacaccttatacaaaaattaattcaagatggattagagacttaaacgttagacctaaaaccataaaaaccctagaagaaaacctaggcattactgttcaggacataggcatgggcaaggacttcatgtctaaaacaccaaaagcatggcaacaaaagccaaaactgaaaaatgggatctaattaaactaaagaacttctgcacagcaaaagaaactaccatcagagtgaacaggcaacctacaaaatgggagaaaattttcacaacctactcatctgacaaagggctaatatccagaatctacaatgaactcaaaaaatttacaagagaaaaaacaaacccgcttggagttggcgtgtagygttaaaagctaaactccaaaggcttttggggctctattgctcttggggacacattgaaataaagaaatgtagagggcactcagagactggactgtgttagctgggaaggatcacagtctgccaggaaatcagttctcaccttccaatgggacaggatttgagggtgggagttggggtaggagaaagggagcagagaggaaaaatttgtaactgtcatgcaaaaggccagttaagagaatctcaactactctgggcaccaaagagcagcttttagtagatagt

SEQ ID NO: 61790 - DNA, 676 bp, Homo sapiens
cctcagggctgggctaaggttaaaattctccaaactagtaagtggttgtaagtaacctttgtgataacagaagaacacagaggcctgcatgactgcatgattctaaataaaaattgaaccatatgacagcattcagctatatactaaagcaaccatatttcacaagagatgaagacactgaagattttttttttttccccacattctggctaaaatatccctcaaggctttcaaattccctttgctctgagttcaggccccccaagcagttctgattaccaactcaatttcctcaataccttgatatttaggtagctgttataatctagacagcagacacaaacaattccagtaagtgaaaaggagtatctctcctcaactgtcattctatcataatcaatttctgagtttgatgactatgaatacatcccttatgagctgactagcttaaagtgttctgacaaatccagaactgaaccaacaaaactcatgcccagactctaaaaggccttgtgctccccatggttttgtcacctaataatcactttcagcactgtatagctatcttctcagacacctttttaaaaacaaaatacctatacttaataagtaccattaacagcaaaaaayatatctttaaaaattataggtacactgaacaaattccttttgaaat

SEQ ID NO: 61791 - DNA, 546 bp, Homo sapiens
tgacttaaagaccccgggcaaatgtacaaaatactcatttgaattgcagattgaatccatcagctaaagttacatattttttaagtcaaatttgaactcccaagccattaattcatagtcttctgcagagtatatgaattagcctatcacaaagataataatataacattattgaacaacataaaataacttccttttattttcccataatgtctgagttccaggtttcctggctctctcataatgcctgatggtgcyagagggcaaatacgtgtgaattgcagttgcaatatgaaaagtgactctggaaaaggcgtgttgggactttcaagctgattcctgtcgatagcctctatatcaaactgcctcagagtttagatcaagcaatgcttttcgtagatgccggcattgtcaggtcaacacaagatctaaacactgagatgcatctactctgtctcttaaatcagccccaataacaataatcctccaaggcagggtggtggtgaggtgggaactgatctgattttgcttcatcataagtgtgta

SEQ ID NO: 61792 - DNA, 546 bp, Homo sapiens
tgacttaaagaccccgggcaaatgtacaaaatactcatttgaattgcagattgaatccatcagctaaagttacatattttttaagtcaaatttgaactcccaagccattaattcatagtcttctgcagagtatatgaattagcctatcacaaagataataatataacattattgaacaacataaaataacttccttttattttcccataatgtctgagttccaggtttcctggctctctcataatgcctgatggtgccagagggcaaatacgtgtgaattgcagttgcaatatgaaaagtgactctggaaaaggcgtgttgggactttcaagctgattcctgtcgatagcctctatatcaaactgcctcagagtttagatcaagcaatgcttttcgtagatgccggcattgtcaggtcaacacaagatctaaacactgagatgcatstactctgtctcttaaatcagccccaataacaataatcctccaaggcagggtggtggtgaggtgggaactgatctgattttgcttcatcataagtgtgta

SEQ ID NO: 61793 - DNA, 546 bp, Homo sapiens
tgacttaaagaccccgggcaaatgtacaaaatactcatttgaattgcagattgaatccatcagctaaagttacatattttttaagtcaaatttgaactcccaagccattaattcatagtcttctgcagagtatatgaattagcctatcacaaagataataatataacattattgaacaacataaaataacttccttttattttcccataatgtctgagttccaggtttcctggctctctcataatgcctgatggtgccagagggcaaatacgtgtgaattgcagttgcaatatgaaaagtgactctggaaaaggcgtgttgggactttcaagctgattcctgtcgatagcctctatatcaaactgcctcagagtttagatcaagcaatgcttttcgtagatgccggcattgtcaggtcaacacaagatctaaacactgagatgcatctactctgtctcttaaatcagccccaataacaataatcctccaaggcagggtggtggtgaggkgggaactgatctgattttgcttcatcataagtgtgta

SEQ ID NO: 61794 - DNA, 643 bp, Homo sapiens
tctctctcagtccatcagctattcagggtcaattaatgtgtgtttaccttgcttaacagaaactgttctcaggcaagagacactgcttgctttcaacatgaagtgtaaatcagaggctgcgatgaaccatacaaagaaagcaactcaataatactatctaatggaaagctcaaggttctaatcccagctgtcttgcagaagggcatttaattgttctaactgtgatttcctcatctgaaaaatagagattggattagatgacctctaatattggttcaaaatagtctgtgtattttattagtttcaggaatctcaaagtggatttgttaacaaggatgttttaacttaagatgtttgtggatttggggatatgtctagtacccctgcttttttatatactaatggtgtctaattattttgtatattaattaaatatttttgaagcaattattatctttcaggcagtccattacacagtggaaatataacagttaaagaaaagtgataaataccctgctctcaaaaaaaaaagatgatcattcatttttccaatgaaaagataccaatctggggagtaaattgaatrtatatataaacttttgggctaatagagaagaaagccagttgtctattcatggtattt

SEQ ID NO: 61795 - DNA, 911 bp, Homo sapiens
tcaaattgatttcgctcttttttttaaacactattcatggctcagaaacactcctggtttattttgctttatatttagtcctgagattcgtattctggttttccctccaacttgaagttccttcctaccttcctttatccttcctttttttcctcccttttcttgttagtaaaattctattacgtcyttgccatatctccaaaattatccagtctgtcaataattccagctattggggagcatccagtttcttttttttttttttttttttaagatggagtctcagtctgtcgcccaggatggagtacaatggcgcaatctcagctcactgcaacctccacctcccaggttcaagcgattctcctgcctcagcctcccaagtagctgggatttacaggcacctgccaccacacccggctaatttttttatttttagtagagatggggtttcaccatattggccaagctggtctcgaacttctgaccttgtgatccacccacctcggcctcccaaagtgctgggattacaggtgtgagccaggtgcctggccccaatttgcttactggaaaaaaactttcctggaacctcccaagtttttttctccatctcagtccatctgcttcctgggttctatcctggaacctcactagtttctactctatgaagaacaaagcatagagtggagccctaagtggagtatctgtttggagaacaaatacatgctcaattcagttctttgcttaggctccccctctcactctcaacctctattctcccagacctctagtctagggtatgtcctgagctcttcccaggagacaagttcccacaccatgacatctcttctttagcatattctgggctggggatgtttctgttgtatccatccatgtactttcatctgacgttc

SEQ ID NO: 61796 - DNA, 754 bp, Homo sapiens
tccaattcaaagaagttgatgaaatggagcttggccagagtttagagaaagcttcagggatagttccatggctcttagagaagggataagagatgcccctggaaaactgatagaaatggagccttaggcaccttggggacactgttcatgctccattttacttatccatggaagagaaaatacagctaaagatgaacacttccctactgttactaggattcctgtagcccttggtgccatkatatgtagcatctttttccagtccttaattcaagctgctgcttgagtgatttacttaaaaacccaaacacagtcatgtcactgtccactctgtaaactctggttggctgccccctaactataaataaagcatcaatccctttaacatgacttataaggccctttatattctctccccaacctacctacccaggtctttccattgctttccaaaacatccaatgaaacagaagtatgaacatttctgatattcagaaaagcatacatcttctctcccaagcttcactgccttttcaatgtctctgcccatttcagtctctattttctctctctctttttatagtcttagtcttagagttatgttaatctcagtttcagttcattgcacactatcatctgtgccagaggttaccttcaactccccagccaccttgaataatgcagcattgagctctatgagaatttccctggaagatagacgctcagaagcttaaatgtggggcagagagcatgg

SEQ ID NO: 61797 - DNA, 535 bp, Homo sapiens
aaaataggcagaggccataagtagccatttgaaaaaagaaacagaatggacaaaattatgaaaagttcaacccctctagtaataaatgtaaattaaaacctcattttccacttagcagactaacaagtgtttatacgtatgattatacttgtgttggcgatagtatgagaaaatactatcgcgctgtttctggaaattggttcaacgaatgatgtaattggcttgtctggcaacaaatatcaaaaaaaaattttttttaatgcacttgccttttagcacagcaatcttaattctaggaaggtatctgagggaataggcaaacaaatgtccctgacccaccccaagaagaagtgtatctattggccgggcgcgctggctcacacctgtaatcccagcrctttgggaggccgaggcaggtggatcacgaggtcaggagacgagaccatcctggctaacacggtgaaaccccatctctactaaaaatacaaaaaattagccaggcgtggtggcgggcgcccgcagtcccagctactca

SEQ ID NO: 61798 - DNA, 590 bp, Homo sapiens
agtttaagatgttttgctatggtgactatgttgccaggcttttcagatcttgtaggatagcatccactactactccacatgggtttggaatgaaaaagtagctgaatagcataaatgaacataaaaataatttatttcataaaggtaatttccaaagtgacaattaagaaatggagagaagaaaaccctttcatattttattttcttatctggtttgtggaytgccaccctgctccaagccaaattattaattttctcatgcaactcaagttaaagtttctgttttagcctgtatcctgaggtcagttgttagtgcaattttaaaaacagtttttctcattttttcattctaaattggatgaacttgtttaggacatgctgaataaaacaacattggaggaaactattaaattcttagatagaaccttaaataaagtattatagggtactttaatggaaatgtaaattttctcttctttccagatatataaatagttggactatataaggagtttttcaaaaataatttatagcactagcaataattaattgaccatgatgattttactagttctagagctttgccagat

SEQ ID NO: 61799 - DNA, 780 bp, Homo sapiens
gcataaatttttggctacttgcccaggtcttcgactttaaattattataatagtatgtagacgaagctatttccagyggtagaagggctgatacttttgttaggcaccaaaaactttcctgggaaaacaggcgacaagagttcaaatgggataataggggacaagagtttggattggcttttgtttattctggagagtaattcacttttaccagagcatttcttggcagctgattctgttaggtgagaaagtggaccagcatgatgatattggatgtccatagaagaaaagaaagggtgagggttgaaggcatgaggcgaaaaggactgctggaaaggataaaagaaaggtgcagggattctgaaaataaacttgatgaagttgactaccacattttgcttactgtagctgttgtgtgattgatggaatttagctttgggtagtttggtagtgaataaatctggaagagaattggagtgaatcctcagcaatatagctggagatgtacacttccaagaggcatcatacctaaaccttaatgaagtcacaattaaacaagggatgcaatctctacaaattggtaggaggggcttatgaaggttgatgggacaccccggctggaggatttttagccttttattaaagcttccatttatggatatggaacttcttcaattaagtcatccatcttcttcagcactgtgttatcaaggtctctgctacacttgcttcactaatgcttcttaaggacatcacactctcaaggaggcagagctacct

SEQ ID NO: 61800 - DNA, 780 bp, Homo sapiens
gcataaatttttggctacttgcccaggtcttcgactttaaattattataatagtatgtagacgaagctatttccagcggtagaagggctgatacttttgttaggcaccaaaaactttcctgggaaaacaggcgacaagagttcaaatgggataataggggacaagagtttggattggcttttgtttattctggagagtaattcacttttaccagagcatttcttggcagctgattctgttaggtragaaagtggaccagcatgatgatattggatgtccatagaagaaaagaaagggtgagggttgaaggcatgaggcgaaaaggactgctggaaaggataaaagaaaggtgcagggattctgaaaataaacttgatgaagttgactaccacattttgcttactgtagctgttgtgtgattgatggaatttagctttgggtagtttggtagtgaataaatctggaagagaattggagtgaatcctcagcaatatagctggagatgtacacttccaagaggcatcatacctaaaccttaatgaagtcacaattaaacaagggatgcaatctctacaaattggtaggaggggcttatgaaggttgatgggacaccccggctggaggatttttagccttttattaaagcttccatttatggatatggaacttcttcaattaagtcatccatcttcttcagcactgtgttatcaaggtctctgctacacttgcttcactaatgcttcttaaggacatcacactctcaaggaggcagagctacct

SEQ ID NO: 61801 - DNA, 1036 bp, Homo sapiens
tctgacagttttgccaaagctgatttttctggaaggttcaatggtgctgggatacaaagtatttggttgggggtttgctagtgattttcaatcatgttgtcctcatcggtgcccagggataatgaataaatgtttgaatyggcagtaatgcaaatggtgcaactgacagtggggcacaactccctggagggacagggtggtagaagagactggaataagtaattgaaattattgtctacaaatgttggctaaagagggttcagtcttctattggtctctagtctttatcgagtcctctaattccagtgatggaatatcataataggcaagctgtttgtggatttccatgcttctctagactgactagcaggtagaagtgatggatgaaaatatgcagcaattcctatagggatcactcactaacgctgtacattcattcacgtattcatttattctgaagccttcattctttggggggaagacataataaaaagaaaaaattagattattattattattgtttttgagatggagtctcactctgtcgcccaggctggagtgcagtggcatgatctcactgcaacctccggctcccagattcaggcgattctcctgccttagactccctagtagctgggactacaggtttgtgccaccacacccactaattttttttgtattttttgtagagacagggtttcaccatgttggccaggttggtctcgaactcttgacctcaggtgatccacccgccttggcctcccacaatgctgggattataggagtgagccactgcacccagcctagataattattagaatgaaaacaaagcataaatttttgttcaataaatgcatgaagcaaacagtaaaacgcaagcttcatgaagacaggttgttctgttttgttttcctgtatctccagtgccaagaactgctggtatatagcagatgctccagaaatatgcattgggtgaagaaaacacataagtaagtacgtaaattcagataaagggttagagagtgatgagactggg

SEQ ID NO: 61802 - DNA, 1079 bp, Homo sapiens
gccacccagtttatggtacttttttatagcaactcaatcagcttaagacagtggtggaagagaaaggacagtcaggagtgtcttaatgttaacaagatggacatttctcccccacgccatatatcctccaatttaagaaaattgatagagagtgtgtaatatctgcgtggtagtttcaaaaaaaaaaaaaaaacaacaaaaaagaaaatgtggaaaggcattttttcatgtttttatcatcttcttcacttgctattttctcctaaattaaaccacgttggggaagtataatcaacaatatcttcactgtggaggggatttgaggtagaagaacttctagcaaacagggagaatgtttcgagggctttctggtgagtagtccattttcttgccagaaatgggkattttacggcaacaacaaactatttccattaaattacattatatgacattaaatatttttcttggaagatctaataaagtttaaaaaaggacataatattctttcaaactattttcaaaaggtgtttttacaattttctctgtgtgtgtgtgtgtgtgtgtgtgtgtgtgtctgtgtgtgtttgtgtgtgacggagtcttgctctgtcgcccaggcaggagtgcagtggcgtgatctcggctcactgcaacctctgcctgctgggttcaagcaactctcctgcctcagcctccggagtaactgggactacaggctcccgccaccacacccggttgatttttgtatttttagtaaagacggggtttcaccatgctggccaggctggtctcgaattcccgacctcgagtgatccgcctgcctcagcctcccaaatgctgggattacaagcgtgacccacgcgtgcccggcctaatttttttttctaaaataattttacagcagccattatagcaattatatcaaatggcaatattgcaacagcttaatcattcgtgtggcatttctaggtgttttgcagattagaacttgatatactaaaaaaaataagagcagaaaatatatactatgactcaaattctgagttttctaaatatttacttaccataattttgtatac

SEQ ID NO: 61803 - DNA, 766 bp, Homo sapiens
aagaagaatgaggcggcaattgaagggtgaggagggcagagaagaattttactgagtgatggaacagccctcagcagagaggggatgtggggacggttacctacctgaagtctggcggtttcttcccccagtgtggctgggtcctgggcttttatgggcacaggatgggtgaggggtgggccataggtagtattggaaaaggcaacattctattgrttaaaaagcattattcagaaacaaccaattgggaaagggcgggcaaacaggaatagaagttctcactccaggtcacgtttctcatccagaaccagcagcccagtctttcaggcttcaggctgtttttggtttgaaggtggggtttcactggggctctgctcctatctgtttaggtatttgtctgcctcctccctctctcagtagtggtgatggcagggagttctacgaattcccaaggacttgtactttcactttatgatgacctctgcctccagctcctgtgtgtggtggcatgagctgtctcttgttgtccctgtgtcaacctgtgtcttgacatacagccccttctctagtttccaccaaaacaaataaaattttttaaaaccacaagcaaacaaacaaatgaacaataaacaaaagcatattaataaataataaaaacaattccattcttgctaaacattcataaatgtttaagctctatgggagacttgaagagatcacaagaaagggatatattagcatgcagacatccatcatcttgttttcc

SEQ ID NO: 61804 - DNA, 766 bp, Homo sapiens
aagaagaatgaggcggcaattgaagggtgaggagggcagagaagaattttactgagtgatggaacagccctcagcagagaggggatgtggggacggttacctacctgaagtctggcggtttcttcccccagtgtggctgggtcctgggcttttatgggcacaggatgggtgaggggtgggccataggtagtattggaaaaggcaacattctattggttaaaaagcattattcagaaacaaccaattgggaaagggcgggcaaacaggaatagaagttctcactccaggtcacgtttytcatccagaaccagcagcccagtctttcaggcttcaggctgtttttggtttgaaggtggggtttcactggggctctgctcctatctgtttaggtatttgtctgcctcctccctctctcagtagtggtgatggcagggagttctacgaattcccaaggacttgtactttcactttatgatgacctctgcctccagctcctgtgtgtggtggcatgagctgtctcttgttgtccctgtgtcaacctgtgtcttgacatacagccccttctctagtttccaccaaaacaaataaaattttttaaaaccacaagcaaacaaacaaatgaacaataaacaaaagcatattaataaataataaaaacaattccattcttgctaaacattcataaatgtttaagctctatgggagacttgaagagatcacaagaaagggatatattagcatgcagacatccatcatcttgttttcc

SEQ ID NO: 61805 - DNA, 766 bp, Homo sapiens
aagaagaatgaggcggcaattgaagggtgaggagggcagagaagaattttactgagtgatggaacagccctcagcagagaggggatgtggggacggttacctacctgaagtctggcggtttcttcccccagtgtggctgggtcctgggcttttatgggcacaggatgggtgaggggtgggccataggtagtattggaaaaggcaacattctattggttaaaaagcattattcagaaacaaccaattgggaaagggcgggcaaacaggaatagaagttctcactccaggtcacgtttctcatccagaaccagcagcccagtctttcaggcttcaggctgtttttggtttgaaggtggggtttcactggggctctgctcctatctrtttaggtatttgtctgcctcctccctctctcagtagtggtgatggcagggagttctacgaattcccaaggacttgtactttcactttatgatgacctctgcctccagctcctgtgtgtggtggcatgagctgtctcttgttgtccctgtgtcaacctgtgtcttgacatacagccccttctctagtttccaccaaaacaaataaaattttttaaaaccacaagcaaacaaacaaatgaacaataaacaaaagcatattaataaataataaaaacaattccattcttgctaaacattcataaatgtttaagctctatgggagacttgaagagatcacaagaaagggatatattagcatgcagacatccatcatcttgttttcc

SEQ ID NO: 61806 - DNA, 1601 bp, Homo sapiens
  misc_feature (1)...(1601): n = A,T,C or G
tctgaagaaaaggcaccacatataaataaagtaaaagaattgggtgctgtggtgagctgccgagttccactctgatagctgattgtgcatgacccatgcttcccttcctggccataatttgtatgcaggtagaatccaaactatcaatttagatcgtgattaattataatatttgtatatactgtacttaaggacttgaaagatcacattagtgtatgaaatccatatatattgcagatttgtacattcagaaacataattaaaagcttagtatatacagatgctcctcagcttatgaaggggttatgtgctgataaactcattgtaagtcgaaaatactgtaagtcaaaaatgcatttaatgtacctaccaaacattgtagcttagcctaacctaccttaaacgtgctcacaatacttacattagccaaatttgggcaaaatcatctaacagcatcttttacaataaagtatcaaaatacctcatgtaattcatgaatacttcactgaaagtgaaaaacagaatggttatatgggcactcagtacagttgctaccaaatgcatgtcacttttgcagcattgtaaagtcaagaaattataagttgaaccatcgaaaggtggggaccatctgtatactttgtcctgacataccaaattcttgctgcttattcttggttacaatatttgaatgagagcataagtgtgatttcagttttaaagtgacctactaccaggcaaagggctaagggctaactggattaacagcttttagaaaattagagtggtacataccttttgagaamctttaatattaaacacacccagattagatatatgggtcattgttttccacagtgatcataaagaagtacttatgacttaaaaatctgaattgtccaaccatcattataactttttttttttttttttttgagatggagttttgctcttgttgcccaggctggagtgcaatggcgctatcttggctcaccacaacctccgcctcccgggttcaagtgattctcctgcctcagcatcccgagtagctgggattacaggcatgcactaccacacccggctaatttgtgtgtgtgtgtgtgtgtgtgtgtgtgtgtgtgtgtgtgtgtgtatttttagtagagacagggttttaccatactggacaggctggtctcaaactccaaaccttgtgatccgcccaccttggcctctcaaagtgctgggattacaggcgtgagccgctgtgcccggccattataactttttaagtacatcaaggagtctttcccaggagagatgaaaattcatttgattttttatatttcaaggtttagcagacaataaagataggcacccaccagttacataccgcagacttgtcaacatgcgtatgtattggaaatggtacatcctttggtgggttgaaaagggggttaagtaagagcaaggagcatacattcctgcaggcaacctcttcacagtcagagctggggctgctgcaggcaaccntggtgtccattacttggcatgatggttaaaggaattatttctttttcttttagagatgggggtctttctttattgcccaggctgaagtgcat

SEQ ID NO: 61807 - DNA, 697 bp, Homo sapiens
taaaagggaaataccaaaaaccaatcttaaaaaatgacaaaatatatgaacagtcaagtacaattaccttgaaatatgtgaaaatgtgcttatacactcattattaaaaaacaaaacagggccaggtgcggaggctcaagcctgtaatcccagcactttgggaggccgaggcaggtggattatgaggtcaagagagagagaccatcstggccaacatggtgaaacactgtctctactaaaaatacaaaaattagctgggtgtggtggcatgtgcctgtagtctcagctactcaggaggctgatgcaagagaatcgcttgaacgctggaggcagacgcagtgagccaagatcgtgccactacactccagcctcgtgatagagcaagactccatctcaaaaacaaacaaacaaacaaacataatataaataacatataatattttcacctctgtagttatttggaggcaatttggccaatctgaaattatttaaagtgtacaaaattttaacttcaaaattttctttctaacatttattataaatacagttacacaggcatataaagatataaaaataacattcttttcaaagtggtctttaatagcaaataggggacagaaaattattctacaattgtatatgtttatatatgttattttgaataaatagtttgatatataggaatgctatagacatg

SEQ ID NO: 61808 - DNA, 1342 bp, Homo sapiens
tgcataagcccagttacagttaagacattaactcttgcagattgcttgcttgtagtgctttaaaatatctgcaacattcagcaaatttgctagtacaatataatttgttaataagccttccatattgaaagaaaaaatagggtattataattttgaatatcacccatttaccatacaaaggattttttaaaaacacctactttccaaatacagattatttttatttaaaaatgtgttttcttgcaccatatacttaataactattaaaagacatttgyattgtcaatagatggcagcatagctctttaagagttcatggggaactacttaacagtttaagatcatagccattagccatgctaaaaatggtaatcttaataaagctttctcattgaacttttcttaatacttcattgcattgatgccacatatttccaaaaagaaaactgaaaagaatatgtaaactgtaaatattttatggttcagttttagttttttttttttatttaaggttatataattttggtgttgggggctgtcaggtgaaggaaaacactgttgacacattaatgtatgaatctttcactttactattagactttgaagtattaatttgacatataatatgtgaagttttaataatttatcaataatgtctcaatttaaagaacacttttaaccaacattttaataaattgttataaagaaaaaaatatttgaccatcaatctctcttttctagaaatataaagatttaattcatgagagtagaatctctttaaacactttagtgaatctgccttcggggaagatcctaaagaaagcaagacatactttcaaatctcttccataaaatcacacatggatcagataactctttgggaaaaatagtgttctttctggactatttgaattctatttagatggtctgagatgcctctaaagttgaagttggtagagctacaatattcctacagaaataaatgctggccataaagatataatgtgctgacagacataaaaagagaaatccaggaggcacagtaatttgtcttaattgacaaaggtttctgcccaggagctatcactataaaatataaaagagcatcaatcacatagtgcaaataagcaggttatagccttacggttagttttaataattctgagcaattcaaattatagcattgctttattaatattactaaagtaatctttgtcagtattaaagactcctgaaatttttctaattttttgttttcttacactttcttattcttcaaacagagaaaaacccaaatttatgagctctgttctgtttcactaagtctgtgacagagattttc

SEQ ID NO: 61809 - DNA, 1485 bp, Homo sapiens
  misc_feature (1)...(1485): n = A,T,C or G
caccaaaggagttggcttgatgagaaacccgggaatgctgtcttactcagccacaaactaacattgttaaagtaggcagatagccagacacaagcaggagagaggagaccctgagacaagggaggtctggaaaatctcacacctccgagatcacctgaaatatgcatgccgaatataagcagagaggaaggaaaacacctaagaaagaaatgcgccttaagatggccagtaatcattcacactgcagataacctgtcagaatgtagctagggtacatgttgataaggagaaagggcaaacgaggaagttcctaggaaatacataggcaataagtatagatttctgcactgtacaaccttcctggtatgacattaacgagcaatgcaaccatttggtagattcgtatccagcactggccagcacatgcacaccaactaattaattaccaagcttggnggtcggaactaggtggggacaaggaggggatttagacagaagtggaaaatctagacaaagaaaaaaggcagagacaagacagaggtgggaatttcaagaaacaatgcgacatcatgaaaactcaacaaggaacttttcgggctgctgctgctggctcatttctcttcagcatcccactctgtttcatgtcttcagagtgtactgtcgctctaaataaactctctgctctagattttctttcaataaattttctttttttggctaaatcagtcacttggatgattctttctccaagtgagactaagaatcacggattcctgcacttcccaatggcaaagtcagtgtcacagccttcacatcactgaaagccctacaaggtgggcatagaaggagcccatggatcctacagtgagaagagcctacagaggtctaaacttactactgtgtctattcaaagatccctcatatgtcagcagaaacaaaaccattcagcattttaagatattgagatactctgtgtctttagtgcacggcaaaagagaaaataatttaaatcaggactaacatattgtttatactgaaatttcatttgagcaacgatcaattttcactattttttatattttaggttatgtctttgaaagcagggatagtatgtcctgtttactgccaatctccaaatcctggaagatgtgcttgtcaaatattaaggacacaaaactgtatsttttatttatgaaaagtaaaccacaaatttatatgctctcttagataattgctaaagtcacaaaaacagcctagggattagtaggtggctttaccagtaacataattggagtatttgacaattttgtggacttactgctcaacacttaaatcaagttgcatgagaagaaaactaaaatgattagtgaatttgaagacgaaatacatgtaacaaataagaacatttttaaaactcatatctgtcatttcccagcttaaatcccttcattactactcctctttgaggtataatattttttacgt

SEQ ID NO: 61810 - DNA, 671 bp, Homo sapiens
agtttcacatatctactatcttgcctctattccaaatctccttgtccccaatattcccattttcctgtttctggccccctgaccattcaactaggccatttaacacagcacatgtatccatatatattttaatcttggttaacttcctgtgctacataaaatagataattwgattaacatatgaagctttgtcattgaggggaattcccgtacctcatacttttcaagagcgttgcttagtacaactgctgtacatcttccacttacatttgtatcccatgccaacccttctgtaaaccaaggacaggcttttttcttttctatcagctggttacgtatgatcaaccatatggccatagaactcagggagggttgtgctgctactacagcattagtgaatgacatggtttctgggaaccctgccattgcaccttgatttttcacctacttaaaaacagatatgcaactgccaagcatagtatagatttcttcttgagtctgcttgaatttatgatttggtgcccaggatagaacttgatggtcagttacaaatacatagacacttggtgttcactgtttaattgcttaatttcttccagaccatgttaaaagttgttttgaaaatggaatttaattatctgctacagatggtctaagccttgcttcaggat

SEQ ID NO: 61811 - DNA, 671 bp, Homo sapiens
agtttcacatatctactatcttgcctctattccaaatctccttgtccccaatattcccattttcctgtttctggccccctgaccattcaactaggccatttaacacagcacatgtatccatatatattttaatcttggttaacttcctgtgctacataaaatagataatttgattaacatatgaagctttgtcattgaggggaattcccgtacctcatacttttcaagagcgttgcttagtacaactgctgtacatcttccacttacatttgtatcccatgccaacccttctgtaaaccaaggacaggcttttttcttttctatcagctggttacgtatgatcaaccatatggccatagaactcagggagggttgtgctgctactacagcattagtgaatgacatggtttctgggaaccctgccattgcaccttgatttttcacctacttaaaaacagatatgcaactgccaagcatagtatagatttcttcttgagtctgcttgaatttatgatttggtgcccaggrtagaacttgatggtcagttacaaatacatagacacttggtgttcactgtttaattgcttaatttcttccagaccatgttaaaagttgttttgaaaatggaatttaattatctgctacagatggtctaagccttgcttcaggat

SEQ ID NO: 61812 - DNA, 1090 bp, Homo sapiens
atcatagctcactgcagcctcaaacacctgggctcaagcaatcatcccacctcagcctcccgagtagctaggatcacaggtgcacaccactgcacctggctggttattttcttctagtctttttctttgcctctrgcatatactttctttctaaatcctttttttcccccactgagctttatacagggcatttccctgtgccattaaagactcttccaaggcttagtggctgcagctccctgccatcatgcacacacccctggcccaggcagcttccttctggggttcaccttctgaagtaggggttccccaccttacccatactagtctgcgcctgtttgttctacattccagaatctacatcaacacgtagtgcatactcaaaagcagcaactttaaatatgactgactttaaaaaacaaaatagtgaagttttccctgaggttaaaagaggtggtgcaggactcatgcagaagagcaacaggaaggagaccctggaggtgacaccctccctaggtgctcagggacaaacattttacgtgagtagaatcctgctgtcccatccatttgtacgataatcatgggtgtgctcttttgatggaaactgctgggcagagatccctaacacatacatttcaaatgttcttgtcctatcatctttcacccagtagcacatggattataaacatataaccaaatgtacttcttcacttgccagggtaagaagcttccaacctaaaaggaatttgaagatgatttcgctgcagtaaattcttccattccatccattcattctacccagttttgaaggttcaggtttccctaaggttttccccttaatatatgccctgaaatttcccaggcatgaagcaagacagagaatacaagagtcaccaaaggcagttcttgggaggccaggtaggatagttggtggtgggagagggaggaccactctagggctcggcatgttgaccttaacacttaggtgggacaccaagcttaactggaaacttctgctccaaaagcctggaattgtattcaaaatcaatgtcagagaaatttacaccaaggcaatagcaaggttgaggca

SEQ ID NO: 61813 - DNA, 823 bp, Homo sapiens
agccactgtgcttggccagggcctttagaattctgcaggccccagcaggaagggcttgccatgaagctcagcctgcactcaccttggaggtgagctgatggcagtggaggcagccaagtctggagccccccaccaccaatgccaccctgaagcagaagggctgggagggaaggagcattagagagakagagaaggagaactatgtgccaggtcaaaattaaaaagacaaaaaggtgaacagagcaagagagcaaagaaaggatgaataagaagaggggctaggaaatgcctgctgccctctctcgctccctcctgtgctgttcccattatcatacctttttaggccaggaggaagaggcgaggccaaaatatgcttggaaggaatcagaattcagtcaagaagtatacagttatacactgcgaaggcttccccttctgcttctgtttctggccactgggcttggtggcagctgttctcatctggtcaccgcgatgtcctagcatcagaaggctatgattgcaaaggtggaatccaggcttcagggcaacaggcctgagctcaagcctctgcgctgcctcttggcagctgtgtgaacccagatgtggcaattcatctctctgttagtctcccctggtgggaaacggccatgatcatgtccagcgcacagaggcacactaagaactggatgcaaagatgactacaagtgcttggcaaccaacagcaatcggcaagaggtgtcaccatctgcaccacagtgaaaagactcaagagacccaacccaggaggaagactgagcacgcagcctacctctccccagggcct

SEQ ID NO: 61814 - DNA, 683 bp, Homo sapiens
tccgacatgcgctctcccgagtttttaataatggcaactcattgtacatgttaccaccactgtgtagcctgcctaacacatgcctgcaggctacaggcagcctgtcgcctggaaagtggggatcgagacatttggttgagactttcccaacttgaggaggcccactgtttacttttttctttctgagtatgcgagaagtagggggtgycttatcctcaagaaagtctcatctagagaatttgccaggggagagaggctccggtacgagtccaggtctactctcagcatagggcagctctgctcgtgaagagtggactgtgtctgtgaccttgagcaccaaaggctgtgcacagcacacctgggcacgctgcttacatcatggatcagagaacaaactacactgagcacccaaggcagtcagggggagcccgtctggctcctgccaggccccctcctggactccccagaaagaagggtcagtgctgggctgcagctcatggctacttggccaagggaggtcatgttggaggaggctacaaggtttttaaaaataagattttgtctttatgaaagacatgttggaaattcacattttaatacctaaaacaccatcacttgagagcaagttatcccaagggaaatcaaaaggaattctagaaaaattaatcttcaaattttcactt

SEQ ID NO: 61815 - DNA, 683 bp, Homo sapiens
tccgacatgcgctctcccgagtttttaataatggcaactcattgtacatgttaccaccactgtgtagcctgcctaacacatgcctgcaggctacaggcagcctgtcgcctggaaagtggggatcgagacatttggttgagactttcccaacttgaggaggcccactgtttacttttttctttctgagtatgcgagaagtagggggtgccttatcctcaagaaagtctcatctagagaatttgccaggggagagaggctccggtacgagtccaggtctactctcagcatagggcagctctgctcgtgaagagtggactgtgtctgtgaccttgagcaccaaaggctgtrcacagcacacctgggcacgctgcttacatcatggatcagagaacaaactacactgagcacccaaggcagtcagggggagcccgtctggctcctgccaggccccctcctggactccccagaaagaagggtcagtgctgggctgcagctcatggctacttggccaagggaggtcatgttggaggaggctacaaggtttttaaaaataagattttgtctttatgaaagacatgttggaaattcacattttaatacctaaaacaccatcacttgagagcaagttatcccaagggaaatcaaaaggaattctagaaaaattaatcttcaaattttcactt

SEQ ID NO: 61816 - DNA, 683 bp, Homo sapiens
tccgacatgcgctctcccgagtttttaataatggcaactcattgtacatgttaccaccactgtgtagcctgcctaacacatgcctgcaggctacaggcagcctgtcgcctggaaagtggggatcgagacatttggttgagactttcccaacttgaggaggcccactgtttacttttttctttctgagtatgcgagaagtagggggtgccttatcctcaagaaagtctcatctagagaatttgccaggggagagaggctccggtacgagtccaggtctactctcagcatagggcagctctgctcgtgaagagtggactgtgtctgtgaccttgagcaccaaaggctgtgcacagcacacctgggcacgctgcttacatcatggatcagagaacaaactacactgagcacccaaggcagtcagggggagcccgtctggctcctgccaggccccstcctggactccccagaaagaagggtcagtgctgggctgcagctcatggctacttggccaagggaggtcatgttggaggaggctacaaggtttttaaaaataagattttgtctttatgaaagacatgttggaaattcacattttaatacctaaaacaccatcacttgagagcaagttatcccaagggaaatcaaaaggaattctagaaaaattaatcttcaaattttcactt

SEQ ID NO: 61817 - DNA, 683 bp, Homo sapiens
tccgacatgcgctctcccgagtttttaataatggcaactcattgtacatgttaccaccactgtgtagcctgcctaacacatgcctgcaggctacaggcagcctgtcgcctggaaagtggggatcgagacatttggttgagactttcccaacttgaggaggcccactgtttacttttttctttctgagtatgcgagaagtagggggtgccttatcctcaagaaagtctcatctagagaatttgccaggggagagaggctccggtacgagtccaggtctactctcagcatagggcagctctgctcgtgaagagtggactgtgtctgtgaccttgagcaccaaaggctgtgcacagcacacctgggcacgctgcttacatcatggatcagagaacaaactacactgagcacccaaggcagtcagggggagcccgtctggctcctgccaggccccctcctggrctccccagaaagaagggtcagtgctgggctgcagctcatggctacttggccaagggaggtcatgttggaggaggctacaaggtttttaaaaataagattttgtctttatgaaagacatgttggaaattcacattttaatacctaaaacaccatcacttgagagcaagttatcccaagggaaatcaaaaggaattctagaaaaattaatcttcaaattttcactt

SEQ ID NO: 61818 - DNA, 683 bp, Homo sapiens
tccgacatgcgctctcccgagtttttaataatggcaactcattgtacatgttaccaccactgtgtagcctgcctaacacatgcctgcaggctacaggcagcctgtcgcctggaaagtggggatcgagacatttggttgagactttcccaacttgaggaggcccactgtttacttttttctttctgagtatgcgagaagtagggggtgccttatcctcaagaaagtctcatctagagaatttgccaggggagagaggctccggtacgagtccaggtctactctcagcatagggcagctctgctcgtgaagagtggactgtgtctgtgaccttgagcaccaaaggctgtgcacagcacacctgggcacgctgcttacatcatggatcagagaacaaactacactgagcacccaaggcagtcagggggagcccgtctggctcctgccaggccccctcctggactccccagaaagaagggtcagtgctgggctgcagctcatggctacttggccaagggaggtcrtgttggaggaggctacaaggtttttaaaaataagattttgtctttatgaaagacatgttggaaattcacattttaatacctaaaacaccatcacttgagagcaagttatcccaagggaaatcaaaaggaattctagaaaaattaatcttcaaattttcactt

SEQ ID NO: 61819 - DNA, 700 bp, Homo sapiens
tcccacctcggcctcccaaagtgttgggattacaagcataagccaccatgcctagccttcatttggattttaagattatttagtgtaagaaagaatcaatttggttttctaacgttttctgatttgaccaaatatcagaacaaggtagaatagcaaattccttgaaaaagcaggcaagcaaacaaaaatcctagaaagtactaatgagttcacagaactccatggggaagagaaagcatctattcccacagacaggcttttgcatcttgtgctaaaatgaatggttgtaggccgaggtgggtggatcacctgaggtcaggagttcaasaccagcctggccaacatggtgaaaccccatctctattaaaaatataaaaattagctggaggtggtggcgtgcgcctgtaatcctagctaatagagaggctgaggcagaattccttgaacctgggaggcagaggttgcggtaagctgagatcgcaccattgcactccaccctgagtgacagagtgagactcatgtctcaaataaataagtaaataaataaataaataatgaatgaatgaatgaatgaatggttgtgagggtcttagattatcaaagtcatgatacataaagttgtctaagcctctgaaacaaatctaacttcttgttcttggctaacggcatcatattcctgcaaatgagaaacagaaccgtg

SEQ ID NO: 61820 - DNA, 604 bp, Homo sapiens
gggattacaggcgcgcaccaccatgcccggctaatttttgtatttttagtagagaaggggtttcaccatgttggtcaggctggtcttgaattcctgacctcaagtgatctgctcgccttggccttctaaagtgctgggattgcaggcatgagccactgcgcctggccttgaagaagattttatattgagaaatattttataatgcaaaactatgcatagaattgtgaaaaaatatgcatggaaaaagaatgaaaaaaatgttgaaaattaatagtgaattctagagggtgtaataaattgatttatatttttatgagtatgggtamtttataatagaaacatattttaaaaattacactaatctggcaattcacaagtctggactcttaagaaaacttttttttttttaataatttttttgtttttagaaacagggtctcactctgttgcccaggctggagtgcagtggtgcaatcatccctcactattatagccttaatctcctgggctcaagtaaccctccctcctcactctcccaagtatctaggactacaggtgggatcttgctatgttgtccaggctggtctcaaactcctggcctcaa

SEQ ID NO: 61821 - DNA, 991 bp, Homo sapiens
  misc_feature (1)...(991): n = A,T,C or G
agccaccgcccctggccccgtgatctctttttgcccagaatccagagccacacacactgaggctgcaggaagtgggccctggagctgaggataaagcctggggtggggtgggggagtggatccacagggagtctccataaaaacggactggtttgttttcaagtgtctgcctcctgttagtgacagtcatttaccctagcattgtgattctccccccatctctgccccttctccgcacccttgtttccagcgctctcccctccctgcctgttggatctcatgctaaggtgagcagccctcaacctcgaggccccaggtacgcggaagggactttcatcagtgactacagtattgccatggacaagattcaccaacaagactttgtgaactggctgctggcccaaaaggggaagaagaatgagtgagtcgctgcttacactcctcctgttccctgtgccgggctctgccttcctaccttcagaggaggccactgctgtgcaacacaggccagtggnatgcacaaccccaggtggcaccctttcttttcttttcttgttttttttttttttkaaatggagtncactcttttgcccagcctgagtgcagtgcgcgatctcngctcactcnnnnnnnnnnnnnnnnnnnnnnnnnnnnnnnnnnnnnnnnnnnnnnnnnnnnnnnnnnnnnnnnnnnnnnnnnnnnnnnnnnnnnnnnnnnnnnnnnnnnaacatattatgtatctaatatctaggccagagtcactcatccactacaacaccagaactacacacacaagatctacgcacattaaaaacccccacatccaggatgcatacaattattctcactcagcataccgcgtagcaggacctccagcacatgccaacacccccaactgatatttttgtatttttagtagagacagggtttcaccatgttggccaggatggtctcgatctcctgaccacgtgatccacccgccttggcctcc

SEQ ID NO: 61822 - DNA, 718 bp, Homo sapiens
tctctgagctcccatacatcttctgactcctcccctttgaagtaaaggattagggccaacacagtggctcacacttgtaatcccagcactttgggaggccgaggagggcagatcacgaggtcaggagatcgagaccatccaggccaacacggtgaagccccgtctctactaaaaaaatgcaaaaaaattatccgtgcatggtggcgggcacctgtagtcccagctactcaggaggctgaggcaggagaatgacgtgaacccgggaggcggagcttgcagtgagccaagattgtgccactgcactccagcctgggtgacagagcaaaaaraatccgtctcaaaaaaaaagaagtaaaggattagggaatagccctggtccctacccctagcctagactggtgcccaagtcagggtcctggccagagctaccatgtctgactccccatccttgcctggtgaaaggtgccacccaggctgggtgtggtggctcacacctgtaatcccagcactttgggaggccaaggcaggtggatcacctgaggtcaggagttcgagacctgcctgaccaacatggaaccccgtctctactaaaaatacaaaattaggccaggcgcagtggcttatgcctgtaatcccagcactttgggaggctgaggtgggcggatcacgaggtcaggagtttgagaaccagactggtcaacatggtgaaaccctgtct

SEQ ID NO: 61823 - DNA, 718 bp, Homo sapiens
tctctgagctcccatacatcttctgactcctcccctttgaagtaaaggattagggccaacacagtggctcacacttgtaatcccagcactttgggaggccgaggagggcagatcacgaggtcaggagatcgagaccatccaggccaacacggtgaagccccgtctctactaaaaaaatgcaaaaaaattatccgtgcatggtggcgggcacctgtagtcccagctactcaggaggctgaggcaggagaatgacgtgaacccgggaggcggagcttgcagtgagccaagattgtgccactgcactccagcctgggtgacagagcaaaaaaamtccgtctcaaaaaaaaagaagtaaaggattagggaatagccctggtccctacccctagcctagactggtgcccaagtcagggtcctggccagagctaccatgtctgactccccatccttgcctggtgaaaggtgccacccaggctgggtgtggtggctcacacctgtaatcccagcactttgggaggccaaggcaggtggatcacctgaggtcaggagttcgagacctgcctgaccaacatggaaccccgtctctactaaaaatacaaaattaggccaggcgcagtggcttatgcctgtaatcccagcactttgggaggctgaggtgggcggatcacgaggtcaggagtttgagaaccagactggtcaacatggtgaaaccctgtct

SEQ ID NO: 61824 - DNA, 718 bp, Homo sapiens
tctctgagctcccatacatcttctgactcctcccctttgaagtaaaggattagggccaacacagtggctcacacttgtaatcccagcactttgggaggccgaggagggcagatcacgaggtcaggagatcgagaccatccaggccaacacggtgaagccccgtctctactaaaaaaatgcaaaaaaattatccgtgcatggtggcgggcacctgtagtcccagctactcaggaggctgaggcaggagaatgacgtgaacccgggaggcggagcttgcagtgagccaagattgtgccactgcactccagcctgggtgacagagcaaaaaaaatccgtctcaaaaaaaaagaagtaaaggattagggaatagccctggtccctacccctagcctagactggtgcccaagtcagggtcctggccagagctaccatgtctgactccccatccttgcctggtgaaaggtgccacccaggctgggtrtggtggctcacacctgtaatcccagcactttgggaggccaaggcaggtggatcacctgaggtcaggagttcgagacctgcctgaccaacatggaaccccgtctctactaaaaatacaaaattaggccaggcgcagtggcttatgcctgtaatcccagcactttgggaggctgaggtgggcggatcacgaggtcaggagtttgagaaccagactggtcaacatggtgaaaccctgtct

SEQ ID NO: 61825 - DNA, 718 bp, Homo sapiens
tctctgagctcccatacatcttctgactcctcccctttgaagtaaaggattagggccaacacagtggctcacacttgtaatcccagcactttgggaggccgaggagggcagatcacgaggtcaggagatcgagaccatccaggccaacacggtgaagccccgtctctactaaaaaaatgcaaaaaaattatccgtgcatggtggcgggcacctgtagtcccagctactcaggaggctgaggcaggagaatgacgtgaacccgggaggcggagcttgcagtgagccaagattgtgccactgcactccagcctgggtgacagagcaaaaaaaatccgtctcaaaaaaaaagaagtaaaggattagggaatagccctggtccctacccctagcctagactggtgcccaagtcagggtcctggccagagctaccatgtctgactccccatccttgcctggtgaaaggtgccacccaggctgggtgtggtggctcacacctgtaatcccagcactttgggaggccaaggcaggtggatcacctgaggtcaggagttcgagacctgcctgaccaacatggaaccccgtctctactaaaaatacaaaattaggccaggcgcagtggcttatgcctgyaatcccagcactttgggaggctgaggtgggcggatcacgaggtcaggagtttgagaaccagactggtcaacatggtgaaaccctgtct

SEQ ID NO: 61826 - DNA, 1073 bp, Homo sapiens
gtcctgactctccaggaagtgcctactgataaaaagccacaccttccaagactatatttatcagtaataaatgtttgattgcttttcttatgcctgcttgacttaatattttttgtcacaacaatgtcataatttagaaaagatagagaactattatttactgggctcctgcaaactccaaacaaacaagaagtattattattgggctcctgcaaacccccaaaaagaaaatgcaggacccatgaagcagattggggaatttttgttacagagccaagggctataggatcttattctgttatagtagcagagactctgggataagagagcaagaggatatacagcaacctcctgctgctagtctccaacacattctctcctagaagggttgtgccctaataaagaggtcacttttcaaaatttacatgttagggcaattgctaagttttcttaaaatcagacagcagttagtgttctgtatggcatataaagaatcctatttgccttctacgaactacttgagcaggaacatattaattttatgtgcatgtgcttggacaagtacatcttaattaattgatttaataaaagcttatacattctatcaagcacatagtattctaagtattagatatgccattgtagatgactcttcattccagataagtggaatgccaagtaggtatttgatgtgcttacatctattgcctttctaggagatcaataaagactgtgttaccagctgtactcccaggtgaaaagagaatgagcgagcaattgacatctcatattggatagtcacttacaagctcaagacagctattattttccatttctaaaagcattatactgctaatatagaaaaaggtcagggtctcataatacatctgaaattagagttcattttaatcataatataataatctaaatgccattatacttactcaaaggtcagttttaacacttttccctttgsggcaaaacatggagctttaacttcttcctcctgaaagtaagggcagtatgttatgacaaagttaatcctatttcagagcttatttattccaaaaact

SEQ ID NO: 61827 - DNA, 2123 bp, Homo sapiens
tgtaaaatctaagaaatcaagcataatgaattcccgtgatttttcagcatatttgtcaccggataagaaaaagttgaggggaaagtgatgcacggccawtgttatgattgtttcacctagtggattaagcaggattggagccttcacatagactgatttttttttttcaaaaggttcttcagctccacctggaaacttctgaaattatgtttgataagttggaatatatcaaggagatgcaatcactctgattatatattctcagttggctacctatcacttctcagaccttaactaggtcatgtgaaggtagcttagaaaaactgggtaaatcgtgtatcacacagtcagaaaaactgtgaaatcacattcaggatgatgacaataaatagtggctgccactcttttacacgtatttttaatacttttaatattttattagcttttatatttctagcttagctttgaaaataaaataaatattgtgttaagatatttctcatgggctttttatctttgaactaacttatacaagtccttttatttctatcctattttgtcttactgcgctgacggaagaaatattctgaaatacaaatttttagatttgtcttttctcatgaactattgcctttatcatgttaggtcctttttaaagaggtgcaatatttttttcttcaaggggtgaagcttttcaaatacctagagaaacaaatataaactatacgttttctatatatttttttttaaaaaggatgaaacaaacccctaatattttaaataggttataacaataggaatctctcctcctaaccaaaaaattgttttttatttctaagtttctaataataaacttattttgtttcataataccaatatatatttttaaatgatattttgattctgaatagaatacaattagattcaaaaatacattgtaagaatacatggcaaatttggccaggcgccatggctcacgcctgtaatcccagcactttggaaggccaaggtgggcggatcacgaggtcaggagatcgagagactatcttggataacacggtgaaaacccctctctactaaaaatacaaaaaatcagccgggcgtggtggcgggcgcctgtagtcccagctactccggaggctgaggcagaagaatggcgtgaacctgggaggcggagcttgcagtgagcctagattgcgccactgcactccagcccgcgctacagagcgagagtccatctcaaaaaaaaaaaaaaaaaaaagtaaatttaaaaaaacctaataaacttgtgcatctccaagcccacataataggatagtcttcagttaatatagactattgtttatattgagtactatatagcactctgaatatttccatttgtggcaactacaaagtttaaggcagataaaattacttccacaatattccaaatgttgggcgttttaagtttagagttctaagcctaattttctatatagggaacctatcaaagtgaatttctataaaatgaagtgtacaagaataaatatatttgacctattttaatgtgccattcttattcaccactgaaaattgcttgtaaatataaatttaagtgtaaagtaaaaatcatccttcttcaaaccccactctttctatttattttatagctctaggcactcatgaaaagcttttcactcaaagagcaagccaacggaataaagatcagaattttactattattattaatcttgtgaatattcactattaggaagccccctaagaatacattgccttatcaaatatacaaagtcaaagttgatgcgaagagtttataatgtaggtcagaaagaggtctttttttctttgcctgttatgagcagagacctctcctgctttctcagcaatccccttgccttgcattaaacatggcttacttttgcttcatcagggtttgtagcatcagcattattgcttgctctccatcagggttcttgctggtttgcctccggcatccctggtccaagagtgaagtgctggagagtttgttagctgtgactctgactttcctgtcaaggcgtttttatatttgcgaatagttatttccttaggtacctggaaagtcattgtttatgtgattc

SEQ ID NO: 61828 - DNA, 2123 bp, Homo sapiens
tgtaaaatctaagaaatcaagcataatgaattcccgtgatttttcagcatatttgtcaccggataagaaaaagttgaggggaaagtgatgcacggccaatgttatgattgtttcacctagtggattaagcaggattggagccttcacatagactgatttttttttttcaaaaggttcttcagctccacctggaaacttctgaaattatgtttgataagttggaatatatcaaggagatgcaatcactctgattatatattctcagttggctacctatcacttctcagaccttaactaggtcatgtgaaggtagcttaraaaaactgggtaaatcgtgtatcacacagtcagaaaaactgtgaaatcacattcaggatgatgacaataaatagtggctgccactcttttacacgtatttttaatacttttaatattttattagcttttatatttctagcttagctttgaaaataaaataaatattgtgttaagatatttctcatgggctttttatctttgaactaacttatacaagtccttttatttctatcctattttgtcttactgcgctgacggaagaaatattctgaaatacaaatttttagatttgtcttttctcatgaactattgcctttatcatgttaggtcctttttaaagaggtgcaatatttttttcttcaaggggtgaagcttttcaaatacctagagaaacaaatataaactatacgttttctatatatttttttttaaaaaggatgaaacaaacccctaatattttaaataggttataacaataggaatctctcctcctaaccaaaaaattgttttttatttctaagtttctaataataaacttattttgtttcataataccaatatatatttttaaatgatattttgattctgaatagaatacaattagattcaaaaatacattgtaagaatacatggcaaatttggccaggcgccatggctcacgcctgtaatcccagcactttggaaggccaaggtgggcggatcacgaggtcaggagatcgagagactatcttggataacacggtgaaaacccctctctactaaaaatacaaaaaatcagccgggcgtggtggcgggcgcctgtagtcccagctactccggaggctgaggcagaagaatggcgtgaacctgggaggcggagcttgcagtgagcctagattgcgccactgcactccagcccgcgctacagagcgagagtccatctcaaaaaaaaaaaaaaaaaaaagtaaatttaaaaaaacctaataaacttgtgcatctccaagcccacataataggatagtcttcagttaatatagactattgtttatattgagtactatatagcactctgaatatttccatttgtggcaactacaaagtttaaggcagataaaattacttccacaatattccaaatgttgggcgttttaagtttagagttctaagcctaattttctatatagggaacctatcaaagtgaatttctataaaatgaagtgtacaagaataaatatatttgacctattttaatgtgccattcttattcaccactgaaaattgcttgtaaatataaatttaagtgtaaagtaaaaatcatccttcttcaaaccccactctttctatttattttatagctctaggcactcatgaaaagcttttcactcaaagagcaagccaacggaataaagatcagaattttactattattattaatcttgtgaatattcactattaggaagccccctaagaatacattgccttatcaaatatacaaagtcaaagttgatgcgaagagtttataatgtaggtcagaaagaggtctttttttctttgcctgttatgagcagagacctctcctgctttctcagcaatccccttgccttgcattaaacatggcttacttttgcttcatcagggtttgtagcatcagcattattgcttgctctccatcagggttcttgctggtttgcctccggcatccctggtccaagagtgaagtgctggagagtttgttagctgtgactctgactttcctgtcaaggcgtttttatatttgcgaatagttatttccttaggtacctggaaagtcattgtttatgtgattc

SEQ ID NO: 61829 - DNA, 2123 bp, Homo sapiens
tgtaaaatctaagaaatcaagcataatgaattcccgtgatttttcagcatatttgtcaccggataagaaaaagttgaggggaaagtgatgcacggccaatgttatgattgtttcacctagtggattaagcaggattggagccttcacatagactgatttttttttttcaaaaggttcttcagctccacctggaaacttctgaaattatgtttgataagttggaatatatcaaggagatgcaatcactctgattatatattctcagttggctacctatcacttctcagaccttaactaggtcatgtgaaggtagcttagaaaaactgggtaaatcgtgtatcacacagtcagaaaaactgtgaaatcacattcaggatgatgrcaataaatagtggctgccactcttttacacgtatttttaatacttttaatattttattagcttttatatttctagcttagctttgaaaataaaataaatattgtgttaagatatttctcatgggctttttatctttgaactaacttatacaagtccttttatttctatcctattttgtcttactgcgctgacggaagaaatattctgaaatacaaatttttagatttgtcttttctcatgaactattgcctttatcatgttaggtcctttttaaagaggtgcaatatttttttcttcaaggggtgaagcttttcaaatacctagagaaacaaatataaactatacgttttctatatatttttttttaaaaaggatgaaacaaacccctaatattttaaataggttataacaataggaatctctcctcctaaccaaaaaattgttttttatttctaagtttctaataataaacttattttgtttcataataccaatatatatttttaaatgatattttgattctgaatagaatacaattagattcaaaaatacattgtaagaatacatggcaaatttggccaggcgccatggctcacgcctgtaatcccagcactttggaaggccaaggtgggcggatcacgaggtcaggagatcgagagactatcttggataacacggtgaaaacccctctctactaaaaatacaaaaaatcagccgggcgtggtggcgggcgcctgtagtcccagctactccggaggctgaggcagaagaatggcgtgaacctgggaggcggagcttgcagtgagcctagattgcgccactgcactccagcccgcgctacagagcgagagtccatctcaaaaaaaaaaaaaaaaaaaagtaaatttaaaaaaacctaataaacttgtgcatctccaagcccacataataggatagtcttcagttaatatagactattgtttatattgagtactatatagcactctgaatatttccatttgtggcaactacaaagtttaaggcagataaaattacttccacaatattccaaatgttgggcgttttaagtttagagttctaagcctaattttctatatagggaacctatcaaagtgaatttctataaaatgaagtgtacaagaataaatatatttgacctattttaatgtgccattcttattcaccactgaaaattgcttgtaaatataaatttaagtgtaaagtaaaaatcatccttcttcaaaccccactctttctatttattttatagctctaggcactcatgaaaagcttttcactcaaagagcaagccaacggaataaagatcagaattttactattattattaatcttgtgaatattcactattaggaagccccctaagaatacattgccttatcaaatatacaaagtcaaagttgatgcgaagagtttataatgtaggtcagaaagaggtctttttttctttgcctgttatgagcagagacctctcctgctttctcagcaatccccttgccttgcattaaacatggcttacttttgcttcatcagggtttgtagcatcagcattattgcttgctctccatcagggttcttgctggtttgcctccggcatccctggtccaagagtgaagtgctggagagtttgttagctgtgactctgactttcctgtcaaggcgtttttatatttgcgaatagttatttccttaggtacctggaaagtcattgtttatgtgattc

SEQ ID NO: 61830 - DNA, 671 bp, Homo sapiens
tggaaaagcctcagatcccaacttctggaagtccacagtctctcctagctctaggcagccattgggaggaaaagactctggcagttataaccccaacacctcagaagagctcagcttctccagcttctacagttcatttctttggctcaccatggctggtgttctggggatttccaaagtcccctgcctccgcttccagcacccacattcccaaaaagatcaccataagtagggggcttaggacagggaagccagagaaggacttcctgcagaagaacagtgatgtgaagattttgagtgcgtctggggagattctaactctgaaggactttagaataagataggggatgggagtcaagagaagaattctatttccagtttgggttcttaagacaagatgaaatttcgaaggaatgtgaggtcctaaggatgttggcagtcaggaaggagagaaaaggaagaaacaatgataagtcacctaccatagtcaagaagaagcaatttttamaaaggtggggggggatggaaatgggaggagaataaggtaaagggcaagatggacagagtaaaaggtgaagttggcacgcgcacacacacacacacacacacgcacaaaacatatgggggactgccaggtcttgatctctccacttcactaaactacaactggt

SEQ ID NO: 61831 - DNA, 1292 bp, Homo sapiens
ttatagtaaccttcatgttgggggacaattctctatggatctctctctctgcatgtcttgttagcagaagcaatgacaaccttttgctctgaattatcttttcaaggatgttttttggagggagaacagccttggaagataggcatagtgtttttctatggagcagagagcagatttgcttattttccataataataatgtgtccttttggggcaaagttcagggtaggtttgctggcagtacattacaaaataattggattcctaagcccaggattcctcagctgtgtaacacaaactcactgcacactcagcatctacctcaactgctccacattagctccatgcagctggagggctgggatagagagggtgactggcgtgaacatgaagctcatgatgcttgccatgctatgagttatgagttatacactttgtcaccaacccaagagtctcgatttgtctgccccagggtctatgaaactgtagctggttaacttcttaacttatacatagggaaaaacctcagacctttaacatttcttgacatttcaatctctgaatttggaatacattcaaatatcataatttttctaagagaacctgctggagaactatattgtctaactttccatttgtgcctcatttttagtcttgagtgactgtgtcttcatctttgcccatgtgaaatgaaagtctgggctgctgaacttatctaaatggactctgctctttcctgaagagctgggctgtaacacaaacatttggaaagggaaattaaatcacattgtagtaaaataactgcaatgttctcatttgttaatggtcagagtcatttgtaatttagtctatagtatcataagaaatatctgcctttattctactcagaggtacagaatgacaaattaaatawataaaatgtgagtgcgttaaaacaaaggagtaaaaaaaataacaaaacattgctttcaccttattattaatgcacaactcaggaaaataaaattgatttttaaaaatcaagtgtaatagaacaatatcagattttgcaaatcagtggtcatttgcaactcaccaagaatattgggctttatttctttatttgagccaacacgacagtatgggtcaagtttcagatatcctcatgtagaacatatgaaaaatcttgcattttcataaaaattacagtctttttaggtattttaggtaaaaaatgtggctctgaccagtgcacagaaaagatatgctgatcaggatagacagaccagtcatatcatttatttaattaccaaa

SEQ ID NO: 61832 - DNA, 1292 bp, Homo sapiens
ttatagtaaccttcatgttgggggacaattctctatggatctctctctctgcatgtcttgttagcagaagcaatgacaaccttttgctctgaattatcttttcaaggatgttttttggagggagaacagccttggaagataggcatagtgtttttctatggagcagagagcagatttgcttattttccataataataatgtgtccttttggggcaaagttcagggtaggtttgctggcagtacattacaaaataattggattcctaagcccaggattcctcagctgtgtaacacaaactcactgcacactcagcatctacctcaactgctccacattagctccatgcagctggagggctgggatagagagggtgactggcgtgaacatgaagctcatgatgcttgccatgctatgagttatgagttatacactttgtcaccaacccaagagtctcgatttgtctgccccagggtctatgaaactgtagctggttaacttcttaacttatacatagggaaaaacctcagacctttaacatttcttgacatttcaatctctgaatttggaatacattcaaatatcataatttttctaagagaacctgctggagaactatattgtctaactttccatttgtgcctcatttttagtcttgagtgactgtgtcttcatctttgcccatgtgaaatgaaagtctgggctgctgaacttatctaaatggactctgctctttcctgaagagctgggctgtaacacaaacatttggaaagggaaattaaatcacattgtagtaaaataactgcaatgttctcatttgttaatggtcagagtcatttgtaatttagtctatagtatcataagaaatatctgcctttattctactcagaggtacagaatgacaaattaaatatataaaatgtgagtgcgttaaaacaaaggagtaaaaaaaataacaaaacattgctttcaccttattattaatgcacaactcaggaaaataaaattgatttttaaaaatcaagtgtaatagaacaatatcagattttgcaaatcagtggtcatttgcaactcaccaagaatattgggctttatttctttatttgagccaacacgacagtatgkgtcaagtttcagatatcctcatgtagaacatatgaaaaatcttgcattttcataaaaattacagtctttttaggtattttaggtaaaaaatgtggctctgaccagtgcacagaaaagatatgctgatcaggatagacagaccagtcatatcatttatttaattaccaaa

SEQ ID NO: 61833 - DNA, 665 bp, Homo sapiens
ggatccactgcctgcaaacttagaaattaaaacttattttggataagcttccaatgaagaggttccttgtacactaagcttcttatattyccaaagggaaaacaagccttgaagagccccatgttgctagggagtccagtgcagtgaaggccaggtctggctgagcagtcaggtccctgggcttctccccttattatattatttttcagagaaggagaaaagaaaacaaaaaataaaactaagtgtggtgggatttattaataatgaaatgtgttaataaaagatatttgtcagaggaagaaaatagtaaaatctttccttccttaaaagtttgcatttaaagttgaaatggtttccatgcttaatgaaaactgtcttatctttcttagctatgttttttttttttttgcgacagagtctggctctgtcacccgggctgcagtgcagtgaaacaatctttgttcactgcagcctccaactcctgggcttaagtgatcctccaatctcagcctcctgagtagctgggactacaggcatatgccaccatgcttggctaatttatttatttatttatttatttatattttttgtagagatggggccttgccatgttgtccaggctggtcttaaactcttggactccagcaatctgcctgcctcagcct

SEQ ID NO: 61834 - DNA, 665 bp, Homo sapiens
ggatccactgcctgcaaacttagaaattaaaacttattttggataagcttccaatgaagaggttccttgtacactaagcttcttatattcccaaagggaaaacaagccttgaagagccccatgttgctagggagtccagtgcagtgaaggccaggtctggctgagcagtcaggtccctgggcttctccccttattatattatttttcagagaaggagaaaagaaaacaaaaaataaaactaagtgtggtgggatttattaataatgaaatgtgttaataaaagatatttgtcagaggaagaaaatagtaaaatctttccttccttaaaagtttgcatttaaagttgaaatggtttccatgcttaatgaaaactgtcttatctttcttagctatgttttttttttttttgmgacagagtctggctctgtcacccgggctgcagtgcagtgaaacaatctttgttcactgcagcctccaactcctgggcttaagtgatcctccaatctcagcctcctgagtagctgggactacaggcatatgccaccatgcttggctaatttatttatttatttatttatttatattttttgtagagatggggccttgccatgttgtccaggctggtcttaaactcttggactccagcaatctgcctgcctcagcct

SEQ ID NO: 61835 - DNA, 665 bp, Homo sapiens
ggatccactgcctgcaaacttagaaattaaaacttattttggataagcttccaatgaagaggttccttgtacactaagcttcttatattcccaaagggaaaacaagccttgaagagccccatgttgctagggagtccagtgcagtgaaggccaggtctggctgagcagtcaggtccctgggcttctccccttattatattatttttcagagaaggagaaaagaaaacaaaaaataaaactaagtgtggtgggatttattaataatgaaatgtgttaataaaagatatttgtcagaggaagaaaatagtaaaatctttccttccttaaaagtttgcatttaaagttgaaatggtttccatgcttaatgaaaactgtcttatctttcttagctatgttttttttttttttgcgacagagyctggctctgtcacccgggctgcagtgcagtgaaacaatctttgttcactgcagcctccaactcctgggcttaagtgatcctccaatctcagcctcctgagtagctgggactacaggcatatgccaccatgcttggctaatttatttatttatttatttatttatattttttgtagagatggggccttgccatgttgtccaggctggtcttaaactcttggactccagcaatctgcctgcctcagcct

SEQ ID NO: 61836 - DNA, 665 bp, Homo sapiens
ggatccactgcctgcaaacttagaaattaaaacttattttggataagcttccaatgaagaggttccttgtacactaagcttcttatattcccaaagggaaaacaagccttgaagagccccatgttgctagggagtccagtgcagtgaaggccaggtctggctgagcagtcaggtccctgggcttctccccttattatattatttttcagagaaggagaaaagaaaacaaaaaataaaactaagtgtggtgggatttattaataatgaaatgtgttaataaaagatatttgtcagaggaagaaaatagtaaaatctttccttccttaaaagtttgcatttaaagttgaaatggtttccatgcttaatgaaaactgtcttatctttcttagctatgttttttttttttttgcgacagagtctggctctgtcacccgggctgcagtgcagtgaaacaatctttgttcactgcagcctccaactcctgggcttaartgatcctccaatctcagcctcctgagtagctgggactacaggcatatgccaccatgcttggctaatttatttatttatttatttatttatattttttgtagagatggggccttgccatgttgtccaggctggtcttaaactcttggactccagcaatctgcctgcctcagcct

SEQ ID NO: 61837 - DNA, 1146 bp, Homo sapiens
cagaactagccaaaaattagtacagatccttgacactcagggaaacagaggtcaaatatagaatattaatattgaacaacatgtgtactatacaatcaaagaagaattactgagcattttcatgcccagaagtatgctgagtgctgtgggaatttaaaacaagctcctcacccagacagtttacaatctagttaggtgtttaccattgaataatctatgcagatcccattctttaatgaggagcaaagagccaggagcatatggaacaataaatgttctggtaatattaaagacaataacaagcagaagtaaagacagttttttcctgccctgttttcctgggctaatttgtcagagcatcgtagtctgaacaaaagctgtgccaataggaatctgtactaagaaagcaatattttcatcctttttaatgtcagtctgcaagcaaaagtgacaastggtatcattcaatgaaaggtcagggggacaaaagcatgcagctgaatttgtttagggcttaccttatctttctttgataaacaaaacaattgacctaagtctcataacctgaagctcttcacatcttactaaactgcaatcatgaagttgaagatgattataatgattattttttcttcatacccttctctctgaagtagctgcagagttttcaaagacaagcatgatttccaaaagaggatcagtttccttttcattagaaaatgcatagttttgcctttttgcagaaattgaaaaagattaataataggggtggttcagaaataagaattaccaccttggaaggaaaaagagacaaaggaatccatagtagggaagggagatttgacatgactgtgatgtccaagctacccacagaatcaagggttgctagaagggtaattacagttttggttcccttggcaataattaaaggattagtggtcccagggagggcaaaagagacagtgtcaatagagtaaaaaacgctttcttcgataccaacagacattgacaaatagctcttgtctagaaagcaagattttgttctgagtcctggtatccctggccccagtacctccattctgcccacccatttgcatcagatgtggctgagatccctgctcctccttcctacccttcattggatcc

SEQ ID NO: 61838 - DNA, 896 bp, Homo sapiens
agacacatgtgctactaacaagaaaaaagagggtaatgagtgggaataatgttgggaaaggctgctcaatggagataaaatctgacctgaatggagaaagggagtcagccacatgaagatttgggggaagatgtttcaggtagatgaatcagctattgcaaatgtccccaaacagaacgaatcttgtgatgtttagggcagaaatgrtggggtcactttcaagacatgattggtttccatttctacagaactgacacagagaattaacaggcatctcctgctgtgtgtaactagaggacaactgtggcctttgggaaactccagattcctcggtagtcacattactttgtgaagctgaacttaccgcattggagttcaatttaacaagcttctgcgaggctgcaccgggcaggtatactctcttgcatcccccattcctcaagctgcactttgatccatgccagtctttagaataatatagaggaaaccgcaaactcatataggaaacttcaactctatcattttagttttctctttcatagctttccttttgctcaggctctgttctgacaagccaaggctttttggcaatttagctgaaaagtaaatgtaagcaaatacatatgattctagggatccagcctaccagaataactctattagagaacttgtttagacaaaacctattttctcattcccgaaactgacaaaactgtaggaaaatcactcatgtttgaaagcaaagtataataaagtgctatattgtaccactgtcttcatcaaagggaaaacaaacaaacaaacaaatcataaaccacaatgtattgcctgaaaatgagaggtcagaggcttattttaaaaggagaaaataaaaaaaaaactagactggtggcttg

SEQ ID NO: 61839 - DNA, 510 bp, Homo sapiens
taagacagatcacctacccaccattcagttcacaagtatcattgacaaaatagtgaagagtttaattgtttacagcctgcctccctctcctcactagactggaagctccaggaggtcagggccatatgctggtcattatgtggatgcagcacctgccacatggggagggtgaccaggcacataaggtggtgactgcctcttgaggctgcccatcccctctttggacagcatttggagacaaagcttaagcaggtaacaggacaagaaaacgcctcatcctggaactttctctgcaatggaaatcaataygattcaacaaaattaggtactccgtataggggatcttaaccagaaccccacattacaatacacaggggagcttaaaaattatactaaaaataagaataacactaatactgatgcctatgctatatccccaagattctgatttaattgatattaaatctggtttatgtgatttaaatgatatgatattcagctagggttgag

SEQ ID NO: 61840 - DNA, 799 bp, Homo sapiens
atgggcgatttgagttccccttccgttaggsgtctcatgaacttgagcatgcccagaaactcccatggagaggcaaggtcctgttagtttgtgcggctggctggagccaagagaccgttgtagttttgcagagagggttaagaccatcagctcccaacttcagtgtcccaggcatcagtatggaggggacacactgacctcttgaaaaagtgccattgacattgaggtgtagcacgtgatgatgtccttacttgttcatctgagatatgtcagaatggaggggaggaaagcctggcgtgttgtcttagaatcattgttttctatagtcatgcagcatctgtgtcacccgatgaccttctccaggcagggctgtgaggaaagaacacagcattgggcagcattgcagtttgggtcaaattggatcagatacctgagttcatcgagtcttgctctggtcacactttattgagtaggacattgagtgtcaccatctgccattcatttttaacttctgccatctgggagggtatgttacagggttgtgggaggcaggaatggataagctgtgcatttgattggtatagagaaagttatgagtatacagggaggtaaaacctgcattctactcttctggagtcttctattcccttttgctttttcttctccccaacccgagggcgatgcctggacaccctacctagacctttactatccactatggtagccattagccatatgtgactatttaaatcgaaatataagttagttaaaattaaacataataaaatactcctcccac

SEQ ID NO: 61841 - DNA, 652 bp, Homo sapiens
ttctccttgtgatatctgaattaattgaatcctatgtcatccctacagatccacagatacctctgtctcctaagaccagggaggacgaggcagatggtaaaatttaagccatctgagcaactgttgataatggatacttctaggatttagtttggtggggcggtcggcgggagggaggagaatcgtggaattttstaacaacaagagacaaagaaagaaaaggtgggggaaaaaaagccatgatttgtagttttgtttggagcagccaaagaattacacagaggaaagatgagagaacagttaaatcatcaacaactgtggaagaaatgactctgaaacctacagcaagcaatttgatttttcttttaaattaaatttttgtcatataacttgaataaaattataagacttacattaattttgatcttacattgtgtgctagtcccatctgcatcacatgaacatggatattcattaataagttctgtgcacctgaaacacagaattagaattacattttcaaataagtagatgttaaagcataacttcaagggagtttcaccatttaaacttttctttcctagttcaggtgaaaaaagcactcccatgagcaatacaaagcagagtttattcctgggtttcttatccttga

SEQ ID NO: 61842 - DNA, 722 bp, Homo sapiens
tggatacataaatttcattagtcattagataattatcaattccacatataatttttatagatcctaccagttacataataattttattaaaaatttactataacaaaaatacccaaaatttcattacatggtctttcagattttgtgtactgtgactctaatacattttacttctatataacagtgttcctttatagtacaaatttacagggaaaataagcttattaaaaagttgccggcagtaagacactgatacaaaatagtttttaacatagagagttgtatttaatttgtttaaaagtttagactaggaggcaagttttccctttttttctcctaatatgtactgtcttagcctgtttgtattgctataactatatacttgagcctagttgatttttacataaagtaaatttatttatcccaattatggaggctataaagcccaagatcaaggtgctgacaggtttggtgcctggtaaatgctgctctgttttcaagacgatgccttgttgctggatcctagaggggaggaaccctgtgttctcacataatagaagggatggaaggacaaataggaagggtctaccttccagccttttcataaggcactaatccattcatgagggcagagccctcawgatttaatcacttccccccaaatacccacctcttaatatcaccaaaatggagattaagttttaacacatgaattttggggg

SEQ ID NO: 61843 - DNA, 897 bp, Homo sapiens
aaaatttcwattaggaagaataagttcaagagtcctatttttacaacatggttaactacagttaatgacaatgcattgtattcttgaaaagtcaccgagagagtagatttaattattcttattaccaaaaaaggtatatgatataatgcgtatgttaagtagctttattaaccattccataatgtaaatgtatttcgaatcatgttgtatataataaatatatacatttttgtcttttatttttttgagacagggtctcactctgtcacccaggctggagtgcagtggcacgatctcggctcactgcaacttctgcctcccaggttcaagcgattctcccaccttagcctcccaagtagctgggactacaggtgtgcgccaccacaccctgataatttttgtatttttaggagagatgggatttcactgtgttggccagggtggtctgaagctcctgacttcaagtgatccatctgccttggcctcccaaagtgctgagatcacaggcatgagccataattaatttaaatatataaatcaataaaactgctatatttagggtcatttagctgtttatgggataatcacattttaacttgaaagaatctcactttggacaacagagttttactttgtgtccgaaagctttctttttcctttctctttttgtttcctgcttaaactggcaaattgcactatgtttataatttaccctgatgccctttgcccttcatgtgattcatttccatctggcattcttttctaatttctttcttgagagttatgaattattttctagctgtttctaataactgcctttaaatggacataagccactgcctagatgtgtacctgcttctaataaacaagtgagtcagggctcattgtgcaaatgaa

SEQ ID NO: 61844 - DNA, 897 bp, Homo sapiens
aaaatttcaattaggaagaataagttcaagagtcctatttttacaacatggttaactacagttaatgacaatgyattgtattcttgaaaagtcaccgagagagtagatttaattattcttattaccaaaaaaggtatatgatataatgcgtatgttaagtagctttattaaccattccataatgtaaatgtatttcgaatcatgttgtatataataaatatatacatttttgtcttttatttttttgagacagggtctcactctgtcacccaggctggagtgcagtggcacgatctcggctcactgcaacttctgcctcccaggttcaagcgattctcccaccttagcctcccaagtagctgggactacaggtgtgcgccaccacaccctgataatttttgtatttttaggagagatgggatttcactgtgttggccagggtggtctgaagctcctgacttcaagtgatccatctgccttggcctcccaaagtgctgagatcacaggcatgagccataattaatttaaatatataaatcaataaaactgctatatttagggtcatttagctgtttatgggataatcacattttaacttgaaagaatctcactttggacaacagagttttactttgtgtccgaaagctttctttttcctttctctttttgtttcctgcttaaactggcaaattgcactatgtttataatttaccctgatgccctttgcccttcatgtgattcatttccatctggcattcttttctaatttctttcttgagagttatgaattattttctagctgtttctaataactgcctttaaatggacataagccactgcctagatgtgtacctgcttctaataaacaagtgagtcagggctcattgtgcaaatgaa

SEQ ID NO: 61845 - DNA, 2291 bp, Homo sapiens
tagatttttaaaaaatttatggaagcttgtgttaactccaaaatggataattgagggattgaatcttaagagtgctttttaaaagtacttgaaagggtggaaaaggattccctaggaatattatataattttcaaatataaaaatataaaatttaatttcaacatagaaatagaacagcatctcaacaaaaagaaaacaaatctttatcaaattcagtagaggtgtattgaatacacattttgctgaatgctgaaaatgttaaagtcgacagttggtcaacatggatgtcatgttatagaaacaacatgtaaaaacaaaaatctgaactgttattaaataaagtttaattgttcaacttttgttataattttagaaattgcattttaaaacttgacattatagcacagaaacatttttttcagcattaacacctgatagcttgctcctatggtaattatattatacattagtgagactataaataggcattcattttccactgaggctagaggaggagcaacttctttggtctagctcctgcagcctagggtacagatgatgtagcaatataaccattattcaactttccctacctctgtaattctaactgactcagttcccctcttcttgagctcctgagcgggatggtgatgataaaatgatgccaatgatgcagcctcacaaactctctgtctacctggaaaaagatgttttctaaacattctttcggaatattttcagaaacagtcttgtaattttggctcttgctgatatttttatatctactattttcacaggcatttgctgctccactcaatcacttgggaaaaattgtccttactttggactagaacttttgcaatagaacaatatgcttggcttttagaatgacaatattgttccggaatttttagctggcactcagatttctgtctgcctctcattggcaaacatgacatttcagcaatttctctaaagaggaatgactggggggtatgtacagcaggcatcatgtaagaaaaactcacacctcacgacatatttgtttgatttattcagcagacttcagcaaaggaaagatgtgaaagcaacccttgattgttggtatgtctgaagatattggtattgtggtggtattacctgcaaagtatgtaataaggcttgcttttatttgctcagtctttggatgtgtattagctttcattctatcttggttgaacatcttatataagtgtaagataaggtagttcaaaatatcttgataacatgtagcctatttttgattaaagtccattttcattgcaattttacatttatgatgattaccaatattttaaagaaagtattcaggtgttaaaaagataatcaaagatggataagtgaacaaacatttgataaagtaaagttgaatatagatggtagaatctaggtggtagacacatgatacaaagttttaaaaacctttcttcttttggaaatttacataataaaatgttagttaaaataataaatctaaacaacatgccttacatttatacggtaagttaggatctctggggagagaaactgaggtttgcaaataggaggttcatagggagtgctcatatrcaatacttgtgagggatggggaaagcaggattaggcacagagaaaagttaaactgtgatgcagttgcaaaagcagcctcagctgatcctaaggggatccagaagctgagatgactatttagaataccagttgagtcaaggggccaaggcctttgcaccccgacttcaagcagttattggatgtaatctgctcacaagggggagaatgtaatcttgggcaaggcaggttcttcagtgagggcaacttacagaaaaagactcagcaatgagcctcagcactcatcattcctggctgcaggaagaatgagtgtctcaataatgtaccgcagtgtcacagcaacttattgatatttttaatgtgttaaaataactaggtagaaaggttacctacatgatcatgtatccattgatcacacatgagttcatagatgccagaactgaacatgtagcatttaactattcatctaaagctgaaaggtaacaccagattttgctaatacccacgctgaaacaaaagtttagtaccacctatacacaatggcatttgaaagatcaatgttttttcagaaagtcaagctgtaaattattttgaaaaacaaagcaaatcagtacatgttaaaataactttaagtggcttgagtactgccagtgcctcttatagaaacacgtctatgtttactgtg

SEQ ID NO: 61846 - DNA, 2291 bp, Homo sapiens
tagatttttaaaaaatttatggaagcttgtgttaactccaaaatggataattgagggattgaatcttaagagtgctttttaaaagtacttgaaagggtggaaaaggattccctaggaatattatataattttcaaatataaaaatataaaatttaatttcaacatagaaatagaacagcatctcaacaaaaagaaaacaaatctttatcaaattcagtagaggtgtattgaatacacattttgctgaatgctgaaaatgttaaagtcgacagttggtcaacatggatgtcatgttatagaaacaacatgtaaaaacaaaaatctgaactgttattaaataaagtttaattgttcaacttttgttataattttagaaattgcattttaaaacttgacattatagcacagaaacatttttttcagcattaacacctgatagcttgctcctatggtaattatattatacattagtgagactataaataggcattcattttccactgaggctagaggaggagcaacttctttggtctagctcctgcagcctagggtacagatgatgtagcaatataaccattattcaactttccctacctctgtaattctaactgactcagttcccctcttcttgagctcctgagcgggatggtgatgataaaatgatgccaatgatgcagcctcacaaactctctgtctacctggaaaaagatgttttctaaacattctttcggaatattttcagaaacagtcttgtaattttggctcttgctgatatttttatatctactattttcacaggcatttgctgctccactcaatcacttgggaaaaattgtccttactttggactagaacttttgcaatagaacaatatgcttggcttttagaatgacaatattgttccggaatttttagctggcactcagatttctgtctgcctctcattggcaaacatgacatttcagcaatttctctaaagaggaatgactggggggtatgtacagcaggcatcatgtaagaaaaactcacacctcacgacatatttgtttgatttattcagcagacttcagcaaaggaaagatgtgaaagcaacccttgattgttggtatgtctgaagatattggtattgtggtggtattacctgcaaagtatgtaataaggcttgcttttatttgctcagtctttggatgtgtattagctttcattctatcttggttgaacatcttatataagtgtaagataaggtagttcaaaatatcttgataacatgtagcctatttttgattaaagtccattttcattgcaattttacatttatgatgattaccaatattttaaagaaagtattcaggtgttaaaaagataatcaaagatggataagtgaacaaacatttgataaagtaaagttgaatatagatggtagaatctaggtggtagacacatgatacaaagttttaaaaacctttcttcttttggaaatttacataataaaatgttagttaaaataataaatctaaacaacatgccttacatttatacggtaagttaggatctctggggagagaaactgaggtttgcaaataggaggttcatagggagtgctcatatgcaatacttgtgagggatggggaaagcaggattaggcacagagaaaagttaaactgtkatgcagttgcaaaagcagcctcagctgatcctaaggggatccagaagctgagatgactatttagaataccagttgagtcaaggggccaaggcctttgcaccccgacttcaagcagttattggatgtaatctgctcacaagggggagaatgtaatcttgggcaaggcaggttcttcagtgagggcaacttacagaaaaagactcagcaatgagcctcagcactcatcattcctggctgcaggaagaatgagtgtctcaataatgtaccgcagtgtcacagcaacttattgatatttttaatgtgttaaaataactaggtagaaaggttacctacatgatcatgtatccattgatcacacatgagttcatagatgccagaactgaacatgtagcatttaactattcatctaaagctgaaaggtaacaccagattttgctaatacccacgctgaaacaaaagtttagtaccacctatacacaatggcatttgaaagatcaatgttttttcagaaagtcaagctgtaaattattttgaaaaacaaagcaaatcagtacatgttaaaataactttaagtggcttgagtactgccagtgcctcttatagaaacacgtctatgtttactgtg

SEQ ID NO: 61847 - DNA, 2291 bp, Homo sapiens
tagatttttaaaaaatttatggaagcttgtgttaactccaaaatggataattgagggattgaatcttaagagtgctttttaaaagtacttgaaagggtggaaaaggattccctaggaatattatataattttcaaatataaaaatataaaatttaatttcaacatagaaatagaacagcatctcaacaaaaagaaaacaaatctttatcaaattcagtagaggtgtattgaatacacattttgctgaatgctgaaaatgttaaagtcgacagttggtcaacatggatgtcatgttatagaaacaacatgtaaaaacaaaaatctgaactgttattaaataaagtttaattgttcaacttttgttataattttagaaattgcattttaaaacttgacattatagcacagaaacatttttttcagcattaacacctgatagcttgctcctatggtaattatattatacattagtgagactataaataggcattcattttccactgaggctagaggaggagcaacttctttggtctagctcctgcagcctagggtacagatgatgtagcaatataaccattattcaactttccctacctctgtaattctaactgactcagttcccctcttcttgagctcctgagcgggatggtgatgataaaatgatgccaatgatgcagcctcacaaactctctgtctacctggaaaaagatgttttctaaacattctttcggaatattttcagaaacagtcttgtaattttggctcttgctgatatttttatatctactattttcacaggcatttgctgctccactcaatcacttgggaaaaattgtccttactttggactagaacttttgcaatagaacaatatgcttggcttttagaatgacaatattgttccggaatttttagctggcactcagatttctgtctgcctctcattggcaaacatgacatttcagcaatttctctaaagaggaatgactggggggtatgtacagcaggcatcatgtaagaaaaactcacacctcacgacatatttgtttgatttattcagcagacttcagcaaaggaaagatgtgaaagcaacccttgattgttggtatgtctgaagatattggtattgtggtggtattacctgcaaagtatgtaataaggcttgcttttatttgctcagtctttggatgtgtattagctttcattctatcttggttgaacatcttatataagtgtaagataaggtagttcaaaatatcttgataacatgtagcctatttttgattaaagtccattttcattgcaattttacatttatgatgattaccaatattttaaagaaagtattcaggtgttaaaaagataatcaaagatggataagtgaacaaacatttgataaagtaaagttgaatatagatggtagaatctaggtggtagacacatgatacaaagttttaaaaacctttcttcttttggaaatttacataataaaatgttagttaaaataataaatctaaacaacatgccttacatttatacggtaagttaggatctctggggagagaaactgaggtttgcaaataggaggttcatagggagtgctcatatgcaatacttgtgagggatggggaaagcaggattaggcacagagaaaagttaaactgtgatgcagttgcaaaagcagcctcagctgatcctaaggggatccagaagctgagatgactatttagaataccagttgagtcaaggggccaaggcctttgcaccccgacttcaagcagttattggatgtaatctgctcacaagggggagaatgtaatcttgggcaaggcaggttcttcagtgagggcaacttacagaaaaagactcagcaatgagcctcagcactcatcattcctggctgcaggaagaatgagtgtctcartaatgtaccgcagtgtcacagcaacttattgatatttttaatgtgttaaaataactaggtagaaaggttacctacatgatcatgtatccattgatcacacatgagttcatagatgccagaactgaacatgtagcatttaactattcatctaaagctgaaaggtaacaccagattttgctaatacccacgctgaaacaaaagtttagtaccacctatacacaatggcatttgaaagatcaatgttttttcagaaagtcaagctgtaaattattttgaaaaacaaagcaaatcagtacatgttaaaataactttaagtggcttgagtactgccagtgcctcttatagaaacacgtctatgtttactgtg

SEQ ID NO: 61848 - DNA, 2291 bp, Homo sapiens
tagatttttaaaaaatttatggaagcttgtgttaactccaaaatggataattgagggattgaatcttaagagtgctttttaaaagtacttgaaagggtggaaaaggattccctaggaatattatataattttcaaatataaaaatataaaatttaatttcaacatagaaatagaacagcatctcaacaaaaagaaaacaaatctttatcaaattcagtagaggtgtattgaatacacattttgctgaatgctgaaaatgttaaagtcgacagttggtcaacatggatgtcatgttatagaaacaacatgtaaaaacaaaaatctgaactgttattaaataaagtttaattgttcaacttttgttataattttagaaattgcattttaaaacttgacattatagcacagaaacatttttttcagcattaacacctgatagcttgctcctatggtaattatattatacattagtgagactataaataggcattcattttccactgaggctagaggaggagcaacttctttggtctagctcctgcagcctagggtacagatgatgtagcaatataaccattattcaactttccctacctctgtaattctaactgactcagttcccctcttcttgagctcctgagcgggatggtgatgataaaatgatgccaatgatgcagcctcacaaactctctgtctacctggaaaaagatgttttctaaacattctttcggaatattttcagaaacagtcttgtaattttggctcttgctgatatttttatatctactattttcacaggcatttgctgctccactcaatcacttgggaaaaattgtccttactttggactagaacttttgcaatagaacaatatgcttggcttttagaatgacaatattgttccggaatttttagctggcactcagatttctgtctgcctctcattggcaaacatgacatttcagcaatttctctaaagaggaatgactggggggtatgtacagcaggcatcatgtaagaaaaactcacacctcacgacatatttgtttgatttattcagcagacttcagcaaaggaaagatgtgaaagcaacccttgattgttggtatgtctgaagatattggtattgtggtggtattacctgcaaagtatgtaataaggcttgcttttatttgctcagtctttggatgtgtattagctttcattctatcttggttgaacatcttatataagtgtaagataaggtagttcaaaatatcttgataacatgtagcctatttttgattaaagtccattttcattgcaattttacatttatgatgattaccaatattttaaagaaagtattcaggtgttaaaaagataatcaaagatggataagtgaacaaacatttgataaagtaaagttgaatatagatggtagaatctaggtggtagacacatgatacaaagttttaaaaacctttcttcttttggaaatttacataataaaatgttagttaaaataataaatctaaacaacatgccttacatttatacggtaagttaggatctctggggagagaaactgaggtttgcaaataggaggttcatagggagtgctcatatgcaatacttgtgagggatggggaaagcaggattaggcacagagaaaagttaaactgtgatgcagttgcaaaagcagcctcagctgatcctaaggggatccagaagctgagatgactatttagaataccagttgagtcaaggggccaaggcctttgcaccccgacttcaagcagttattggatgtaatctgctcacaagggggagaatgtaatcttgggcaaggcaggttcttcagtgagggcaacttacagaaaaagactcagcaatgagcctcagcactcatcattcctggctgcaggaagaatgagtgtctcaataatgtaccgcagtgtcacagcaacttattgatatttttaatgtgttaaaataactaggtagaaaggttacctacatgatcatrtatccattgatcacacatgagttcatagatgccagaactgaacatgtagcatttaactattcatctaaagctgaaaggtaacaccagattttgctaatacccacgctgaaacaaaagtttagtaccacctatacacaatggcatttgaaagatcaatgttttttcagaaagtcaagctgtaaattattttgaaaaacaaagcaaatcagtacatgttaaaataactttaagtggcttgagtactgccagtgcctcttatagaaacacgtctatgtttactgtg

SEQ ID NO: 61849 - DNA, 2291 bp, Homo sapiens
tagatttttaaaaaatttatggaagcttgtgttaactccaaaatggataattgagggattgaatcttaagagtgctttttaaaagtacttgaaagggtggaaaaggattccctaggaatattatataattttcaaatataaaaatataaaatttaatttcaacatagaaatagaacagcatctcaacaaaaagaaaacaaatctttatcaaattcagtagaggtgtattgaatacacattttgctgaatgctgaaaatgttaaagtcgacagttggtcaacatggatgtcatgttatagaaacaacatgtaaaaacaaaaatctgaactgttattaaataaagtttaattgttcaacttttgttataattttagaaattgcattttaaaacttgacattatagcacagaaacatttttttcagcattaacacctgatagcttgctcctatggtaattatattatacattagtgagactataaataggcattcattttccactgaggctagaggaggagcaacttctttggtctagctcctgcagcctagggtacagatgatgtagcaatataaccattattcaactttccctacctctgtaattctaactgactcagttcccctcttcttgagctcctgagcgggatggtgatgataaaatgatgccaatgatgcagcctcacaaactctctgtctacctggaaaaagatgttttctaaacattctttcggaatattttcagaaacagtcttgtaattttggctcttgctgatatttttatatctactattttcacaggcatttgctgctccactcaatcacttgggaaaaattgtccttactttggactagaacttttgcaatagaacaatatgcttggcttttagaatgacaatattgttccggaatttttagctggcactcagatttctgtctgcctctcattggcaaacatgacatttcagcaatttctctaaagaggaatgactggggggtatgtacagcaggcatcatgtaagaaaaactcacacctcacgacatatttgtttgatttattcagcagacttcagcaaaggaaagatgtgaaagcaacccttgattgttggtatgtctgaagatattggtattgtggtggtattacctgcaaagtatgtaataaggcttgcttttatttgctcagtctttggatgtgtattagctttcattctatcttggttgaacatcttatataagtgtaagataaggtagttcaaaatatcttgataacatgtagcctatttttgattaaagtccattttcattgcaattttacatttatgatgattaccaatattttaaagaaagtattcaggtgttaaaaagataatcaaagatggataagtgaacaaacatttgataaagtaaagttgaatatagatggtagaatctaggtggtagacacatgatacaaagttttaaaaacctttcttcttttggaaatttacataataaaatgttagttaaaataataaatctaaacaacatgccttacatttatacggtaagttaggatctctggggagagaaactgaggtttgcaaataggaggttcatagggagtgctcatatgcaatacttgtgagggatggggaaagcaggattaggcacagagaaaagttaaactgtgatgcagttgcaaaagcagcctcagctgatcctaaggggatccagaagctgagatgactatttagaataccagttgagtcaaggggccaaggcctttgcaccccgacttcaagcagttattggatgtaatctgctcacaagggggagaatgtaatcttgggcaaggcaggttcttcagtgagggcaacttacagaaaaagactcagcaatgagcctcagcactcatcattcctggctgcaggaagaatgagtgtctcaataatgtaccgcagtgtcacagcaacttattgatatttttaatgtgttaaaataactaggtagaaaggttacctacatgatcatgtatccattgatcacacatgagttcatagatgccagaactgaacatgtagcatttaactattcatctaaagctgaaaggtaacaccagattttgctaatacccaygctgaaacaaaagtttagtaccacctatacacaatggcatttgaaagatcaatgttttttcagaaagtcaagctgtaaattattttgaaaaacaaagcaaatcagtacatgttaaaataactttaagtggcttgagtactgccagtgcctcttatagaaacacgtctatgtttactgtg

SEQ ID NO: 61850 - DNA, 836 bp, Homo sapiens
caaatacacacacacacacacacacacagacacacacacacacataatgtctttacacacatggcattgccctatatataaaattctaacaaatgaaaaagtaattggatttttkaagtaaaaattaactttgatttataagccagattttaaataagactcacatttgaccatttaaccccgctcctgggacacattaattttgggcatacaaaatagggacatattttgagtcatggtccctaattttctggttttttttttttttttttttttttttgctagcctgaatttctgtgcttctagctccctttaagtccatttcacttatcttttgtagtccatatgtggtgtttcacctgtgtggacaaacacatctcagcttaccccagccacccagagtctgcacgcttcagtcactcccattgaagctgggtgaagaatttggacatttcttctgttgctcacaaattagtctctgcactttcttaccctgttctcctggtaaagacctgtgttgccaccagatgttctactcgccgctctactggggcatggctggtgaaaccacgtgtcctgtgttctctgcaaaacttagaagatgctgattcaccttttggcttctcacaggctttctttgctaaccacccagtttccctccagatttattcagatttagtctgtcacttggcaacagcacttggaggtttcttttttttaactggacatttacaaacatctcgggcattttggttggacaacacctatgtgctaggttctctttctgggctgtccaaggaggcatgttgttccttcaataaaaaagctccttatgc

SEQ ID NO: 61851 - DNA, 836 bp, Homo sapiens
caaatacacacacacacacacacacacagacacacacacacacataatgtctttacacacatggcattgccctatatataaaattctaacaaatgaaaaagtaattggattttttaagtaaaaattaactttgatttataagccagattttaaataagactcacatttgaccatttaaccccgctcctgggacacattaattttgggcatacaaaatagggacatattytgagtcatggtccctaattttctggttttttttttttttttttttttttttgctagcctgaatttctgtgcttctagctccctttaagtccatttcacttatcttttgtagtccatatgtggtgtttcacctgtgtggacaaacacatctcagcttaccccagccacccagagtctgcacgcttcagtcactcccattgaagctgggtgaagaatttggacatttcttctgttgctcacaaattagtctctgcactttcttaccctgttctcctggtaaagacctgtgttgccaccagatgttctactcgccgctctactggggcatggctggtgaaaccacgtgtcctgtgttctctgcaaaacttagaagatgctgattcaccttttggcttctcacaggctttctttgctaaccacccagtttccctccagatttattcagatttagtctgtcacttggcaacagcacttggaggtttcttttttttaactggacatttacaaacatctcgggcattttggttggacaacacctatgtgctaggttctctttctgggctgtccaaggaggcatgttgttccttcaataaaaaagctccttatgc

SEQ ID NO: 61852 - DNA, 836 bp, Homo sapiens
caaatacacacacacacacacacacacagacacacacacacacataatgtctttacacacatggcattgccctatatataaaattctaacaaatgaaaaagtaattggattttttaagtaaaaattaactttgatttataagccagattttaaataagactcacatttgaccatttaaccccgctcctgggacacattaattttgggcatacaaaatagggacatattttgagtcatggtccctawttttctggttttttttttttttttttttttttttgctagcctgaatttctgtgcttctagctccctttaagtccatttcacttatcttttgtagtccatatgtggtgtttcacctgtgtggacaaacacatctcagcttaccccagccacccagagtctgcacgcttcagtcactcccattgaagctgggtgaagaatttggacatttcttctgttgctcacaaattagtctctgcactttcttaccctgttctcctggtaaagacctgtgttgccaccagatgttctactcgccgctctactggggcatggctggtgaaaccacgtgtcctgtgttctctgcaaaacttagaagatgctgattcaccttttggcttctcacaggctttctttgctaaccacccagtttccctccagatttattcagatttagtctgtcacttggcaacagcacttggaggtttcttttttttaactggacatttacaaacatctcgggcattttggttggacaacacctatgtgctaggttctctttctgggctgtccaaggaggcatgttgttccttcaataaaaaagctccttatgc

SEQ ID NO: 61853 - DNA, 836 bp, Homo sapiens
caaatacacacacacacacacacacacagacacacacacacacataatgtctttacacacatggcattgccctatatataaaattctaacaaatgaaaaagtaattggattttttaagtaaaaattaactttgatttataagccagattttaaataagactcacatttgaccatttaaccccgctcctgggacacattaattttgggcatacaaaatagggacatattttgagtcatggtccctaattttctggttttttttttttttttttttttttttgcyagcctgaatttctgtgcttctagctccctttaagtccatttcacttatcttttgtagtccatatgtggtgtttcacctgtgtggacaaacacatctcagcttaccccagccacccagagtctgcacgcttcagtcactcccattgaagctgggtgaagaatttggacatttcttctgttgctcacaaattagtctctgcactttcttaccctgttctcctggtaaagacctgtgttgccaccagatgttctactcgccgctctactggggcatggctggtgaaaccacgtgtcctgtgttctctgcaaaacttagaagatgctgattcaccttttggcttctcacaggctttctttgctaaccacccagtttccctccagatttattcagatttagtctgtcacttggcaacagcacttggaggtttcttttttttaactggacatttacaaacatctcgggcattttggttggacaacacctatgtgctaggttctctttctgggctgtccaaggaggcatgttgttccttcaataaaaaagctccttatgc

SEQ ID NO: 61854 - DNA, 836 bp, Homo sapiens
caaatacacacacacacacacacacacagacacacacacacacataatgtctttacacacatggcattgccctatatataaaattctaacaaatgaaaaagtaattggattttttaagtaaaaattaactttgatttataagccagattttaaataagactcacatttgaccatttaaccccgctcctgggacacattaattttgggcatacaaaatagggacatattttgagtcatggtccctaattttctggttttttttttttttttttttttttttgctagcctgaatttctgtgcttctagctccctttaagtccatttcacttatcttttgtagtccatatgtggtgtttcacctgtgtggacaaacacatctcagcttaccccagccacccagagtctgcacgcttcagtcactcccattgaagctgggtgaagaatttggacatttcttctgttgctcacaaattagtctctgcactttcttaccctgttctcctggtaaagacctgtgttgccaccagatgttctactcgcygctctactggggcatggctggtgaaaccacgtgtcctgtgttctctgcaaaacttagaagatgctgattcaccttttggcttctcacaggctttctttgctaaccacccagtttccctccagatttattcagatttagtctgtcacttggcaacagcacttggaggtttcttttttttaactggacatttacaaacatctcgggcattttggttggacaacacctatgtgctaggttctctttctgggctgtccaaggaggcatgttgttccttcaataaaaaagctccttatgc

SEQ ID NO: 61855 - DNA, 559 bp, Homo sapiens
cagctcacttacaacctccacctcccaggtccaagcaattcagcttggtagactcaacctactgagtagatgggattacaggcgcccaccaccaaatacaaaagttttgtattttagtatttagtagaggtggggtttcaccatgttggtgaggctgttctcgaactcctgacctcaagtgatccacccatctcggccttctaaagtgctgggattacaggcataagccaccatgcccrgcctacttacttattcttgatgaaggatgaagggctgagaatctgggcaaagggccttagctaagaggcagagaaacctgcagagtctctagcagtctcagagggctgaaaagacaaaagttgctgttctgtctaccaaagtaactaggacttttagatccaagatttgggagaaaagccataaagaagtgagtagctctggggatggtggctcatggctgtgatcccaggactttggaaagctgaggcaggaggattgcttgagctcaggagtttgagaccagcctgggcaacatagtgagaaccccatctctataaaa

SEQ ID NO: 61856 - DNA, 649 bp, Homo sapiens
gtgtggtgggccacggtgacccactctggttggtcggtcagcacacagtgcggcgaccgcagctccgtggtagacggtgcactgggacccagcaaggctggccgtccctctggcggggtggtcagagccgcttcctggaaggcggatttcagccgaagtgctaatgtcgccaggacttcctggccgcggacctgcagaaggagctcccagaacagtgcaggccacggggctttaatgctgctcctccttctgcgtcccattttacaaaataacattaatagtaggttgatcacagttaattgttgttttgtagattgaaagcatttggagattgacaatttaataaagtttatattgttccagctaagcataaaaacttaaaaatttataaagcgccttctaaaacagtcactttgcttcaaacatttcaatcctcaaacccgccacgtgactaagttagggccggtatccttctcccggcctcaggtgaggaaactgcctgcgccaggttctctgggccgcgcggagccggggctgacacagctgcggggctggggtttccgatcccagcgcagagcgtctcccgctgctcctgcgggygtgaggctcccgggatgcccctccctgaagtgggtcgggacccgcatcg

SEQ ID NO: 61857 - DNA, 1527 bp, Homo sapiens
cagcgctggtacatgtgtgtctgtgtgtgtgtgtctgtatgtgtgtgtgcatgtacgtgtgtgtacatgcttcaggagtcagggccgcccccacagcgctagtacgtgtgtgtgtctgtgtgtgtgtgtctgtgtgtacgtgtgtgtgtacgtgtgtgtgtgcacactcttcagcagtcagagccgtccccacagtgctttccctggcttttctgcctcattcctacaggctccgctgtggtgactgcaggctcctgtccctgtaaatcagcccatcctcaacaccggctcttcactccttgcttcaaccacctacagtagcttcaaaccccaggaatgtggttataaaaatgaaaatatgtaaagtgagacgccatctaatgccacccttttggtggagagcagatttaggcttaagacagctggtgcctgagcgtttgcgagttcacgttctgaggcttgggaatgcttgcaagtggatatccaggcagcagcatcagtcggtggtctcaaaagcaacaggaagacatttttgtgttgccaggagaggcacattttatgacttactgtgctagaaatctgcatatacaaaatattgatggaatggagttaggatttttagggtcaaaaaatacacaccaagataagaattgtaaaaatataatgaacggttgggccagaattagtacaagcggaagtgactgaaaggaagtttggtgacgggagggtccctcgttgcggttactttggggagactgtgaatccttgagggagggtgtggcctggctccgcccagggttggcctctgacccgctgtgcagccccgggcgacccccagcgctcaggcctccgcgtcttcatctgaggagagtgggaaaaaatccttcagaggaaggagggctgccatggggatgatcctgaatcgctggtgtacctggagtacctgatgtgtgtctgctccgtgagttctctgggcgttggagctgccgttgttactgatggctgcagcccgttgttgggtgcctatggttgccgagcgctgagcttgacccgggctgtgtgctgggatcacttcagagctgcataaagcccggtgtccarggccgcatcccagactgactaagccggggcattcgggagcagaacgggctgccaggaggcgcccagcacgtggtccaggtcagggccggtggctgctccactggacaaatgggacaaacgggactcagggccaggtgctctcctgcctcactgggagggtgacagacggttgtggttgttgggacctctggcagagcagggaggggaccggagccagaggctgagacgggcgagtgggatcaataccagccagcaccgtgggcttcagtgcagggccctccagccaccctgccccagagtgcattcttgagctcctgctgtggggttctgagtgggggggtccctcctggcatcccccaggggctgtctgtgcctgcgttcctcctcttgccaagtcccggggacggggctacatctggggcttcc

SEQ ID NO: 61858 - DNA, 1241 bp, Homo sapiens
tctcccacccaaaccgtggagctgagcttcgaaggcaacactcccccracagatgtactgggagctgccgcagagtggaaagccggcaggctgctcatgtagaaaggggataaaagggggctgagtccagcccagacattgccctgagcggggcctccctgggaagcaactctgggtgtcaccactgtcatcgcccctaacggatgggaaaacaatctccacgccacagctgctaatgtgcttcccggcccggccaccctccaccctcgtcatctgtatttttccacgtcatggtccgttaacccctcgaggcccatggcagccccctgaggagcgagtgccctcaggccctggactgagcaggtctggagacaggggtgtcgtggtggggtggggaggagctgatgtcaggagagtcagcgctgagcacacctggaaccaggagagtgggaaacgttgccaccaatgctgagtgcctgctgtgcaccccaccatctcagggccccactcactgtgtaaggtgggattttactgtccctgctttatacacaagtgagctacattttgcagatgttaataaagaggcctaggccaccagaaccatgagccacaagtggggactgtgaccaccggatgctccaagcacaaagcccttgggcacccgaccctgccagtcactgcacacgcctgttttattggaagaggatttgggtcccagtccaagaatccatggtccccttggagctgtgctacacgggcctccttcctgcaaggcagcaccatccttcttccggtccaagtttggtcagaaattctacgaaacatgaagtgttacatccgcatcaccatttcacagactagaaaacccactgaaggagaaacagaatgacttgagcagaaccatccaagctccaggtgaagacagcgtcccacgagccaagccagcatcaaatttcactctggaatctcaagcatgaacccgacaaacagcaagcacagaccctggtgtccggatgggaggggatgcaggaggccctcgccaggagactgggaggagaaacaccaggagatcctgggctgcccacattggcagttcttaatccccagcacacgaggtcagccagattccagaccccactagaggaagggaaagagcacttggagaggacggccttgaacgctcagttcatcacaccaaaatgttcgtcagccctgctcttcccacagaattagagtacagc

SEQ ID NO: 61859 - DNA, 915 bp, Homo sapiens
  misc_feature (1)...(915): n = A,T,C or G
ataaatctatctttatatgtatacacacagaacacacacacacacatatrgggagagacagacagagggagagagagagcacaattagcttttcaacactttcacattagtgcaaatatccaagcaggatgtcctaattatcaattgcaaatttctccctttcagtatctttaatctagttgtctggataaagaggataaaaaaagatttctcaatgccatgtttcatatattttgtacttttttataaagcgaatgccgctcaacatgctcgttatctatcagcacgatgtgtattgaggattcgaactgatgcccagtaacgcttctgcattgttcctacctagaaatgctggcctttgacttgtcactgcagctctgatgagcagtacctggtgtgccttcagatgtggcattttatttctattctgtctaaaatctaaatggaaaagaaaaacaaacaaaccaacaattttgtctccacggagttctctttatcaagctagtgtggacattggaattaataatcatagaactataattgagcttaagtgtaaacttctgtaaaggatgattctgactccttatttacaatcttaccacttaaanacacctgagaggaatggcttaggcatcttacagtacattattcaagtggagtctttttcactgaaattgaacaacatgttgaaatgagcatagttttgatgctgttacattagtccaccctatcgcaatttggctttctgtgatgtcagttacccacaatacaatacaataagatattttgagaggaagagaaaagggccacattccagttacttttatcacaatatattgttataatggttctattttattattacttatttttgttaatctcttactgtgcctaatttataaattaaactttatc

SEQ ID NO: 61860 - DNA, 1541 bp, Homo sapiens
ctgcatactacatcctgacttacggaagattctatcttcacagtctaacaaattgaattaatagctaaccattctagcgatattgcgtaccatggacttggaatcttggtcattgcgtcttctgttttctggttttagatgtttagtaatggaagcttttaacataaacatgaattattattaataattgcaggcctggcactgtggctcactcctgtaatcccagcacttcaggaggctaaggcgggcggatcacctgaggtcaggagtctgagaccagtctggccagctcggcgaaaccccgcctctactaaaagtataaaaattagccgggctggtggtggtgcctgtaattccagctactctgtaggctgaggcaggagaatcgcttgaacctgggaggcggaggttgcagtgagccragatcgcgccactgcactccagcctgggcgacgcagcaagactctatccttagaactaaacaaaacaaaaacaaaaacagaaaaaaacatgaataataattgcaaacttcctgtaaattctactagattataataattcaaactcaatatgggtctttgtattgagaatctctctgagacagatttttaatttggaaaatatacttcattttcttaatcatgcttcctaatggataagattcttgttactgacttttcatctttgatcttttttcccttggatccactgattatgagaataaaagcattatttgtcaataccaatggtttaggtgatgatactagttttctattttaattttatattgttgaaccatatgattgacaagacaaacaatgctgaagattttaaggagagatgcatgccctgtgtttaatgaagaaaaatacaatggattggatccatcaagataaaaatattttgagaaaagaaataatagtattcagttccctgactgaacttaatgggtttacaatgatcacagtattttgcattaatctgttccctctaattcattctcatcctcatataaaataatataaaaatgctaccatttgtttatatcatttttctccaatgagcttacatatcgtttacttcataatattttttaaagtgacataattctttaatgtatcagaacttttttgaagaacaattatcatgtcttcttgattttcaagaaaaaaagtggatgtggattatattccaaaatattttgtaagagttgtgaaataaactgataaccttaaaagccacaacagaagataaatacaatgaacatgattatttttaaggcatgattgtcatcatctctaaccaatattaatagaaagaaacagatacaactgaacacaggcacgtgaacagaggcacatgaaaaagatatgagtgaaatgtgaaaatggctgttgagaaacactatccaaaaatgttagaaataatgaggtatagatcaaagtatatgcctggtcattaattggaagaaaataattggcaatattatgagattaactagctagctaactcataccgttcaaaatctctgaaatagttca

SEQ ID NO: 61861 - DNA, 844 bp, Homo sapiens
tcaaaactcagtggaggagtattaaatcagctgtgaccaaaatacaaaagaaattacttaaaaaaaaatcacatatcagactaaatatgttagtaaaaggaaacaatgtccaagaaacaaagcaaataggataaaaacaaaagggaaaattctccaaacataaggttgtaatatcaaaacaagagaaattcagaaaaaattatgtaaaacaacaagcaaattgagtgtatttaaggttcgggggtacatgtgcaagtttgttacgtaggtgcattgtgtgatgctaagttctgggttcctattgatcctgtcacccatatagtgaacacagggcccaacaggaaattttcagcccttatctccttccytctcataccccagtgtctattgttcccatgtttatgtctgtgtgtacccaaacacattgaatttctaaaactgaaaaccataaaatacaggttgtaatgtggacctcgtattttttcccctgtaaaaagaaagaaaaaaaaaaaaagtagtgctgatttcagggataatggtggtaggatgatagagtcaaattgacggtgggctacggttaggaccaaatgcaaaatatctaaagctcaaagaagggtattcaaaatctagtccatttaaacagaatccaaaacaaattaaagtgtgaagaaaatgtcaaatgtgttaaaaattctttaggtatttagttttggttggcagccaagtctttgtcctttgatatggattgacatctatctaaatttgagatgattttcattttattttgttacttttgcctcctgaagcagaatcccatcaacagcctcttcttgccaatagaaaa

SEQ ID NO: 61862 - DNA, 828 bp, Homo sapiens
taaactctttctcctctttactcttcacatgtgtttcccgaataaatctcttgtatatctaatcctgttttgcctgcttttcaaaaaatccaaactaacacaagtagtgccaggagtagcaggagaaaacaaaggtaaaatgaaattttgggactggtcaacaaatgacctaatggtcaaattgttgcaattggcatagcaaggttaacattaaaataaaagctatagctgctaccaggatactttggactccaggtgtagaaaggagtcaccatcttggctagagtaattgatggttataagcaggaggtggaaggactgcatttacatagttggtgccggtagacaaatatatggaacatgggttacccatgtggacctcttgagtaccctcatccccattgtaactgaatggacwtttacaacaattatagcctgagaagcccatgatttccaagggcttatgccctaaggaatgaaggttcggatcacaacacatgattaggcaccaagatctgtcaaagtaatagctgaaggttaggggattttttagaaaggacaaaggagaagagaaaggatgagtataatgtatgaccccaaaaccaactatagcagtggatggtgtagctggtgttaccagtctctctattttaagtttcccttaaataagggagggtaataggaaacatggtgatgccactccttaaacttgcattgagaatcagatttgtgcaatgcagtgggtgaaatgtagaatctgtgaaactatgcccagatcttgctctgcaaggagcataattgacagacagtgctagctgccagctttct

SEQ ID NO: 61863 - DNA, 828 bp, Homo sapiens
taaactctttctcctctttactcttcacatgtgtttcccgaataaatctcttgtatatctaatcctgttttgcctgcttttcaaaaaatccaaactaacacaagtagtgccaggagtagcaggagaaaacaaaggtaaaatgaaattttgggactggtcaacaaatgacctaatggtcaaattgttgcaattggcatagcaaggttaacattaaaataaaagctatagctgctaccaggatactttggactccaggtgtagaaaggagtcaccatcttggctagagtaattgatggttataagcaggaggtggaaggactgcatttacatagttggtgccggtagacaaatatatggaacatgggttacccatgtggacctcttgagtaccctcatccccattgtaactgaatggacatttacaacaattatagcctgagaagcccatgatttccaagggcttatgccctaaggaatgaaggttcggatcacaacacatgattaggcaccaagatctgtcaaagtaatagctgaaggttaggggattttttagaaaggacaaaggagaagagaaaggatgagtataatgtatgaccccaaaaccaactatagcagtggatggtgtagctggtgttaccagtctctctaytttaagtttcccttaaataagggagggtaataggaaacatggtgatgccactccttaaacttgcattgagaatcagatttgtgcaatgcagtgggtgaaatgtagaatctgtgaaactatgcccagatcttgctctgcaaggagcataattgacagacagtgctagctgccagctttct

SEQ ID NO: 61864 - DNA, 2100 bp, Homo sapiens
  misc_feature (1)...(2100): n = A,T,C or G
aaatatactgacaaaaccgataaattgtcagggctccttacaaaaggtatcaaatctgtttgtattttacagaacattcccangagtaattctaatttaagagcgttacttgaaaaaaacaatgaacctaagttaagggagatacagcatggaactgaaattttaattcttttggcaattcagatgggccattttatattacagtgtttacattagaaataagcatgaaaattgaaactttctcttatgagttagctagattttttaaatatcattgatatttacaggttatttctttctcaaatagaatatgtaacatatttgagtgagacgtttttatagatgactatctatatgtgttatttctgtcaaaagtagaaaagggctcaacacccaaaattatcctcttacagcctannnnnnnnnnnnnnnnnnnnnnnnnnnnnnnnnnnnnnnnnnnnnnnnnnnnnnnnnnnnnnnnnnnnnnnnnnnnnnnnnnnnnnnnnnnnnnnnnnnntataataccataggggggctcaagcattctgttatttatttatggatatgaaagtagaaatctctgggtggagaaaggaaaatgaaaggctaaaatttgcttctctcagctctaaattatagaaatacactcactatgtaagtaaatatcatattattcctccagtgtaaaccccaaagattttgcaaagaacrcatataaaaaagaaaaccagagagctatacattaactacacaggctgaaaaccttaatgtcaaatttaacctggagaggagtaataaaattaatgtcacttgcaaagtaccttaatgatcatacccattattattgtaaacagcataaatacaaaatgatccagaatctaaagtcttttaataatgaaaattctactgtctcaaacaaaattgctcagtagaacatcactgggtaaacatgctctcagcacaattctgtgaagtatcatgagtgattgcatctgatttctatttattatgcttagaaatggagttctcacactgcattcatcacagccatgtactgtagcttaaataatgcataaggaacatagcaagggacttattttcagagatcataactacacacttcttgttgataccagattctctaatcatcaaaattgcagatcaatgtcttctttctggattgttttgatacctgttcttggcatgttcctgtcaggaaaccgccaaacatcaacaaacatcaaaggaaagaacttttcaggtgttgtgatttgccattcaatactttactgaagcttcagggaaaggaaattgtagtaaaatgtggcaatacttttgaaaattaaaagagaaagggagaaaagaggaaatggagagaaaaggaaggagggaagggaggaagggaaaaaggaagggagggagggagggaggaaggaaaagaaggaagaaggaaggaaaaaagaaaggaaggaaggaagaaaagaaggaaaaagaaaggaaggaaggaaaaaagaaaggaaggaagtaagaaaaaataaagggaagaaaggaaggaaggaaggaaaagagggagggagggaagggaggaaggaagggagaaaggaaagaaggaaggaaggaggaaggaaggaagaaaatattatcacaatactgtcatagtgttacagttatttggaatatatgccctatgctaatttttctttttttttttttttaacttgagatggagctcttgtggccctggctgaagtgtagtggtgcgatctcagttcactgcaacatccacttactgggttcaagcgattctcctgccttagcttcccaagcagctgggattaaaggcactcgccaccacgcctggctaatttttgtatttttagtagagatgagtttcgccacgttggccaggctagtctcaaactcctgacctcaggtgatctgcctgcttcggcctcccaaagtgctgggattacaggtgagagacaccacacctggccaaaaagttttaaagtattctctcagcattcgaagactgtcagtttatttttctccttagttgcctttgatcacccttagccatcagagcaaggcctaatttta

SEQ ID NO: 61865 - DNA, 2100 bp, Homo sapiens
  misc_feature (1)...(2100): n = A,T,C or G
aaatatactgacaaaaccgataaattgtcagggctccttacaaaaggtatcaaatctgtttgtattttacagaacattcccangagtaattctaatttaagagcgttacttgaaaaaaacaatgaacctaagttaagggagatacagcatggaactgaaattttaattcttttggcaattcagatgggccattttatattacagtgtttacattagaaataagcatgaaaattgaaactttctcttatgagttagctagattttttaaatatcattgatatttacaggttatttctttctcaaatagaatatgtaacatatttgagtgagacgtttttatagatgactatctatatgtgttatttctgtcaaaagtagaaaagggctcaacacccaaaattatcctcttacagcctannnnnnnnnnnnnnnnnnnnnnnnnnnnnnnnnnnnnnnnnnnnnnnnnnnnnnnnnnnnnnnnnnnnnnnnnnnnnnnnnnnnnnnnnnnnnnnnnnnntataataccataggggggctcaagcattctgttatttatttatggatatgaaagtagaaatctctgggtggagaaaggaaaatgaaaggctaaaatttgcttctctcagctctaaattatagaaatacactcactatgtaagtaaatatcatattattcctccagtgtaaaccccaaagattttgcaaagaacacatataaaaaagaaaaccagagagctatacattaactacacaggctgaaaaccttaatgtcaaatttaacctggagaggagtaataaaattaatgtcacttgcaaagtaccttaatgatcatacccattattattgtaaacagcataaatacaaaatgatccagaatctaaagtcttttaataatgaaaattctactgtctcaaacaaaattgctcagtagaacatcactgggtaaacatgctctcagcacaattctgtgaagtatcatgagtgattgcatctgatttctatttattatgcttagaaatggagttctcacactgcaytcatcacagccatgtactgtagcttaaataatgcataaggaacatagcaagggacttattttcagagatcataactacacacttcttgttgataccagattctctaatcatcaaaattgcagatcaatgtcttctttctggattgttttgatacctgttcttggcatgttcctgtcaggaaaccgccaaacatcaacaaacatcaaaggaaagaacttttcaggtgttgtgatttgccattcaatactttactgaagcttcagggaaaggaaattgtagtaaaatgtggcaatacttttgaaaattaaaagagaaagggagaaaagaggaaatggagagaaaaggaaggagggaagggaggaagggaaaaaggaagggagggagggagggaggaaggaaaagaaggaagaaggaaggaaaaaagaaaggaaggaaggaagaaaagaaggaaaaagaaaggaaggaaggaaaaaagaaaggaaggaagtaagaaaaaataaagggaagaaaggaaggaaggaaggaaaagagggagggagggaagggaggaaggaagggagaaaggaaagaaggaaggaaggaggaaggaaggaagaaaatattatcacaatactgtcatagtgttacagttatttggaatatatgccctatgctaatttttctttttttttttttttaacttgagatggagctcttgtggccctggctgaagtgtagtggtgcgatctcagttcactgcaacatccacttactgggttcaagcgattctcctgccttagcttcccaagcagctgggattaaaggcactcgccaccacgcctggctaatttttgtatttttagtagagatgagtttcgccacgttggccaggctagtctcaaactcctgacctcaggtgatctgcctgcttcggcctcccaaagtgctgggattacaggtgagagacaccacacctggccaaaaagttttaaagtattctctcagcattcgaagactgtcagtttatttttctccttagttgcctttgatcacccttagccatcagagcaaggcctaatttta

SEQ ID NO: 61866 - DNA, 738 bp, Homo sapiens
caatcatcaacacaaaagacttctatgaccaatttgtaggggttttgccccacacactaagcagcagacaccagctccatgtcctccaattcaattccaacactatctacctggagatagtgtcagatcccattgcttgagggcccaatccgcacaaatgccccccaaattccccccacacaccagtcacaagtccaggcctcctgaatggccaatggcctggcttcaagttggagttcccacagccccattttggtttctattaatttgctggagctgctaacagaactcaggaaaatacttacttacatttaccagtttattataaagggtattacaaaggatacagatgaaaagatgcgtagggcgagttataagaaaggaggcgtggagcttccataccctccctgggctcacmaccctccatgaacctccagttttcagctcctaaaatgcatgttttctatcagagacagagtctcattttccagcttccaaatctggaaacaaataatcaatgagactttcttctttgttcaaagtaactggattcccctgagaaatatttgtacagttttactatcaaatgaattgcaggaataagccattttcttagaaaatgccagtagaacaataagtaacttctcattgtggaatagtttcagcactcttagcacaaatgaaattttctgatttgctaacgacaacatccccaaattaataatacagagtgaatgg

SEQ ID NO: 61867 - DNA, 622 bp, Homo sapiens
acactgtgttatacacataaggtcatgtacttctgttcagtaacttgctccctttcccaaagtagtagckggtaatcctttaagatgtaaacagattgatcatgcctttgctcacaaccctgcaaaggttcccatttcattcagaatgaaagtccaatccttgcactagcccaaagtgctgagtgatttgatacccttacatcatcagccccatctcccactactcatccacctattcaatccggccacatcagcgaatttgcttctcctagaacagaccaggcctgttcctgcctcaagattcttgcacgagctgttgtatttgcttggtgctcttgccctgccccatcccttcatctccttcaagcctttgccaaaacgtcactttctcaatgaggcctactctgaccactatatttaggattgtaaacccacccggatagcatggaattctccaaccaacttccttcacctgctcttcttcctttctccatcatacctaccacctggtaacagaatataaaaaacccttgtttatgaagcatattttactcttccctctcaccattgacatcatcaattccacgtgactgtaaaccaaagaagtgtctgagacaggtct

SEQ ID NO: 61868 - DNA, 813 bp, Homo sapiens
ccataacaaaaacctaagctattctccttttcttacgctctcaggccacttttcgcctgtttgagagtcctgccctgctctccccaaagacctcaattatggacttgtggctggggccacctgcctctgcagatgaccataacagctgtagaaaggtaaaatggtgtaaacattgcaatatatgttattttcaattgacaaatcctgcaaatcttttcatatcaataaatgctgcccctcatttttaagtgtgtatgatgaggccatttatccaatattttctaaataggtacttgaattatttctaatcttttgctattacaactgtgaattaaaactcacactgtcaattcagagaacaattgttcctttccacttttatggtgctttaaatatattaaaaatgaaaaaatatacacatacacacaacacaaagcacacacgcacacatacacatgtaaaagatagggtttcgctctatcacccaggctgaagtgcagtggcatgatcatatctcactgcagccttaaattcytaggctcaagcaatcctcctgcctcagcctcctcatgagtagctaggagtgtaagtgcgtaccactacgtctggctaatttttaaaattttttgtagagacagtgtctctattttgcccgggctaggctgtaacacttggctccaagcaccaagcaatccttctgcctaggactcccaaagtggtgggattataagcatgaaccatgtgtccagtctgaaaattaaaatatataatatcaaaacttctggaatgcagtgaaagtattgcttagaaatt

SEQ ID NO: 61869 - DNA, 1508 bp, Homo sapiens
gtggttcttagttgttttgtctgttttaaaaacttatgacatgctaagattccctcaaggggcatttttgctcttgtgaatgcaaattaccttagatttctcccaggatttttgaagtcatcttggatattctggtcttctgatttgtttcctaaaaggtacaaccataagattattcaaatgattagaaactttaaaaattgctagattcaaggttcactatacactgtgaccataactaatttttttcaccaaagtactccctttccacatgccaaatcaggaaacattcataaccaagaaacacttgttttcttcttcttttcttttttctttctttcttttttttttttttttgagacagattgtttcttcgttgaccaggctggagtgcagtggctcaatctcggctcactgcaacctccacttccyaggttccagcaattaacctgtctcaggctcccaagtagctgggattacaggcgcctgctaccacgcctggctaatttttttatttttttggtagagatggggtttcaccatgttggccaggctggtcttgaactcctgacctcaggcgattcacccgccttggcctcccaaagtgctgggattacaggtgtgagccaccacgcccagccaaaacacttgcgttgtaatcaactacgtgaataagtgttgttattcttacctacagaagccaggttcctgaagatttcttgcatcacatctctgtagagattcttttgagaaggatccagcaaagcccactcctcctgagtaaaggccacagccacatcttcaaatgacactgaatcctagaatatcgcacatatgtggagaggaggatggcttagacagacagtactaagaatctatactcatctcataaaatcgtaacataattctgcagacttcaaacatttcttccatgacctggtcatcagaactttactctctgtctgcacttactgctgcccactcaacattcttcatgctaaaatgaaactattcagaaagtcaacagcagagtaggaacacctgtctcattggcaggtgcagggaataaactgtgctgtaagaaatgaggtcacccctaatttctatgtgtagattttatcttaagggcctctcataacgaagtcatgctatttgttgtgtataacagttagtattaagtcttaagactacatatccttagaaatacctgctcacaaagtctgaccttttggtgtgagaaaatagatttttttgacggatctcatcaccctaagtgagtggttcacaatatgtaaacaatcttatgcaaacaatatattattcgctgaactccagttttgttttgtttctgaaagcctactactttactccattcttgcagtggtacctaggggatcagctctgaaaaacactctgagcattaagtctctaatgagcattcttggtaaacaatatttctcatatgctgttacaacttgttaactggagaaatgaggcatcaacgtgat

SEQ ID NO: 61870 - DNA, 885 bp, Homo sapiens
ttactgcctagctgtctgaggctacgggggtagatgatggagaactgttacttttttttctgagagacttagtatctcatggctgagcttaagctggatctatggagcactgatcccattgtctacttctgtgagctagtgctcctccatctagtttctaccatctagagacgaatcttatcaatacttgggtaaaccaaagacataagtcaggtaagggaatcctagacatagcccgactcttgcctttttcctcttctcactttaaatcttgttggctcagagagttaccctcagatggagtctctcaggagtaattagaacattgtacttctagagaagctggtggaacagggtagggttcccagttcaaagcttctgtcaaaaacttccagtctgygtgtagtaaataaatctagaaacgatcctagagctctggatggatcattaagagagggcaggatttctgtagatcagaataccaggacacatgttcatccgtcaccttccggggtcaaattctcggttaagcctgtgtggtagggctgtagagcagtgtgtgcctgggaaagcctctgatcacacatttcctcagggattttttaggcctgatgtccctttgaatttactttaacaatccttttgtaattttattttttacatcaattgtaacttagtattattatatatataggcatttgggtgtgtcttgaaggcatgtcctggtttcaaactgatttgtggtatattattgaattaggcccatttactggaattataaactgctatccaactacacaaagagctgaggattctggggaggtcaggatggagatgaaatagaagtgaggagaaaatagctctctctctcacatgcagattctt

SEQ ID NO: 61871 - DNA, 885 bp, Homo sapiens
ttactgcctagctgtctgaggctacgggggtagatgatggagaactgttacttttttttctgagagacttagtatctcatggctgagcttaagctggatctatggagcactgatcccattgtctacttctgtgagctagtgctcctccatctagtttctaccatctagagacgaatcttatcaatacttgggtaaaccaaagacataagtcaggtaagggaatcctagacatagcccgactcttgcctttttcctcttctcactttaaatcttgttggctcagagagttaccctcagatggagtctctcaggagtaattagaacattgtacttctagagaagctggtggaacagggtagggttcccagttcaaagcttctgtcaaaaacttccagtctgtgtgtagtaaataaatctagaaacgatcctagagctctggatggatcattaagagagggcaggatttctgtagatcagaataccaggacacatgttcatccgtcaccttccggggtcaaattctcggttaagcctgtgtggtagggctgtagagcagtgtgtgcctgggaaagcctctgatcacacatttcctcagggattttttaggcctgatgtccctttgaatttactttaacaatccttttgtaattttattttttacatcaattgtaacttagtattattatatatataggcatttsggtgtgtcttgaaggcatgtcctggtttcaaactgatttgtggtatattattgaattaggcccatttactggaattataaactgctatccaactacacaaagagctgaggattctggggaggtcaggatggagatgaaatagaagtgaggagaaaatagctctctctctcacatgcagattctt

SEQ ID NO: 61872 - DNA, 675 bp, Homo sapiens
aggactgagttcctgcaggagatatagtcaccccaaagggagttaccaggtccagatggaattatttccagtggaatgtgcacacaaattctttgacacaagtaaggaagtattactacttagttatctatatgtgaatctgcacagaaaactgaaagaactctgttgctaccttgcttttgcttttttgagggagaagacaatcaagtgtgaagccaggcaaacctttgaacattgttattaaggcagaaaaagccttcttcctctactttcccatcctctccttcctcactgtctgtttctccctctctgtaaacacaatgggacatttcatttcaagagtgtgtcttgttgaggtggggcagaagggtttggtggttttatcagactgtttaaccataaaaygtttttcatccctgtgttcctgtgccccaccatttcaggcacttggtatttttactgcctcacccccatcaacagagaaaaggtggatttgatgtcatttattatatactttaaagtaattttattttgctgaatttgtaaatacatgcaaatgaaatattttagagctacaaaaacaaccatggccagatatgtatgaacgaggtctttcccagtccccctctgggttttgcacagatttattctgagggtcccttagtccaaactggg

SEQ ID NO: 61873 - DNA, 851 bp, Homo sapiens
taaaagctacatccacctcagtacttttatctttgccccaggcactttctatttgccaagctgtgagctcagaggactaggtccataaaaagaggaastctttcttattcacacaaaggtgccatatagtctagctgtggtgctaccttagccatggcactacactgacctattttgtttgggaagacatttacaagggtgtttaatacagcattgtttgtaatagtgaatttggaaaatggataaagtatactatattcttatattggaaagctacagtgcacctagaagaaaataactattatatatacacatagattttaaaaacataataactttgagtgaaaatcaagttgcaaactattaatatgtacactacattacataaattttaaaatgtagttacatattttatacatatatatacacatatatttatacacatacatcacacatatttaccaaattaattttggtggtacttctgataagaaaaaaaaaagattagaacttgggggtgagaaacacaggagacttaaatttacctgcaatgttttattcattttaataagacctgaagcaaatacaacaaaaagtttactactgtcagctctagatggtagccatgcaattactcaagataaaaataaaaagactattttttaagaacaggcttagtgggaacttaagagtaggagagctaaaaggccattctgtgtgatcaatgagtgacatttcagggttcacagcttcagaggtggagcagttatggttgatgacaaggtccagggggtggtcatttgaatagctggctgaggtagagtggaggtagagatcaatagagtgtaaga

SEQ ID NO: 61874 - DNA, 851 bp, Homo sapiens
taaaagctacatccacctcagtacttttatctttgccccaggcactttctatttgccaagctgtgagctcagaggactaggtccataaaaagaggaagtctttcttattcacacaaaggtgccatatagtctagctgtggtgctaccttagccatggcactacactgacctattttgtttgggaagacatttacaagggtgtttaatacagcattgtttgtaatagtgaatttggaaaayggataaagtatactatattcttatattggaaagctacagtgcacctagaagaaaataactattatatatacacatagattttaaaaacataataactttgagtgaaaatcaagttgcaaactattaatatgtacactacattacataaattttaaaatgtagttacatattttatacatatatatacacatatatttatacacatacatcacacatatttaccaaattaattttggtggtacttctgataagaaaaaaaaaagattagaacttgggggtgagaaacacaggagacttaaatttacctgcaatgttttattcattttaataagacctgaagcaaatacaacaaaaagtttactactgtcagctctagatggtagccatgcaattactcaagataaaaataaaaagactattttttaagaacaggcttagtgggaacttaagagtaggagagctaaaaggccattctgtgtgatcaatgagtgacatttcagggttcacagcttcagaggtggagcagttatggttgatgacaaggtccagggggtggtcatttgaatagctggctgaggtagagtggaggtagagatcaatagagtgtaaga

SEQ ID NO: 61875 - DNA, 851 bp, Homo sapiens
taaaagctacatccacctcagtacttttatctttgccccaggcactttctatttgccaagctgtgagctcagaggactaggtccataaaaagaggaagtctttcttattcacacaaaggtgccatatagtctagctgtggtgctaccttagccatggcactacactgacctattttgtttgggaagacatttacaagggtgtttaatacagcattgtttgtaatagtgaatttggaaaatggataaagtatactatattctyatattggaaagctacagtgcacctagaagaaaataactattatatatacacatagattttaaaaacataataactttgagtgaaaatcaagttgcaaactattaatatgtacactacattacataaattttaaaatgtagttacatattttatacatatatatacacatatatttatacacatacatcacacatatttaccaaattaattttggtggtacttctgataagaaaaaaaaaagattagaacttgggggtgagaaacacaggagacttaaatttacctgcaatgttttattcattttaataagacctgaagcaaatacaacaaaaagtttactactgtcagctctagatggtagccatgcaattactcaagataaaaataaaaagactattttttaagaacaggcttagtgggaacttaagagtaggagagctaaaaggccattctgtgtgatcaatgagtgacatttcagggttcacagcttcagaggtggagcagttatggttgatgacaaggtccagggggtggtcatttgaatagctggctgaggtagagtggaggtagagatcaatagagtgtaaga

SEQ ID NO: 61876 - DNA, 851 bp, Homo sapiens
taaaagctacatccacctcagtacttttatctttgccccaggcactttctatttgccaagctgtgagctcagaggactaggtccataaaaagaggaagtctttcttattcacacaaaggtgccatatagtctagctgtggtgctaccttagccatggcactacactgacctattttgtttgggaagacatttacaagggtgtttaatacagcattgtttgtaatagtgaatttggaaaatggataaagtatactatattcttatattggaaagctacagtgcacctagaagaaaayaactattatatatacacatagattttaaaaacataataactttgagtgaaaatcaagttgcaaactattaatatgtacactacattacataaattttaaaatgtagttacatattttatacatatatatacacatatatttatacacatacatcacacatatttaccaaattaattttggtggtacttctgataagaaaaaaaaaagattagaacttgggggtgagaaacacaggagacttaaatttacctgcaatgttttattcattttaataagacctgaagcaaatacaacaaaaagtttactactgtcagctctagatggtagccatgcaattactcaagataaaaataaaaagactattttttaagaacaggcttagtgggaacttaagagtaggagagctaaaaggccattctgtgtgatcaatgagtgacatttcagggttcacagcttcagaggtggagcagttatggttgatgacaaggtccagggggtggtcatttgaatagctggctgaggtagagtggaggtagagatcaatagagtgtaaga

SEQ ID NO: 61877 - DNA, 851 bp, Homo sapiens
taaaagctacatccacctcagtacttttatctttgccccaggcactttctatttgccaagctgtgagctcagaggactaggtccataaaaagaggaagtctttcttattcacacaaaggtgccatatagtctagctgtggtgctaccttagccatggcactacactgacctattttgtttgggaagacatttacaagggtgtttaatacagcattgtttgtaatagtgaatttggaaaatggataaagtatactatattcttatattggaaagctacagtgcacctagaagaaaataactattatatatacacatagattttaaaaacataataactttgagtgaaaatcaagttgcaaactattaatatgtacactacattacataaattttaaaatgtagttacatattttatacatatatatacacatatatttatacacatacatcacacatatttaccaaattaattttggtggtacttctgataagaaaaaaaaaagattagaacttgggggtgagaaacacaggagacttaaatttacctgcaatgttttattcattttaataagacctgaagcaaatacaacaaaaagtttactactgtcagctctagatkgtagccatgcaattactcaagataaaaataaaaagactattttttaagaacaggcttagtgggaacttaagagtaggagagctaaaaggccattctgtgtgatcaatgagtgacatttcagggttcacagcttcagaggtggagcagttatggttgatgacaaggtccagggggtggtcatttgaatagctggctgaggtagagtggaggtagagatcaatagagtgtaaga

SEQ ID NO: 61878 - DNA, 667 bp, Homo sapiens
agaacccyggactgaggttgtgcttggcttgaggggcgggctggtaggtcacgccttggggcgtcgttggtcctctccaggcgtgtcacattctgccacgacatggtgccttggtactccccaaaagtcatgccttgatttttcttactaataatagtttacactgttttaccgcttcactgcttcacgtaagtaaagtaattatttcaaaaggaaatgttggtcatttataaaatggtggtaaagatggtacagcggattaatgtgaggattaaatgagatgatacatgaaagtgcttaaaacagtacagggtacttaccgttattattgttaagtagaaagtgagttctgggaaacagtgggtgtatggtccttcacagcaggttttggaaacgtctgatttccagcctaccctccttcctcctgttgccgtctgttgcctgattgttctcactggctgaaaggagataatccctgccactccattcatcactgaaaattcttgtcagtttggttgcttaggtacctactaagagttgccagcaggtggccccagagcacgcggttatgtttgtctttttgggtcccatgtttaattagtaatttagtagggacgtattgaatacttattccacactatggtacactgtaccaggggatataggg

SEQ ID NO: 61879 - DNA, 980 bp, Homo sapiens
aacgttaaggtgtgtgggcatcccctgtacctacagtgaagccaacaatgcaacctttcacaatgttgtgtaagcatgaaataccttgactacgggaaatgcgccaacatcgggatagtgttttctgctgtgacccactgaagtcagtgcaggaaactacacccctgagtgttggttcttytctagagtatataaacatcacccactgttaatcattctttaaaaaatcacaaattctgtggttcggttgtggcattcttctccatgggtcttgttcatgttaagcctttgtgatcaatcatattccatggttttagaggtctgttctcaaaaatgatatcaaattgtacaacaaagcagccatgtcctaagttttatgtactaatttaggtttctttgaaaagtgtggcctttacctatagtctctaatttttaataggatttccttcgatctttcttatctagaatagctagctcagggtttaatcctcattcttaaaagcatgaataggcagaagattatcgtggtcatcataaactaaatacatttggttcatttacttttgttatttttatatatttagggggtacaaatgcaggtttcctacatgcttatattggatagtggtagagcctgggcttttagtgtacccatcacttaaagagagtacattgtatccagtaggtaatttttcaaccctcacccccattccgacttcccactttatgtagtctccaatgtaggaataatagccatttgtatcatttaaattaaaattttgtaacactcagcctcttaaaaggcagtttatttggagatatattggtaaattaaacaaaatgatgtggcatttccttcaccatacctcagttcaagagtaagataattcttacatgatgccacatagggcttgtgagtctatcactgaaagaaacagtagaggcagaagtgagcactcttatccagactgattcttcat

SEQ ID NO: 61880 - DNA, 980 bp, Homo sapiens
aacgttaaggtgtgtgggcatcccctgtacctacagtgaagccaacaatgcaacctttcacaatgttgtgtaagcatgaaataccttgactacgggaaatgcgccaacatcgggatagtgttttctgctgtgacccactgaagtcagtgcaggaaactacacccctgagtgttggttcttctctagagtatataaacatcacccactgttaatcattctttaaaaaatcacaaattctgtggttcggttgtggcattcttctccatgggtcttgttcatgttaagcctttgtgatcaatcatattccatggttttagaggtctgttctcaaaaatgatatcaaattgtacaacaaagcagccatgtcctaagttttatgtactaatttaggtttctttgaaaagtgtggcctttacctatagtstctaatttttaataggatttccttcgatctttcttatctagaatagctagctcagggtttaatcctcattcttaaaagcatgaataggcagaagattatcgtggtcatcataaactaaatacatttggttcatttacttttgttatttttatatatttagggggtacaaatgcaggtttcctacatgcttatattggatagtggtagagcctgggcttttagtgtacccatcacttaaagagagtacattgtatccagtaggtaatttttcaaccctcacccccattccgacttcccactttatgtagtctccaatgtaggaataatagccatttgtatcatttaaattaaaattttgtaacactcagcctcttaaaaggcagtttatttggagatatattggtaaattaaacaaaatgatgtggcatttccttcaccatacctcagttcaagagtaagataattcttacatgatgccacatagggcttgtgagtctatcactgaaagaaacagtagaggcagaagtgagcactcttatccagactgattcttcat

SEQ ID NO: 61881 - DNA, 1169 bp, Homo sapiens
tcatatttgtaagtggcatggaacaacagatcattatggcataatattattttcaggattgactttaagttataatggtggtaacagtacttgaacagaaatatccaactctatcagggataaaaaggtgttatcaccatttgaaagattaggaaattatgtaatctgaaataagaacaaccttctccttgcatcaacaataattagagacctcaagatcaatgctatctcctttccaaaatragagagagagagagagaccttttcttcagccatatatacatacccttcaccccaccctccccatatagtggactaccagttacactatcacagataacaaaaattttgaaatcccttcacacacttacagtgaaagttacatgaaaactctcatttaatctctggaaaagataaagagtctctgaagagacaaaaagccttggttgtgccatatcacatcaaccacaataaagcttttagtcaggaagatggcacaatgtagaggtattttaagcagttttgaaattagatgtgcacaaaggaagcagagaaaatatctatattgttcaccctttaggtgaagatctagtagcctcatgtaaaaggtcaggttgggctaagtggctctaccatgtcaggctaagcgttcaagtcttgctgatacagtatgctcctatattaaaatatctcagttcaaatcatctgtctaagcttctttatgtagaaaccaagtcttactcatgatggaatcccagtgtctagtgcacagtaagcattccataaatccttgttgagcccctgcagaggcgtacatttcattttattagccatcaaatttcaaggtcctcccagggatggtctaaacaggattttgctcgagttctaatcaaggactatacatagaggagcagagactcctaatgcttcaaagggcaattagcaccgctttaactcattcacaaatccttaaaaattcgagcacatacttttacactggacatacttttacactggaggatggccctttcaataaaggcaaatcatttagaagtctaatacaatatttcatttggatagatgtcctggtgctgttcaagcacagtgaagaatactgtaaaactttaatttggtagagcacaaaggtatcttttaaattcctttatttt

SEQ ID NO: 61882 - DNA, 1169 bp, Homo sapiens
tcatatttgtaagtggcatggaacaacagatcattatggcataatattattttcaggattgactttaagttataatggtggtaacagtacttgaacagaaatatccaactctatcagggataaaaaggtgttatcaccatttgaaagattaggaaattatgtaatctgaaataagaacaaccttctccttgcatcaacaataattagagacctcaagatcaatgctatctcctttccaaaataagagagagagagagagaccttttcttcagccatatatacatacccttcaccccaccctccccatatagtggactaccagttacactatcacagataacaaaaattttgaaatcccttcacacacttacagtgaaagttacatgaaaactctcatttaatctctggaaaagataaagagtctctgaagagacaaaaagccttggttgtgccatatcayatcaaccacaataaagcttttagtcaggaagatggcacaatgtagaggtattttaagcagttttgaaattagatgtgcacaaaggaagcagagaaaatatctatattgttcaccctttaggtgaagatctagtagcctcatgtaaaaggtcaggttgggctaagtggctctaccatgtcaggctaagcgttcaagtcttgctgatacagtatgctcctatattaaaatatctcagttcaaatcatctgtctaagcttctttatgtagaaaccaagtcttactcatgatggaatcccagtgtctagtgcacagtaagcattccataaatccttgttgagcccctgcagaggcgtacatttcattttattagccatcaaatttcaaggtcctcccagggatggtctaaacaggattttgctcgagttctaatcaaggactatacatagaggagcagagactcctaatgcttcaaagggcaattagcaccgctttaactcattcacaaatccttaaaaattcgagcacatacttttacactggacatacttttacactggaggatggccctttcaataaaggcaaatcatttagaagtctaatacaatatttcatttggatagatgtcctggtgctgttcaagcacagtgaagaatactgtaaaactttaatttggtagagcacaaaggtatcttttaaattcctttatttt

SEQ ID NO: 61883 - DNA, 1169 bp, Homo sapiens
tcatatttgtaagtggcatggaacaacagatcattatggcataatattattttcaggattgactttaagttataatggtggtaacagtacttgaacagaaatatccaactctatcagggataaaaaggtgttatcaccatttgaaagattaggaaattatgtaatctgaaataagaacaaccttctccttgcatcaacaataattagagacctcaagatcaatgctatctcctttccaaaataagagagagagagagagaccttttcttcagccatatatacatacccttcaccccaccctccccatatagtggactaccagttacactatcacagataacaaaaattttgaaatcccttcacacacttacagtgaaagttacatgaaaactctcatttaatctctggaaaagataaagagtctctgaagagacaaaaagccttggttgtgccatatcacatcaaccacaataaagcttttagtcaggaagatggcacaatgtagaggtattttaagcagttttgaaattagatgtgcacaaaggaagcagagaaaatatctatattgttcaccctttaggtgaagatctagtagcctcatgtaaaaggtcaggttgggctaagtggctctaccatgtcaggctaagcgttcaagtcttgctgatacagtatgctcctatattaaaatatctcagttcaaatcatctgtctaagcttctttatgtagaaaccaagtcttactcatgatggaatcccagtgtctagtgcacagtaagcattccataaatccttgttgagcccctgcagaggcgtacatttcattttattagccatcaaatttcaaggtcctcccagggatggtctaaacaggattttgctcgagttctaatcaaggactatacatagaggagcagagactcctaatgcttcaaagggcaattagcacmgctttaactcattcacaaatccttaaaaattcgagcacatacttttacactggacatacttttacactggaggatggccctttcaataaaggcaaatcatttagaagtctaatacaatatttcatttggatagatgtcctggtgctgttcaagcacagtgaagaatactgtaaaactttaatttggtagagcacaaaggtatcttttaaattcctttatttt

SEQ ID NO: 61884 - DNA, 1169 bp, Homo sapiens
tcatatttgtaagtggcatggaacaacagatcattatggcataatattattttcaggattgactttaagttataatggtggtaacagtacttgaacagaaatatccaactctatcagggataaaaaggtgttatcaccatttgaaagattaggaaattatgtaatctgaaataagaacaaccttctccttgcatcaacaataattagagacctcaagatcaatgctatctcctttccaaaataagagagagagagagagaccttttcttcagccatatatacatacccttcaccccaccctccccatatagtggactaccagttacactatcacagataacaaaaattttgaaatcccttcacacacttacagtgaaagttacatgaaaactctcatttaatctctggaaaagataaagagtctctgaagagacaaaaagccttggttgtgccatatcacatcaaccacaataaagcttttagtcaggaagatggcacaatgtagaggtattttaagcagttttgaaattagatgtgcacaaaggaagcagagaaaatatctatattgttcaccctttaggtgaagatctagtagcctcatgtaaaaggtcaggttgggctaagtggctctaccatgtcaggctaagcgttcaagtcttgctgatacagtatgctcctatattaaaatatctcagttcaaatcatctgtctaagcttctttatgtagaaaccaagtcttactcatgatggaatcccagtgtctagtgcacagtaagcattccataaatccttgttgagcccctgcagaggcgtacatttcattttattagccatcaaatttcaaggtcctcccagggatggtctaaacaggattttgctcgagttctaatcaaggactatacatagaggagcagagactcctaatgcttcaaagggcaattagcaccgctttaactcattcacaaatccttaaaaattcgagcacatacttttacactggacatacttttacactggaggatggccctttcaataaaggcaaatcatttagaagtctaatacaatatttcatttggatakatgtcctggtgctgttcaagcacagtgaagaatactgtaaaactttaatttggtagagcacaaaggtatcttttaaattcctttatttt

SEQ ID NO: 61885 - DNA, 1169 bp, Homo sapiens
tcatatttgtaagtggcatggaacaacagatcattatggcataatattattttcaggattgactttaagttataatggtggtaacagtacttgaacagaaatatccaactctatcagggataaaaaggtgttatcaccatttgaaagattaggaaattatgtaatctgaaataagaacaaccttctccttgcatcaacaataattagagacctcaagatcaatgctatctcctttccaaaataagagagagagagagagaccttttcttcagccatatatacatacccttcaccccaccctccccatatagtggactaccagttacactatcacagataacaaaaattttgaaatcccttcacacacttacagtgaaagttacatgaaaactctcatttaatctctggaaaagataaagagtctctgaagagacaaaaagccttggttgtgccatatcacatcaaccacaataaagcttttagtcaggaagatggcacaatgtagaggtattttaagcagttttgaaattagatgtgcacaaaggaagcagagaaaatatctatattgttcaccctttaggtgaagatctagtagcctcatgtaaaaggtcaggttgggctaagtggctctaccatgtcaggctaagcgttcaagtcttgctgatacagtatgctcctatattaaaatatctcagttcaaatcatctgtctaagcttctttatgtagaaaccaagtcttactcatgatggaatcccagtgtctagtgcacagtaagcattccataaatccttgttgagcccctgcagaggcgtacatttcattttattagccatcaaatttcaaggtcctcccagggatggtctaaacaggattttgctcgagttctaatcaaggactatacatagaggagcagagactcctaatgcttcaaagggcaattagcaccgctttaactcattcacaaatccttaaaaattcgagcacatacttttacactggacatacttttacactggaggatggccctttcaataaaggcaaatcatttagaagtctaatacaatatttcatttggatagatgtcctggtgctgttcaagcacagtgaagaatactgtaaaactttaatttggtagagcacaaaggtatcttttaarttcctttatttt

SEQ ID NO: 61886 - DNA, 500 bp, Homo sapiens
ggtcagaagttcaagacaagcctgaccaacatggtgaaaccccgtctctactaaaaatacaaaaattagccagatgtggtggcgcttgcctgtagccccagctactcagggggctgaggcagaataatcgcttgaacccaggaggcggaggttgcagtgagccgagatcgcgccactgcactccagcctgggtgacaaagcaagactccgtctcataaataaataaataaataaataaataaaatcagtcatgcctttcatcaactttgtgaaaaggaaagagaattgggggaaaaggaaaaaaaaaaacagagcacatgttcataactgtttttgtgccatggactcctccaaataaagtgtgtaaatgccttaaataaacaacgcaaagggaaawtttacatagaaatagttaacaaaacattaaaaacaaaaatctgtggccaggtgtggtggctcacacctgtaatccagcactttggtaggccgaggcaagtgga

SEQ ID NO: 61887 - DNA, 949 bp, Homo sapiens
ctgtgacctacgttaaaaggtaatttaaaaaaaaaacgaaacatagaatcatgactcatacagattgaacatgaacatgtgttagagattttatttaactcaatctatgagagaactaggcagatattataactggatcaaaagagaatacaaagaacatgtatagatcaagaatattgaatgcacaaaaaaagggcaaaactgacttcttccacagagggagcgggaatcaattgaacctctaccagaagggacaaaacttgaatgtttacagagaataattattttgcaatgctatcagctagctacagtttacaaagttgtgaaatagctcccatagaatccaaatcagataaaagatagcagaagggtgtgtgatggacaacacatagttttccaaatatgtgcagacattttccttacaactgttagaaaagcagaagtatcttttacaataaaacatgggcatcccaggttcctttttctgttttatatacatgcaaaaatatacaagtgtgtatgtgcatatgtatttgcatatgctttttaaaataaaaatttcacaaaaaagaacttaatcctgtattcatgcaatgtaccctgatactttttattctattctttgttaatgctggtatccacacaaattaatttcgtgactccttaatgggttactacccacgaatgggtcaaggattcacagtttgtaaacasgggactagatcagtgctcctcaaactgtctgttgtgaagcaccagtttttaaatatttgacagttttcagtccttcacatactgactgatgcttttgtaaaacacaataaaaataaattattagaaaaatgaaatgaaaaaactcccatagacttatgaaatgcaagctcaactttttattattagatttaacagacataaaattggatgctggggcaaggtcaaattcctattt

SEQ ID NO: 61888 - DNA, 1326 bp, Homo sapiens
tgcattttcctttgcttccaaaatacccattggatcataactatttcccacttctacccgtactatgctgcgggaagcttgagggtatagcttagtcctgttcatctttttgtttttttatttttttgttaactcttcagctaagacagagtaagaggtaatttatcgtatggctctttcactcagccacaagtgaacacagaartagtccagaatgtcacaggtctggggcaaaggaccaacatggacagtttttgttatgagcaaggtgagcctcagaggtagtctcggtgatcagatgacgatgaagttctagatccattgagagaagctctagatccatgcagttcaacaacttgtaccagcatttccagcctctgccattccatgtttctactcctgcggcctccactggtgcacagactagtgatttacttgaacctttgcctcatctttcttttgcgcttcagcctgcacattcacttcttcctccacttggctctcatggcacagaggtttccaagaagatggcgctaaggctgagacctcatctttttattgtcagttctaagcattcagtagctggcacacagtaaatgtttcacacttatttattgttgaatgagtgaatgtagcatcttcagatttatgttctgtcctctcctacctacctgccctgttaccataatccccaacttctttctactattgtgtgtgtatgtgtgcatttatatacgtgtatatatacgtatatatacgtgtgcatatatgtacacgtatatatatatacgtgtgtatatatgtacacgtatatatatatacgtgtatatatattttatttttctggactgagtcttcattcttaactttaataaaccattgagtttaaaacaaacatataaactctcaaatgcagccagactggtggattacatagagactataaaaggaatgagtaagcaaaaattagaagtgctcaatactacagagggagaaggtacttttgagtatagacacacagtgctaactctttaagtagctctaaacctacagagatgggacaaagggggcagttgagagcttcagctttgtaggtagacaaacctggagttgaatgagggtactgccctctctaggcttctccttcaccactagtaaaatgaaagagataaccagtgcaggaccaagtgagatcattgttgtccagtgtttgccacattgagaggtcccgataagaattaactatagagtgaggctgtgaagggtcaacacacacaatcatgtcactgcaaataattactattttattttttcctttccaattgc

SEQ ID NO: 61889 - DNA, 895 bp, Homo sapiens
gagatgagaaacaatggcctgggtcctggagtcatctaggggaggtggatgctctgtctagtcatagcccgctcttggatttgctctcccagggagtcagcagtgtggaggagaagatgttgtggtggagagaagtggtggtagacaggagccctcggaatcactgggcttcttttaaatcctagtgaggtgccaggcacggtggctcatgcctctaatcccagcactttgggaggctgagcaggcggatcacttgaggtcaggagttcgagaccagcctggccaacatggtgaaaccctgtctttactaaaaacacaaaaattagctgggcatggtggtgcacgcctgtaataccagctacctggtaggctgaggctggagaatcgcttgaacccgggagacagaggttgcagtgagctgagtcacaccactgcactccagcctgggtgacagagcgagattctgtctaaaaaaaaaaaaaaaagaaaaatgatatgacaggagggaagtagggaacatacagttcacagggtctgagtagctgctcagtagtgcaaaggatccctgaacctgccagtctgtggctctcaatttcttcctgacaccaattgagtaagagatgatttcctccaagaatgtactggctatgyaataagcaccaggctctcagctacacagaataaaaaagatgaataaaacacagtgccctcaagggcctcacagtctagttaaggagacaaattgtcaacaattattgcaagtctgtgacataggtgctcagagtgatattattacatggtgctcaggatggtgctcagaatgatattattacagtgtgctaaggaatatagcagttcattgtgccgagaggtcactgagaagcttctacatgca

SEQ ID NO: 61890 - DNA, 1499 bp, Homo sapiens
tgcagaaattttctcccattctatatatagtctgtttactccgttgatggtttcttttgctgtgctgcactttttttttttttttttttgagatggagactcactctgtcacccagctggagtgcagtggcatgatcttggctcactgcacctctgcctcctgggttcaagcaattttcctgcttcagcctcccargtagctgggattacaggcacaggccacaatgccacaaaaaaaatgcttatttttgtatttttagtagagaaagggtttcaccatgttggacaagctggtcgtgaactcctgacctcaagtaatccacccgtcttgacctcccaaagtgctgggattacaggcgtgatttttagaattttctattgacattcataagtgacagtggtctgtagttttttgttcatctctatctttatcaggttttattaaagttaatctcattatgtaaaagaaattggaaaaatatgttccttttcttttgctccagataaatttaaacaaaattagaattatcagttgtttattacttaacattttgttttgaagaattacagattttcagaaaaaaaattattttaaaactacaaaagttgctatatacctagattccctggaggtacatacatgtttttctgaagtgcttgagattaagttgtagatatattttttaaccctgaattctttagtgtatatttcctaaaaacaaggacataggcttatataaccacaatacaattatcaaaatcaggaaattaacagatacaatactatcatctaatccataggccttattcaaattttattagttttcccaataatatcttttccagaaaaatattttttctggttcagaatccaatacagcatcacacatgcatttagttgtcatgttcctctagtctctttcaatctggagcaatttatcagtctttttctttcttaaccctgatatttttgaagggtataggctatttgttttatgtaacatccctcaattgtagtttgtcatgactagattcgggccacacatttttggtcagaaataccacagaaatgattttctgtccttctcagtgagttatatcaggaggcacatgtatgtttgtctcattacaagtgatgttatctttgatcatttgattgtgttgtctgccaggttgtccactgtaaagaatgtctgttccttaatagttcggtaaaattcccctagaaacatagcattttttctaatggatggaatggtaactatttcaaaacttccattactccccaaatttccttaagctggccttttgtaatcactccatttcccaattcctaaccccggacaaccactgatctgttctctgtccctacagttttgcttcttcagaatgccatataaatgaaaacataaagtatgtaacattttgagactggcttctttcactcagtctaatgcatttgagatttgcctatattgttgcctgtatcaatagtctgt

SEQ ID NO: 61891 - DNA, 648 bp, Homo sapiens
agcaggaccgtcccacttgtatttgcattgaggtcattgatggaaatggtgggggatggtgggggcaccaacaagtaacgcccttaaagtgagcgggaatttgagggcagtttgacgtcatggtgaatttcacctctcagtccggcctggttttgaaccctcgccccactccacccctggtttcacgatttggcggaaagggtccaggattgtagggactcttccaactctgatcccagacccctgcccaagtgagattttaaaggttaatgcccctaagggtgggttctgggcccaagaaatctgactccagtagctggtattacccacagagggccagggctcgtgggaaacaagagacggagctgggagcaagaactttgttagacaggagttcaattacagttggcccaattcctggttgtgtgatcatgggcaagtaacttcacagagsctcagtgtactcatctttgaaatggggaccacaatctcatcttgaaggaatattgtgagaaacagcccagcgcctgggcctcagataggcagggatctacaagagtttcctggtccgcacaggggattctgtaagatctccatggatactttccgaatctccatctccccggactgtcccggggtactcttcag

SEQ ID NO: 61892 - DNA, 783 bp, Homo sapiens
ccttcttctcctgtctcttctgaaaatcacttatccctcatatttaggtgggggagcagtaccttttctgattgtgtcactgcaaagaatgacatatccttcctccttcatgttgaactcctcagttgttcttttagaagacaatggtacctgccagtgtaagtggaggaagccaaatagcaggtgttataggaaagtactgtaaagcagcataaaattcacagcatgttcatagaatgtcagaattaaaagggaatttaggaatccctcgatcccataaaagttcatatatcagatgtggaaacagaggcccaaatgattttctcaaagccatacccttaggggtgagaattagaaccctaactcctgactcccagcactgtttctactaactcctrtctcatcccatctcaacccccatatccactggcaaaatagaacactccataaaatcaaccacaatttcagacaagatgaagtaatgcatgatgctaaatataggaagttaagtcatttggatttttgtttgtttgaactcaagtgttttaaaattttatcttatgaatattattataaatctgatttgggttttattctttagcaatttacttatcttaagtggtggcaccaatgtttattttcctgctgcaaaactgtcaatgttcccaaatattggtacaggaattgtaaatgatttatgcctgctgattgagtctctcactacaaatcacattagccctgaagcaggcagacatgcccatatcttcctctgagtcagtgcct

SEQ ID NO: 61893 - DNA, 1255 bp, Homo sapiens
ttttgactatgtgacatattattcaatttcagagcttcataatatgctctcagctatgaatctaataatatcctagaacttacatataaatttaaaatcaaatttaaaccacttatgttttctttgtaaagatttgtgtgtatgtatgtgtgcatgtggtgtgtattctggcaatagtggtattaaatttctgaagagaataaaaatgtgttaaaaatattatataagtaatccgctcagaatttttcaaaatatattagaaaatagaacctctatcttctaattaaatattgagaattagccattactgcccaaataaaagttgtgaaaatagttaaataccaaactacaagtaagatagttatggaggtaatatatttactatttatttttatttatttattttttttgagatggggttttgttcttgttgcccaggctggagtgcaatggcgcgatctcggctcactgcaacccccgcttcccaggttcaagtgattctcctgcctcagcctcctgagtagctgggattacaggtgtccgctaccatgcccggctaattttttgtatttttattagagatgcggtttcaccatgttggccaggctggtctcgaactcctgacctcaggtcatccacctgccttggcctcccaaagtgctgggattacaggcgtggccaccgcgcccagccatacatttactatttaaacagttcttaaaaacatataagacaacctttgaaaatcaaagaaattattaaacaaatgccatgagtagatacagaattcattaaagaggaattaacaatgggtaaacaaacatgaaaaggcacagcttcactcataataaaaaacgcaaaataaaatatctctgaaattcacagcagcttaattcagaaaacccaaaaactggacgtaacccagrtatatatcaacaggagaatcaataaataactgggtatattcatgcaatggaatactactaaacaataaaatgggggaggaaaatctgctggtacatgaaacaatgtggaagaatctcaaaaacatgccaagtgaaaaaatgtatatctcaaagcgtacatactgtatctgtccatttacatggagttctggagctgcctttagtaaactgtgattttaaaaattgaaaatggtatttgcctctgggaaggtgggagcaggtattgggggcagggtttgatggaaaggggtatgaggcaactttttggcataatggtaacatcctgtatt

SEQ ID NO: 61894 - DNA, 766 bp, Homo sapiens
gaggggaagctacaaattttgattaacaaaaataacaggagagttttgccacaatttctctgtaagttactaaagcactattaaacctacttgatagaatgtgcaacggacaaatgcacaagtgagggaggaagccagttcctactctagatttcttttggtgtacactgaaacatggtaatagcatggtttctaaggatatggtggtggttggcaattggcagacatggcaactagtttatactctcaaatggacattcattctttgagcgtgtacaaaatctkttttcccagcttgtctctttctctagaatgcagggccttgtctaagtacaataatgtgcctcaaagaggccttgcttcatagcaaaggcacaatctcagcaggaccagggtatgtatcaaaataggacacatgtgctatctggtatcattcatgtaattttcaggaggttttacctgacggtatatattaggttgccatgcaaattattacctccaaacctgatcaaggcacccatcatacagtcaaatcattgccttatatcaaacactatctgctcatttttacagagtcctttttctatcaatgaatcttctcaagtcctaagaggaaactcctcctctgtttcttgcatcagtagattgttcagcctttacccaagaaatctaactgttctctactttttttttgtcatttcacttactatgactgcagacttctgagttctggtcatcttggagtttcttcaagtttttatgccat

SEQ ID NO: 61895 - DNA, 766 bp, Homo sapiens
gaggggaagctacaaattttgattaacaaaaataacaggagagttttgccacaatttctctgtaagttactaaagcactattaaacctacttgatagaatgtgcaacggacaaatgcacaagtgagggaggaagccagttcctactctagatttcttttggtgtacactgaaacatggtaatagcatggtttctaaggatatggtggtggttggcaattggcagacatggcaactagtttatactctcaaatggacattcattctttgagcgtgtacaaaatcttttttcccagcttgtctctttctctagaatgcagggccttgtctaagtacaataatgtgcytcaaagaggccttgcttcatagcaaaggcacaatctcagcaggaccagggtatgtatcaaaataggacacatgtgctatctggtatcattcatgtaattttcaggaggttttacctgacggtatatattaggttgccatgcaaattattacctccaaacctgatcaaggcacccatcatacagtcaaatcattgccttatatcaaacactatctgctcatttttacagagtcctttttctatcaatgaatcttctcaagtcctaagaggaaactcctcctctgtttcttgcatcagtagattgttcagcctttacccaagaaatctaactgttctctactttttttttgtcatttcacttactatgactgcagacttctgagttctggtcatcttggagtttcttcaagtttttatgccat

SEQ ID NO: 61896 - DNA, 766 bp, Homo sapiens
gaggggaagctacaaattttgattaacaaaaataacaggagagttttgccacaatttctctgtaagttactaaagcactattaaacctacttgatagaatgtgcaacggacaaatgcacaagtgagggaggaagccagttcctactctagatttcttttggtgtacactgaaacatggtaatagcatggtttctaaggatatggtggtggttggcaattggcagacatggcaactagtttatactctcaaatggacattcattctttgagcgtgtacaaaatcttttttcccagcttgtctctttctctagaatgcagggccttgtctaagtacaataatgtgcctcaaagaggccttgcttcatagcaaaggcacaatctcagcaggaccagggtatgtatcaaaataggacacatgtgctatctggtatyattcatgtaattttcaggaggttttacctgacggtatatattaggttgccatgcaaattattacctccaaacctgatcaaggcacccatcatacagtcaaatcattgccttatatcaaacactatctgctcatttttacagagtcctttttctatcaatgaatcttctcaagtcctaagaggaaactcctcctctgtttcttgcatcagtagattgttcagcctttacccaagaaatctaactgttctctactttttttttgtcatttcacttactatgactgcagacttctgagttctggtcatcttggagtttcttcaagtttttatgccat

SEQ ID NO: 61897 - DNA, 766 bp, Homo sapiens
gaggggaagctacaaattttgattaacaaaaataacaggagagttttgccacaatttctctgtaagttactaaagcactattaaacctacttgatagaatgtgcaacggacaaatgcacaagtgagggaggaagccagttcctactctagatttcttttggtgtacactgaaacatggtaatagcatggtttctaaggatatggtggtggttggcaattggcagacatggcaactagtttatactctcaaatggacattcattctttgagcgtgtacaaaatcttttttcccagcttgtctctttctctagaatgcagggccttgtctaagtacaataatgtgcctcaaagaggccttgcttcatagcaaaggcacaatctcagcaggaccagggtatgtatcaaaataggacacatgtgctatctggtatcattcatgtaattttcaggaggttttacctgacggtatatattaggttgccatgcaaattattacctccaaacctgatyaaggcacccatcatacagtcaaatcattgccttatatcaaacactatctgctcatttttacagagtcctttttctatcaatgaatcttctcaagtcctaagaggaaactcctcctctgtttcttgcatcagtagattgttcagcctttacccaagaaatctaactgttctctactttttttttgtcatttcacttactatgactgcagacttctgagttctggtcatcttggagtttcttcaagtttttatgccat

SEQ ID NO: 61898 - DNA, 745 bp, Homo sapiens
ttgactagaaggaatgaggcaagaactggaattcttggaaatctgagaagttagagacaagtgacttgccactcctgagacagagtcctttcctcgagtgaagaaactgtcacagcctgactgccttcattctttctatctccccaacctactgtgtgccacataagatcacctggtttaaggcaattttataggaagggaggttttacaaaaaaaaaaaaaatactcctcaagtattgaaaagacatccaagatatttaatataaggataaagcaaaagagaataggtttttaaagtttgtttcgaaatatgtaaaagatgttatactatatatatgtgcctttggaaaacaagcctggacttaagcgcaagacttttaggagtttattaaagcaaacatgggaaaatataaataattatttatcaagtacctgaggttatgaagatgagagtctagaaaaaaagtagcacactcaagacctcccttgaagagcttccaatttcccrtgggaggagagtcacatgcagaatataataatatgtggttagctcctacgtttgagggaacagtctacagggatttaaatatttcagagaaggatctctgcatgctagctggatagaaaatgatttttgggagaattgagagagaagatggagctttaaaggaagtgtagaatctggatttgcagaagggaaaggaagagcattttaggcagtggtagaggaacataacaggagtgg

SEQ ID NO: 61899 - DNA, 1296 bp, Homo sapiens
taattgtagtcaagtcaccagaggaaatattcaaacccagatggcttattggcctgaaacagaagcagcaacaatgaggtrtgaactagagttggtgaaaccaaggcttacccaggagcaactgttctgtggaggtctggcttcacatcccaaacccgtcagtcttggccggaaaggagggagggagtgcctcctccttttgggatgatgagttgatcatgaccacttacagagcttctactgtgttgctcttggagtatgtttattttgtacatcgtttccttcagcaaagcccttaaaactggatttgtgtgaactccaaataacctgaaggataggatttactccacagcatgagtcagcatcagaaactgccaagctgctttccaacctgcctgcaccatgtttctatcccaccaaccagcatcccgtacattgctggtgggttggaagaatagtacaggcaagctggaaaactgctactttacagtttagttgctccacattttttttttttttttgagacagagtctcgctctgtcacccaggttggagtgcagtggtgcaatctcagctcactgtaacctctgcctcttggattcaagcgattctcctgcccagcttccagagtagctgggattacaagcatgtgccaccatgtccagctaatttttgtatttttattagaaatggggttttgccatgttgtccaggctggtctcgaacagatgacctcaggtgatccacgtgcctcggcctcccaaagtgctaggattataggcgtgagccaccgcagccagcagttgctccacattcttacccacatttggcactgccaatttttaatttttaaaaaagttttctgacagtctagtagtgcatctcatttgcacaagcagcatcttacttgcatagtggttttgatttgcatttctgtaatgagtaaagaagttgaacatcttttcatgtatttatttaccattgatatgactcctttggtaagctgaaagaactagaagccaaatatatttgtcatgttaataaaggcaaacaataaactcacctattaaaacactgagattgggttagaaagcaaaatccaactacacattgcatacagtgagacatacctaagacaaagtactgtagaaagcttcaaagtagaattatgggcaaagataatgccacagaaatgcaaatgaaaaaatgtggacatcaatatttatattggaaaaggttgaatttatggcaaaatacatgaaacaagaccaaaactggaagtacagtgtaataaaa

SEQ ID NO: 61900 - DNA, 2820 bp, Homo sapiens
agggggaaaacaacagcaaaacttaggcagcggagcagcaggaatagcagccttccatgtttcccgagtgtttggaagaacatccaagtcccagcccggagcggcctccgcagaggcgccggggtgcaggggcggcgggcggccgcacttaccatgactgtggccgcggccgcggctgcctgggcggccaccgcagcttggttggcttggtgctgcgcagctttgattttggcctgcaagtgtgcaggagggtgaaaatatttgcatttctccctcatgcaacgcccctttatgtaatccatacaaacggttacggtgttgtcacttgtgtcgatcatggtgctgtctgcggggtgtgcaaagcggcagtcggtctctccccgggcacagtttcctcgctggaactccctgcatacctaagacagggaagaagagccgcgctgcagaggcaagcctgagcccaggcgcccctgcggccccggccaccgcgggaggagcggaggctgcctcgctttcaatggtggctcatgtaccactgacaagaaaagattgattatgcggagcccaggtaaccacaatctctgacacagtcatttgagttttgttttaccgccttttctagggtgaaaatctatattgagaaaataatacgaaatctgcagttcagctaaaataacaaaggaaaagcaacaaggcctccattgtccctgggtagcatattatgcagctgtctatcgatctgtctgtctgtctatccatccatccatatatctatcatctatctatttatccatgcatccattccttcatctatcatctaccatcaatcaatctatccaatcatctatccacctgttcattcatccatcatctattatctatcatctatcaatctatccctctattatctattatccatctatctatccatccacccatccatctatccatccatccatccatccatccatccatctattatctgttaatctatcattatttttaatggtaaaaactgcaattacttttgcaccaacctaatattatctatcatctatctacctacctaccatctatctatccgtccatccagccagccattcattcatccatctatcatctatccatccagccatccatcatctatcatctactgatctatctaaaatctatcaattaattaatcatctatctaatctagttacctacctatctatatacctgcttacctacctataatctatctatttaatctgtcaatcacctataatctatctacctctctctatatcttcaatcacctacttgtatgacaattctgacaatgctataggtttttttttgtgtgtgtggagggataatttcacctatatcaagctaccaggtcatagctgtacaaaaagaatcagagaaaatgacgacaaacttgttcctcctctctctaagggggtggggtggggtggggtggggggaatctgaacactcctgtttcccactccttctctcctgctctacaaagataacataatcataaatcagaagaacaatatctaagacaccaaaattttcatttttaaggtcactatactatttttgacagcacagaaaagaaaaaaaagacaaaaggagagaaatacggcaagagatatagagaaagaaaaatggagggaaatagtttattttaaaaattctttaatgctaaattatcctgaaatctcaagtaactaggattctctatcccctgagaattctggtggatcaagattttactgtatgaaaaaatatttctttagaatttgaagagtattcttaattatgccctgcatatagataacataaaatagcataaataacatatgcatgttgcttatataattcttctctgctcataaatattagcaggaaataattatgagtagaatcgtaagttatttayttttaggctccaattccaaagtggatatgtaaatgatcatcacgctgatcattagtgatgttatatgaagggcccctgacatgaaattcaagtattgtggaagtcagacatacttaggaaatactgtttcactgaccagtgaccaggccagcttgaaggtagatagcataaatcaccagattgttaattgtttcctcctactttggatattagccaacattctaactttagttcataaaatgcgcaaaataaatcactaagatgttcccacggattctgagcaagccttcctccatcaatggaatgacttctgtctgatagcatcataggtgtggaccagccatcaggctcctaccaaggtgctttgtgtgcagctgacttcattcctggtttgaaatgaaccaaaagccgctctgctaaaatcattgtgattcatttttacatgtctttgtctaccagccctgttgagaaggacaatttgttcccaattccactgatttaatttgttttctaaagtacagtcacatactgaacacaaaagctccgtgggtccagcaggtggagcccaaaacacttttccagtcctgtgaaaggtctattcagtaattgacaagggtaggctggatcttttcaaaatagtaacaattagagtttccattctcttcatctgggcatccagattgaaactaagtgaaaaaataaatatcttctaaaatatttgcagtttgaaattctgagttttaaaacttgcacaggttattaggcagccacattttattgccttcaaggtttattgggttaatatttaaacaaatgcacattgaaagaacattctctaataatcccactaacagaaagcactgtgtacgtcctaaccagatgca

SEQ ID NO: 61901 - DNA, 2820 bp, Homo sapiens
agggggaaaacaacagcaaaacttaggcagcggagcagcaggaatagcagccttccatgtttcccgagtgtttggaagaacatccaagtcccagcccggagcggcctccgcagaggcgccggggtgcaggggcggcgggcggccgcacttaccatgactgtggccgcggccgcggctgcctgggcggccaccgcagcttggttggcttggtgctgcgcagctttgattttggcctgcaagtgtgcaggagggtgaaaatatttgcatttctccctcatgcaacgcccctttatgtaatccatacaaacggttacggtgttgtcacttgtgtcgatcatggtgctgtctgcggggtgtgcaaagcggcagtcggtctctccccgggcacagtttcctcgctggaactccctgcatacctaagacagggaagaagagccgcgctgcagaggcaagcctgagcccaggcgcccctgcggccccggccaccgcgggaggagcggaggctgcctcgctttcaatggtggctcatgtaccactgacaagaaaagattgattatgcggagcccaggtaaccacaatctctgacacagtcatttgagttttgttttaccgccttttctagggtgaaaatctatattgagaaaataatacgaaatctgcagttcagctaaaataacaaaggaaaagcaacaaggcctccattgtccctgggtagcatattatgcagctgtctatcgatctgtctgtctgtctatccatccatccatatatctatcatctatctatttatccatgcatccattccttcatctatcatctaccatcaatcaatctatccaatcatctatccacctgttcattcatccatcatctattatctatcatctatcaatctatccctctattatctattatccatctatctatccatccacccatccatctatccatccatccatccatccatccatccatctattatctgttaatctatcattatttttaatggtaaaaactgcaattacttttgcaccaacctaatattatctatcatctatctacctacctaccatctatctatccgtccatccagccagccattcattcatccatctatcatctatccatccagccatccatcatctatcatctactgatctatctaaaatctatcaattaattaatcatctatctaatctagttacctacctatctatatacctgcttacctacctataatctatctatttaatctgtcaatcacctataatctatctacctctctctatatcttcaatcacctacttgtatgacaattctgacaatgctataggtttttttttgtgtgtgtggagggataatttcacctatatcaagctaccaggtcatagctgtacaaaaagaatcagagaaaatgacgacaaacttgttcctcctctctctaagggggtggggtggggtggggtggggggaatctgaacactcctgtttcccactccttctctcctgctctacaaagataacataatcataaatcagaagaacaatatctaagacaccaaaattttcatttttaaggtcactatactatttttgacagcacagaaaagaaaaaaaagacaaaaggagagaaatacggcaagagatatagagaaagaaaaatggagggaaatagtttattttaaaaattctttaatgctaaattatcctgaaatctcaagtaactaggattctctatcccctgagaattctggtggatcaagattttactgtatgaaaaaatatttctttagaatttgaagagtattcttaattatgccctgcatatagataacataaaatagcataaataacatatgcatgttgcttatataattcttctctgctcataaatattagcaggaaataattatgagtagaatcgtaagttatttatttttaggctccaattccaaagtggatatgtaaatgatcatcacgctgatcattagtgatgttatatgaagggcccctgacatgaaattcaagtattgtggaagtcagacatacttaggaaatactgtttcactgaccagtgaccaggccagcttgaaggtagatagcataaatcaccagattgttaattgtttcctcctactttggatattagccaacattctaactttagttcataaaatgcgcaaaataaatcactaagatgttcccacggattctgagcaagccttcctccatcaatggaatgacttctgtctgatagcatcataggtgtggaccagccatcaggytcctaccaaggtgctttgtgtgcagctgacttcattcctggtttgaaatgaaccaaaagccgctctgctaaaatcattgtgattcatttttacatgtctttgtctaccagccctgttgagaaggacaatttgttcccaattccactgatttaatttgttttctaaagtacagtcacatactgaacacaaaagctccgtgggtccagcaggtggagcccaaaacacttttccagtcctgtgaaaggtctattcagtaattgacaagggtaggctggatcttttcaaaatagtaacaattagagtttccattctcttcatctgggcatccagattgaaactaagtgaaaaaataaatatcttctaaaatatttgcagtttgaaattctgagttttaaaacttgcacaggttattaggcagccacattttattgccttcaaggtttattgggttaatatttaaacaaatgcacattgaaagaacattctctaataatcccactaacagaaagcactgtgtacgtcctaaccagatgca

SEQ ID NO: 61902 - DNA, 486 bp, Homo sapiens
attactaaaattctgttacstagagtctccgagggtttgaattagtgtgcctcagacatccgtggtgcataattcttcaaaatattaatactagattgtactagggttcagggttgtctcttaaaatgtggacacttacacaaataccctgtagagttgaaaataattttaaacataaaatatttgaataagtacaattaagtagcttttaacatgtttggtgtgaaagtttattctgtggaagaatcaaagagccagtcaaaatactactaaatgtatgattctgtacttactgaaaatgaaatatcatatagaaacatttatctttcttttgataataacatttactcagtgcttactatgtgctaggcatttttctaagccttatgcatgtgttaactcatttaatcacacaacagtcctgagaagaagatacaataattatttcattgaacggatgaagaaaaaagtcaagtaattgctcaa

SEQ ID NO: 61903 - DNA, 486 bp, Homo sapiens
attactaaaattctgttacgtagagtctccgagggtttgaattagtgtgcctcagacatccgtggtgcataattcttcaaaatattaatactagattgtactagggttcagggytgtctcttaaaatgtggacacttacacaaataccctgtagagttgaaaataattttaaacataaaatatttgaataagtacaattaagtagcttttaacatgtttggtgtgaaagtttattctgtggaagaatcaaagagccagtcaaaatactactaaatgtatgattctgtacttactgaaaatgaaatatcatatagaaacatttatctttcttttgataataacatttactcagtgcttactatgtgctaggcatttttctaagccttatgcatgtgttaactcatttaatcacacaacagtcctgagaagaagatacaataattatttcattgaacggatgaagaaaaaagtcaagtaattgctcaa

SEQ ID NO: 61904 - DNA, 2500 bp, Homo sapiens
aaaatactagttaaaaattgcgtctgtactgaacatggtcagacttttgtcttggcattattccctaaacagtaaagtataacagctatttacattagcattcactttgtattaggtgttataagtaatctagagatgatttaaagtatataggaagatgtgtataggttatatgcaaatactaggccgttgtatatcagggacttgagcatcctgaattttggtatctgtgggaggtcctggaaccagttccccatggaaactgtgggatacagatgtcatgtgatggtgtttataaggcttcaggaagtaaacccccatagagtggttgtcaattactctggcttcttttaattctctaaatggctagctctaattaaaaaaaaaattttgtgggtacatagtaggtgtatatacttatggggtgcatgagatgtgttgatacagacatgcaatgtgaaataagcacatcatggagaatggggtacccctyctctcaagcatttatcctttgagttacaaacaatccaattatattctttaagttatttaaaaatataccattaagttattgttgactatagtcaccctattatgctgtcaaatagtaggtcttattcattctttctgtttttcttgtacccattaaccatccccacctcctcgctccaaatggccaactctaactcccaccttcctccccactctcaactagataatctgataaatatcttagcttaaatgttaaatgtcccatcctctggagtcatccctgacctctaaactaaggagagctccctgcaatgcattcacaccgcctatcatggcattgatcactctattttaattgtcattttaatatcacagggcttggcacatggaaggggttcaatacatatttgttgaaggaaggaaggaagatcactggataacatgcacccgtcgtatgaggtttcctgtacggttggggtttgaggagaagttcgggaagtagacagaaaaggcctgccctccctagcaggagaaattccaaggctcagataaaaatgtttcatgggatttctattcacccatggggctgcagacattaatgaatgtggtatcaaaaaatctagactctatgaagtcaaacagccactagattggtatatttgtcagtgttctctaaaaaacagaactaataggatagatgtatatatgaaggggagtttattgggagaatcgactcacacgatcacaaggtgaagtcctgcactaagctgtctaccagctgaggagctaggaagccagtccaagtcccaaaacctcaaaagtagggaaaccaacagtgcagccttcagtctgtggccaaaggtccgagagcccctggcaaaccactggtgtaagtctaagagtccaaaaaccaaagaacttggagtccgatgttcgagggaaggaagcatcctgcatgggagaaacatgaaggccagaagactcagcaggttgttcattccacatccttctgcctgcttttttctagccttgctggcagccgattagatggtgcccacccagattgagggtgggtctgcctctcccagtccactgactcaaatgttaatgtttggcaacactctctcagacacacctaggaacaatactttgcatccttcaatccaatcaagttgacactcaatattaacatcacaactggtttcatgtaaggttgatatatgattatggtccacactaaccaaactacccccgtgactcagaagacattgatattctcattaaataaaataatttccaaatgaagcatctggtgcctggaaatttgtttccctgaatctctaaagaactgatgggctatttttagtctcactgatttctcttaactggcacattttcagttaatgaataaaattaagagaattaacaatccttatcggtaagaggggtttctcccttcatcaagccaacaaacagctctccccatcacaagacacaagtagtatgagaaattggaactgcccagccaaccaaaatgcatttaaaatttttttaaagactgggtgcagtggctcacgcctgtaatccccgcactttgggagggcaaagtgggaggattgcttgaaccaaggagtttgagaccagcctgggcaacacagtgcgaaccagactctacaaaaataaaaaaattagactggcatggtggtaagcacctgtagtcccagctacttgggaggctgacgtaggagaattgcttgagcccaggaggtcgagactgcagtgagctatgattgtgccactgcactccagcctgggtgacagagtgagaccctgtttcaaaaataaaaataaaaaatttttaaaaggcttaaacatgctatgaaatggcaaactacaaacaattcacctactttgcctttcttcctcatttactagttgttatgctttgtttatttaaaatagtcacaaaattaatgtcaggggccagtgccagtggtgcttgaaagaa

SEQ ID NO: 61905 - DNA, 1353 bp, Homo sapiens
tcattatacccacttcagagaacgttgattatctgctcagcatccctttctggataaccactcttctccgatcaagttgtcctggttgagctgataactacagtcctcctctaaggattttccaggcyagagctggtggaaaatgctgtctcttgcatttggtgtctttgtgctgggatgatataaaatcaaggctactagtggccatctcctccagcaacttggaagaagtcttcctgcaatgagagcaacacacacaagaagacagaactgaacagaccagagaactctgatgcaatcatttgagtccttggattcagccatagatggaagaaagatccatcccttcatttttcaagtacctgagctaaaatattaccttctttgagcttaaactactttgggttgtttttattttattttttagtcactttaacctgaaagagtcttgactccactcctgtcctacctacttcacaggattattgtgcagagttagtgaaatataaaacatgaaagcataaagtattactaaaacaaaagaaaggatcatgttaattttctaagagccatatttacccatgttccaaatgaaccatacataaagaaaatagcttaaagatttttcatctttaaaaatacatgcaaaaattaaatttccagtttttctaacaatcttaaagatgaataaaatcataaatagaaaaataatctttcagaaaccttagttttcctgggatagactcggcaatgcagagttctttatacagacctggacctcaaataattgtcttggaagcaattcaacaagtaaacaaagataattaaggagaagaagaaaatgagaacaccacataaattacaaaccatctataatgaaactcatagtcctctaagggaacacagccagccttgtatagatgatactccataatttctcttacttatttaacctccatctcttctctccaccacacagtttcattaagtcaaaatagtttggacacctaggctctgtaggtgctcaaaggaagtacataccacatttctatctctcagggcacaatcatctggattgtaaatgcacagggaacaatgattcttgacagaaagtggtaagaactatgataaatgcacaaaatatgctatttatgggtggagataattccgaattccagaaacattcatgttaaagctcttatttgattgtctcagagcagaaattggcagacttcagcccaaaggccagatccagcccactacttatttttgtatagcccacgagctaagaatgaagttgcatcttaagatggggaaaaactcaacataagaatgatacatagcaacacatgc

SEQ ID NO: 61906 - DNA, 1404 bp, Homo sapiens
gtactattcagaaaaaataggtttaagaataagtcatctttcctctactgcaagggtataaatcctgggtatttctgataaatgtgttggaatttagactttttttttctaccagagacagccacccccacagtagactgcactgccaaggaaaagaatggtgggctaggaatacacacaaacgcagagaagctgctccctttgctgccggaacccagctgagattctctgctattccaggaattcatactactagcagcaaagcagtggtatctccataaacatccttggccttctgataaagtgagaagataaagaagagtttgacaagataaccaggagagagttttgtatcaatctttgatttcagcataaacctctctcgtaggcttggagtgagtgcttgctagagtcttcctcctagtttggccaagtgagacaagggtgtcccagttattaatgaaccatgacatgtaaagagaaaacctgaggtagtcaactgacattttataaaggtcagaggttactgtaaaagaatgtgtgcagagacaacaatcattcttctattatacaaggaggaaaatccagatgcaaagaatggtaagactagaggagacctcaagaggtcaggtagttcagcccttgcctccaggcaggagaacattcaatcatccaaaaaaaaaaagaaaagaaaaaagccaagaggaaataaaatgaactcaactcaaaaaactggatcctattttggaaatcaaatgtttttctagcaaatggcatcagttaacacctgcattctgtagagctgatgctctaaattagcatggaaccctggagacattttagaatttttaaaatctgtattattagttttctttactcatttcttgagagtgagttattttaagattatgaaagataatacagcattgaatttaatgaataatgatgtatcctgtaagatkggtggccttcaagatgtgatggaaacaaatgtcagccctacaataggagaaggtgtgctgtttgtctcttttgggatatgggagtgagtattgactccagttatagaaatgcaaaactactagatacatgatgtagtggagaatcagaggagtttcttatgaatatttttagcaaagcaatgatgagctattcaaagcataaaaatagtatttatcaatttatcagtccttctatgatattaatttgaaccatttaaattaatgtattatctctcttctctttcctcttggctttccagaagttcaatacaacttctggaaaaaaatctgatgccttttgctatcatttagcagagaagagtaataggcgcattgaaaaattagtctgttcatctatgatgtacaagtctatagaagttgacctgggtaatgacagtaaaga

SEQ ID NO: 61907 - DNA, 1404 bp, Homo sapiens
gtactattcagaaaaaataggtttaagaataagtcatctttcctctactgcaagggtataaatcctgggtatttctgataaatgtgttggaatttagactttttttttctaccagagacagccacccccacagtagactgcactgccaaggaaaagaatggtgggctaggaatacacacaaacgcagagaagctgctccctttgctgccggaacccagctgagattctctgctattccaggaattcatactactagcagcaaagcagtggtatctccataaacatccttggccttctgataaagtgagaagataaagaagagtttgacaagataaccaggagagagttttgtatcaatctttgatttcagcataaacctctctcgtaggcttggagtgagtgcttgctagagtcttcctcctagtttggccaagtgagacaagggtgtcccagttattaatgaaccatgacatgtaaagagaaaacctgaggtagtcaactgacattttataaaggtcagaggttactgtaaaagaatgtgtgcagagacaacaatcattcttctattatacaaggaggaaaatccagatgcaaagaatggtaagactagaggagacctcaagaggtcaggtagttcagcccttgcctccaggcaggagaacattcaatcatccaaaaaaaaaaagaaaagaaaaaagccaagaggaaataaaatgaactcaactcaaaaaactggatcctattttggaaatcaaatgtttttctagcaaatggcatcagttaacacctgcattctgtagagctgatgctctaaattagcatggaaccctggagacattttagaatttttaaaatctgtattattagttttctttactcatttcttgagagtgagttattttaagattatgaaagataatacagcattgaatttaatgaataatgatgtatcctgtaagattggtggccttcaagatgtgatggaaacaaatgtcagccctacaataggagaaggtgtgctgtttgtctcttttgggatatgggagtgagtattgactccagttatagaaatgcaaaactactagatacatgatgtagtggagaatcagaggagtttcttatgaatatttttagcaaagcaatgatgagctattcaaagcataaaaatagtatttatcaatttatcagtccttctatgatattaatttgaaccatttaaattaatgtattatctctcttctctttcctcttggctttccagaagttcaatacaacttctggaaaaaaatctgatgccttttgctatcatttagyagagaagagtaataggcgcattgaaaaattagtctgttcatctatgatgtacaagtctatagaagttgacctgggtaatgacagtaaaga

SEQ ID NO: 61908 - DNA, 1242 bp, Homo sapiens
tgcattgtgataataattaaaaatccctgaccagacatcttgagtctaacttatagaacaaggatgcaatgaacagctggttgtggctcttcatgggaatgatctgttggtaggcaactcccattcagtagtgggccttaatagaagggaattaatagttcttctggaataaggagaaaataaaatcttcagcctctgcctggaaaatcttgaacagatcagacaaattctcatggtggaagttgattcacactgtttcagttaattgctgagaattaacatttactgatcactttatgaaatatttcagttaatcttcacaccaatcctgatttgtattctcccattttacataagaaaaactgcaggtaagaagttaaggcaactacaggtaagaagttaagaaacacttttacaactccaaacagaaactctgtaaccttttagcagttattccccattccacctttccttcagcccatggtaacctttaatctactttctgcctctatgaatttctctattttagatatttcatataagtggagtcatacaatatttgtccttttgtgtttggcttgtttatttggcttgttttcaaggttcatccacgtagtagctagcaggtgccagaacttcattcctttttatggctgtattatgatattcctttgtatgcacataccatattttgtttatccattcatctgttgatggacccgtagggttttttcccccttttggctattgtgaataatgctgctttcaattctttggctagctaggagtggaattgtagagtcatatggtagtgtttactttttgagggactaccaaactatttycctatggctgaattatttttaattcccaccagcaacgtatgagggttccactttctccacttccttcccaacaccatcatactatttgttaatatctaatggtatcttattgtggttttgtgtaaatgaacttatacatttatagccgttgctgagaattttggttacaatgaatagaaaccattcacgtcatctttctataacattgaagttggatcctttctgtctttttattttccctaattttgtgcatgtaaaatcactttcggatgtttactaccactcccctggtttcccccaatcactagtgttctagctcttgtcctagcttagagagccaggtcatctaggaagagactcaggaacagggaagaaactatagatggagcaattttgt

SEQ ID NO: 61909 - DNA, 554 bp, Homo sapiens
tgactgttctgtgtatatgaaaataagtcaacaggacctgcaatctgaattattttgtaatattaatgattcacttatgttattgtttccatatatatttttaatttttattttatttatttatttatttttgagaaagagtttccctctgtcgcccaggctggagtgcaatggctcaatctcagctcacttccacctccacctcccaggctcaagcgattcttgtgcctgagcctcttgagtagctgggattacaggcawgtgccactgtgcttggctaattcatatatatatatatatatatatatatatatagtgcaacctggaatatattccatgatggctgtgtaataaactccaggctgtattaatggaatcagtcaaagacatttagcttagatgtgggttgaagcctaaagttagttgtcaataatattgtaggggatttaagaatttctaaactttacaatttttgtatggtaaaaaaaattttttttcttttaaaatgggaaggggtgtagaggaagagagttaatgttcaaggaacacctgct

SEQ ID NO: 61910 - DNA, 680 bp, Homo sapiens
cagccctctcaggcttgccccggcctccatggagaccttcggtctgggagaatttcagagttgttctttaagctggacgtgaccttagaggtgacactctctgcatttcccctaacgtgacttgcagacccttgagggcatcgacattacttcaggtgctactcaagttatttccctccattttaatgattctttcaccaatttattcagttccactattacttactgtacagtgtcctgggcgtggggggtgcagagctgaacaagggagatcattgtcttggtgacattcacattctacagcagtgattcttgacacccaggcatgattttgcccacacccctgcaggagacatttttgattgtcacaaccatggagggggtgctgctggcttctggaggtagagaatgtgttggaggaagctgccaaacaggacawtcccccaaaacaaagaataatctggctccaaatgtcaatagagctgaggttgagaaatcctgttctagtggaaagagacaattaacctataaatgggcaagaaaatagctggcagtgataaaggcaatgaacaaataaaataaggaggtgagatgggtattctaaagctactttagacggcaagatcagggcagacctctgtgaggaggtggcacttaaaccgaaacctaaataatgccaa

SEQ ID NO: 61911 - DNA, 1436 bp, Homo sapiens
gtgtcctggctcccccagtgagcagagatgaacaaagtgggcactgcagagaaaagatccccttgtcaccaaaaccaccgctgtccatcttccatgcttcctcgtgtccccacaggctagcctcaagaatggcagggactctcagaccaactctcagttcgattttcaatttattatctatatccagctcctttccaaagatacttgaggtgtctttcaaaaacacacacaaaggagtgaaaaaggaaggsaagacaattaagaagaggaaatagataaataattctagcacaaatggagctgctatgactgggcaccatcgcaacaaacaagacaaaatgggaaggccagctgttgctgcataacaaatctccccaacatctagaagctgaaaacaccatttgtcactcctcacaaatctcaggctgggctgcacagttctgctggtctgaggcaggattggctgatcttggttgggctcatgcgtgcatctggagaccaatggcaggctgctgggtgctgggtgctggctgctctgagatggccttaactgggacaccttggctgggttctacatggcctctcatccagcagcaggccaacccaggcttgttcacatggtgatagcaggggcccgagaaagcagaagctgtcaggccccttggaaagcctcttcctctaggcttagaactggtataccagcactcctgctatgttccattggctgaagcaagtcacaaggccagaccagattttaggggcaggaaatggacttcacttcttattgggaagagtgatggttgttgccatttttgcaacttacgaccatgataaattgtggagctctaattatcagagaagaataaatatgacagtttcttggagcaaaattgttccccttgaccaactcagagaaatgtttccaagggccgacaccacgttggcctcattttcttcatagcagtgatcattcattgagtacttactatgtgccagaccctaggcatcctttatattcatgtgcttccaaaagcacaggaggcacagcatggctcttcatcatgagtttagttggtacacagataaacagttatgacgtcgtcttctttgtcttttcttattgctttgcatttgtgacaagtgatatcaattttcctctaatgctaataatataaaaatttccttttgaaatagatcagctcaagtctttcaacatggattcatttaaggaaatattaattaaataaataatgaagttgggtgtggtggcttatgtctgtaatcccaacagtttgggaggccaagatgggagtatggcttgaggccaggagttccagagctgcctaggcaacatagcgagacctcatctctatataaataaaggagtcagccaagtttggtagtgtgtacctgtagtactagagactaaggtgaga

SEQ ID NO: 61912 - DNA, 1034 bp, Homo sapiens
aatgtaaaaatacatatatcctttgacttgaaactctctctcttggaaatgtatcttataaaaattaaaaccctggtacctgggaatagatatgtgcttgtcatacagttgttcaccagattaggagatgcctatcaaaaggcaaatggatggataatatgaatgttatacagacactaagaagaatgtattagagctatgccaaacaatagggaatttcctcaagatactgatgagtaagaaaagcaaaaagcagaaaagtatgtacaaaatgatccatttttgtaaaagaaacaacaacctaaaaactccaaattcataaagatatgtaaatatttgtgtgcatgaaataaaaattatggagaacataaatgcacaaaatagtgtctgctattttaaacacatatttacatatataaaagtagaaaaatggtctatctagaaggataaccaccaaaatggaagaatcatggtctctacagaattggagcaggagagtagttaaatgaccttcagctttattcataataccttatttcactgaagaaaaaaatactgaaagcaaatatgagaaatgttaatggctgaatggtgcgagtagggatgtttgttacattattctctgaaataacaataaactgaaataaaactgactacagatttgttgtatagtgagatatcatcaaaagccttggttctcggagcagtccatggatctatcatgtacagcttccccaccagtaccatgggcatacatgactacattcacaagttgctgagagggtcaaatgagagaatacatgtaaaaagacccaatagtcagccartgccagtcagtcctgcctccccagacacttgggtagatgtttgcaaagatgctttggtgctcttcccagtgggggcagctggtaatttggcccaggctattgtagcacatgggagcctagatggttgatctgaactctggggggaattctaggaagattataggcagagggaatatcacaagaaaaaaaaactacagaccaatatgt

SEQ ID NO: 61913 - DNA, 1706 bp, Homo sapiens
  misc_feature (1)...(1706): n = A,T,C or G
ttaaattttttatagagtccagggtctccctatgttgcccaggctggtcttgaactcctggcctcaagcattcctcccaccttagcctccaaaagtgctggagttacaggcgtgagccaccacccagcctatgcaaataatttttaaacaataaatattaaatggttttgtttcttttggagrcagggtctcactctatcactcaggctggagtgcagtggtgggatcgtggctcatggcagcttcaacctcccaggctcaagcgatcctcccacctcagcctactgagtagctgggactacaggcacaagccaccacacctggctaatttttgtattttttgcagagatggagttttgtcatgttgctcaggctggtctcaaactcctgagctcaagtgatccacccgccttgacctcccaaagtgctgggattaccggcatgagccactgcatgcagcctaaactgtatattaaaacgactgctttagaacacagtcacagaaatgggattgagtcaaatggactgtataattttagattaattcatagattagtattggcaagttactttctattcagtttccacaaatctacactgccctgaaaagcatacaccctatcagggtttaaaacagtggacattataatttttcaaatagtttgtacctttaatgttttaaaaatgtatcttgtagctttaatttgaatttttacatttattaaagaagttaatgattttctatatgctttctcactagtttctatttttcttttaacatatcaatgtgcatgtggaagagtaggtagggggaatattatctgtttttgttctttgcccaccatctactagggtcattgtatcttctgtcaatttgtaataatgagatctttaataaagatagcaatattgtatctgtcacacttttttcttttttttgagacaaggtcttgttctgttgcccaggctgcagtacagtgtttgcaaacaaacaaaaacccccaacaattcaacatatttgagtacaagaaaatggagaacttcttcaagtgtagttttttagggcaaataacatgccgtaaaatgcatatcaaaagtatgatagataaggccgagcacggtggcttacgcctgtaatctcagccctttggaaggccgaggtgggtggatcacttgaggtcaggcgtttgagaccagcccgcccccccatagggaaaccctgtttttactaaaaatacaaaaattagctaggcatgttggcacgtgcctgtaatcccagctacttgggaggttgaggcaggaaaatcgcttgaactcgggaggcagagtttgcagtgagccgagatcacgnccactgtactcgagcctgggcgacagagtgaaactccatctcaaaaaaaaaaaaaagtatgacagagaaacctgggcaacatgatgaaaccgcgtctctgcaaaaagcagccaagtgtgatggcacgcacctgtagtccctgctactcaggaggctgaggcaggaggatcgattgaggctgggaggtcaagactgcagtgacctgtgattgtgccactgcactccaaagcaagactctgactcaaaaaaaaattatttgcatgaaaaacttcattcgttatgaagacttgtatagaaacattgaaatacacttatgaattacaattaagtttaaggaacagtttacaaagtgaca

SEQ ID NO: 61914 - DNA, 1706 bp, Homo sapiens
  misc_feature (1)...(1706): n = A,T,C or G
ttaaattttttatagagtccagggtctccctatgttgcccaggctggtcttgaactcctggcctcaagcattcctcccaccttagcctccaaaagtgctggagttacaggcgtgagccaccacccagcctatgcaaataatttttaaacaataaatattaaatggttttgtttcttttggagacagggtctcactctatcactcaggctggagtgcagtggtgggatcgtggctcatggcagcttcaacctcccaggctcaagcgatcctcccacctcagcctactgagtagctgggactacaggcacaagmcaccacacctggctaatttttgtattttttgcagagatggagttttgtcatgttgctcaggctggtctcaaactcctgagctcaagtgatccacccgccttgacctcccaaagtgctgggattaccggcatgagccactgcatgcagcctaaactgtatattaaaacgactgctttagaacacagtcacagaaatgggattgagtcaaatggactgtataattttagattaattcatagattagtattggcaagttactttctattcagtttccacaaatctacactgccctgaaaagcatacaccctatcagggtttaaaacagtggacattataatttttcaaatagtttgtacctttaatgttttaaaaatgtatcttgtagctttaatttgaatttttacatttattaaagaagttaatgattttctatatgctttctcactagtttctatttttcttttaacatatcaatgtgcatgtggaagagtaggtagggggaatattatctgtttttgttctttgcccaccatctactagggtcattgtatcttctgtcaatttgtaataatgagatctttaataaagatagcaatattgtatctgtcacacttttttcttttttttgagacaaggtcttgttctgttgcccaggctgcagtacagtgtttgcaaacaaacaaaaacccccaacaattcaacatatttgagtacaagaaaatggagaacttcttcaagtgtagttttttagggcaaataacatgccgtaaaatgcatatcaaaagtatgatagataaggccgagcacggtggcttacgcctgtaatctcagccctttggaaggccgaggtgggtggatcacttgaggtcaggcgtttgagaccagcccgcccccccatagggaaaccctgtttttactaaaaatacaaaaattagctaggcatgttggcacgtgcctgtaatcccagctacttgggaggttgaggcaggaaaatcgcttgaactcgggaggcagagtttgcagtgagccgagatcacgnccactgtactcgagcctgggcgacagagtgaaactccatctcaaaaaaaaaaaaaagtatgacagagaaacctgggcaacatgatgaaaccgcgtctctgcaaaaagcagccaagtgtgatggcacgcacctgtagtccctgctactcaggaggctgaggcaggaggatcgattgaggctgggaggtcaagactgcagtgacctgtgattgtgccactgcactccaaagcaagactctgactcaaaaaaaaattatttgcatgaaaaacttcattcgttatgaagacttgtatagaaacattgaaatacacttatgaattacaattaagtttaaggaacagtttacaaagtgaca

SEQ ID NO: 61915 - DNA, 1706 bp, Homo sapiens
  misc_feature (1)...(1706): n = A,T,C or G
ttaaattttttatagagtccagggtctccctatgttgcccaggctggtcttgaactcctggcctcaagcattcctcccaccttagcctccaaaagtgctggagttacaggcgtgagccaccacccagcctatgcaaataatttttaaacaataaatattaaatggttttgtttcttttggagacagggtctcactctatcactcaggctggagtgcagtggtgggatcgtggctcatggcagcttcaacctcccaggctcaagcgatcctcccacctcagcctactgagtagctgggactacaggcacaagccaccacacctggctaatttttgtattttttgcagagatggagttttgtcatgttgctcaggctggtctcaaactcctgagctcaagtgatccacccgccttgacctcccaaagtgctgggattaccggcatgagccactgcatgcagcctaaactgtatattaaaacgactgctttagaacacagtcacagaaatgggattgagtcaaatggactgtataattttagattaattcatagattagtattggcaagttactttctattcagtttccacaaatctacactgccctgaaaagcatacaccctatcagggtytaaaacagtggacattataatttttcaaatagtttgtacctttaatgttttaaaaatgtatcttgtagctttaatttgaatttttacatttattaaagaagttaatgattttctatatgctttctcactagtttctatttttcttttaacatatcaatgtgcatgtggaagagtaggtagggggaatattatctgtttttgttctttgcccaccatctactagggtcattgtatcttctgtcaatttgtaataatgagatctttaataaagatagcaatattgtatctgtcacacttttttcttttttttgagacaaggtcttgttctgttgcccaggctgcagtacagtgtttgcaaacaaacaaaaacccccaacaattcaacatatttgagtacaagaaaatggagaacttcttcaagtgtagttttttagggcaaataacatgccgtaaaatgcatatcaaaagtatgatagataaggccgagcacggtggcttacgcctgtaatctcagccctttggaaggccgaggtgggtggatcacttgaggtcaggcgtttgagaccagcccgcccccccatagggaaaccctgtttttactaaaaatacaaaaattagctaggcatgttggcacgtgcctgtaatcccagctacttgggaggttgaggcaggaaaatcgcttgaactcgggaggcagagtttgcagtgagccgagatcacgnccactgtactcgagcctgggcgacagagtgaaactccatctcaaaaaaaaaaaaaagtatgacagagaaacctgggcaacatgatgaaaccgcgtctctgcaaaaagcagccaagtgtgatggcacgcacctgtagtccctgctactcaggaggctgaggcaggaggatcgattgaggctgggaggtcaagactgcagtgacctgtgattgtgccactgcactccaaagcaagactctgactcaaaaaaaaattatttgcatgaaaaacttcattcgttatgaagacttgtatagaaacattgaaatacacttatgaattacaattaagtttaaggaacagtttacaaagtgaca

SEQ ID NO: 61916 - DNA, 1706 bp, Homo sapiens
  misc_feature (1)...(1706): n = A,T,C or G
ttaaattttttatagagtccagggtctccctatgttgcccaggctggtcttgaactcctggcctcaagcattcctcccaccttagcctccaaaagtgctggagttacaggcgtgagccaccacccagcctatgcaaataatttttaaacaataaatattaaatggttttgtttcttttggagacagggtctcactctatcactcaggctggagtgcagtggtgggatcgtggctcatggcagcttcaacctcccaggctcaagcgatcctcccacctcagcctactgagtagctgggactacaggcacaagccaccacacctggctaatttttgtattttttgcagagatggagttttgtcatgttgctcaggctggtctcaaactcctgagctcaagtgatccacccgccttgacctcccaaagtgctgggattaccggcatgagccactgcatgcagcctaaactgtatattaaaacgactgctttagaacacagtcacagaaatgggattgagtcaaatggactgtataattttagattaattcatagattagtattggcaagttactttctattcagtttccacaaatctacactgccctgaaaagcatacaccctatcagggtttaaaacagtggacattataatttttcaaatagtttgtacctttaatgttttaaaaatgtatcttgtagctttaatttgaatttttacatttattaaagaagttaatgattttctatatgctttctcactagtttctatttttcttttaacatatcaatgtgcatgtggaagagtaggtagggggaatattatctgtttttgttctttgcccaccatctactagggtcattgtatcttctgtcaatttgtaataatgagatctttaataaagatagcaatattgtatctgtcacacttttttcttttttttgagacaaggtcttgttctgttgcccaggctgcagtacagtgtttgcaaacaaacaaaaacccmcaacaattcaacatatttgagtacaagaaaatggagaacttcttcaagtgtagttttttagggcaaataacatgccgtaaaatgcatatcaaaagtatgatagataaggccgagcacggtggcttacgcctgtaatctcagccctttggaaggccgaggtgggtggatcacttgaggtcaggcgtttgagaccagcccgcccccccatagggaaaccctgtttttactaaaaatacaaaaattagctaggcatgttggcacgtgcctgtaatcccagctacttgggaggttgaggcaggaaaatcgcttgaactcgggaggcagagtttgcagtgagccgagatcacgnccactgtactcgagcctgggcgacagagtgaaactccatctcaaaaaaaaaaaaaagtatgacagagaaacctgggcaacatgatgaaaccgcgtctctgcaaaaagcagccaagtgtgatggcacgcacctgtagtccctgctactcaggaggctgaggcaggaggatcgattgaggctgggaggtcaagactgcagtgacctgtgattgtgccactgcactccaaagcaagactctgactcaaaaaaaaattatttgcatgaaaaacttcattcgttatgaagacttgtatagaaacattgaaatacacttatgaattacaattaagtttaaggaacagtttacaaagtgaca

SEQ ID NO: 61917 - DNA, 653 bp, Homo sapiens
ctaactagtaacacatgccacagtggcactgcactcattaagtgctgtgttgtatactgcaatttaatttggtgctgtttatatcttatttcctcaagtcaacaggactctttctaaaaaagtcagaaactgttttactcatgtcccttcacaacacttagtggtcatttccacaaaatgctagctcaacagatacttgattgattgattaattgatgaacctctccatttctcagggagcctctaaacagttatcaacaagagtatgtttaattccagtctctgtctatatggtcttaggtgaggtgtttggcagtttgtcatctataaaataaagggatagcaccgaatagctcctaagttccttccagtgcaatttctgaatctcattagacaaaacaaaacccaaagacagcactacctctattcacgttagcaytgtactttttttggaggaaaggagtcagcagccttgtgggcccaaatgccacgagtggagccgtgatttggtggggagggggacagaaagtagatgaagcaaagaaaaaataaatggaagtgagtgacagatgagtagaatcactaaaatgccaccaggtgtcacaattgttactttgccacacattgttttccggtaccttttgctatgttca

SEQ ID NO: 61918 - DNA, 1601 bp, Homo sapiens
atacctttgccccacctcgctatacacacatacaaaaaggaaacttctttaaaaaataaaataaaatgagaagctagaggttttcttgtgtaaatcatgatgttaatgagtcagaaagaactttcccaaagcttgtcttcctggttgtcgcgtctggctgggacatccactaatagcactgggagagtcaacattctgctgctggtgactcatcctcctctgctagcacagtcggagggaccagcaagttcacggggctgcccttgggagtcactctgaattatttttgtaacatcttgtccttggataaaagggaatacagagtcagaaaccagaggccaggaggccatctattactcagcagagttgtttacacagccctgttcctctattatccagaattcagtgttctggataactgataaaattaaggcacctatgtttccagggagctgaatacagcaaatgcacaaaagtcatgttggatgaaattctaccttcccttgatgattcagaagaccatatcagaccttctcaggcatgactgcagatgacaaagagattattagaacctgattttgacccatttccatctcacaagcctgtgaaatgtggactcaagggtgtgggagaacttcagttagcaaaatttgcataaatagtttccttctactgtcatccagttaaacagtctccaggagcttgcatgaatgctttatcaggtcaccaagctctctgatgtatgtccagccaggtgctccctgaacatttctgggcctggccaaaactgtgcttgttcagtgcatttcagctgtatatatagctaataattagcagcagaaatgtggcacaaacccaaatctcatggatcccacattgcaccaaaataaatattaatgaaggcacctctgcctttttagtctttctccaaatgaatttttaaaaaagcaaagttggcttaactgctcatgaccattgactaatataaaaatcaataaaaaatcaataattatatactttttacaatttacaaagcactttcaatacttgatctcaatcctcacaataatttsaagtatcattcctcttattctactcataagcaaactaaagcttagaaacactaagtgacttgtgaaagatcacatgtatttattacctaggactcaaatctaagtcattagacagcaaaggaaatggaaacaactaatggaaaaaggacctataatcatggtgaaaaggtgaaatttcagtaaattaaaattgtttatctatctagtcagtaaagttggtgttatacttctttttaaatgtaaatataagcctggattaggtagaagtataaattactgtcacctataaactatgggtgacaactctaaaaatcatttagactcatcataaatgcacacattcaacattatagaaagatatcactgaaaagccaaagttcccctccctcctcccagagatagtcactattcagtttttggtaagggtgagcaacccaaatcaaaaaatctgaagtctgaaatgctccaaaatatgactttttgactaccacatttcttgaaggaaatgctcattggaggattttgaaa

SEQ ID NO: 61919 - DNA, 682 bp, Homo sapiens
ccacctccttccagaagtactcacctaatccatgcagacaccatagaccaagtgcatttataaaactgttttataatattaaatgtgtagtttatatgcctaacagaattgcgaggaattatttaacttcttattttctattctctcccatcatggtacccacgaagaagcccacatgcttactcttctttctaatggaacaccatgccctgagatttcccagtgtgctgagagttgcgtaggcctggaaagataaagaaagtctaatacagtatgtcaagtaaggtcagccagcaggtgaaaaaactcaaaaaaccaaccagatgttggtttctgttacagaagaatcaytgacaaactgtgaaccaaaacttagacacagttttaaaagtattctcttacttataattataatgccctataatgacatttaaatttttaacttattttttaggtgcacaattcagtggttcttagtgtaatctcaaaagagtgcaaccatcatcactatctacttccagaacatttcaccaccccaaaaagaaaccccatgtcactctccattctcccctatcgcatcccctagcaaccactggtctattagcctagtctagacatttcatagaaattgaatcatataatgtgtgtgtctggcttctttcacctacacaatgtcctcagg

SEQ ID NO: 61920 - DNA, 713 bp, Homo sapiens
catgcctgtcttcctacaatctccattaggctacctgctgggccctgtgkgtgtacccttcgcttacctctgcttttgcatttcacctaaatgcctttctctttggcctgtttccagtctctctatctagtcatccttcaggactctcaaccaggcagagttaggaggactagttttctgaattcccatttttcttaggcttctctaatcagcagatactgtgttgtaccataatagttttcacgccttattaatttttgtatcttaaacacagcatagagtagtggctagcacaaaggagttattcagtaaatgcttcaaaagtaattgtgcagttacaggctcaggtctcttgctatgtagagcgacttagtcagaaaacattactgtggcaaaacatcctaaaaggagattgcagaacaaagaatttaacgatctcctaaattttctccaggaattcttacagttatcagtatttagtggttgagcatctgacaacaggaagctttgaagggctgagaaataaagacatgcaatgaattggcttaagattttaattttcatttcacctgttttctagtctcagtccaatttttctcagccctggattgctcagaccatactagttggattggacagagtgtaatataatttactcctatcaatcagaaaatactacagtgactggtgaggcagccttagcaaatgatata

SEQ ID NO: 61921 - DNA, 713 bp, Homo sapiens
catgcctgtcttcctacaatctccattaggctacctgctgggccctgtgtgkgtacccttcgcttacctctgcttttgcatttcacctaaatgcctttctctttggcctgtttccagtctctctatctagtcatccttcaggactctcaaccaggcagagttaggaggactagttttctgaattcccatttttcttaggcttctctaatcagcagatactgtgttgtaccataatagttttcacgccttattaatttttgtatcttaaacacagcatagagtagtggctagcacaaaggagttattcagtaaatgcttcaaaagtaattgtgcagttacaggctcaggtctcttgctatgtagagcgacttagtcagaaaacattactgtggcaaaacatcctaaaaggagattgcagaacaaagaatttaacgatctcctaaattttctccaggaattcttacagttatcagtatttagtggttgagcatctgacaacaggaagctttgaagggctgagaaataaagacatgcaatgaattggcttaagattttaattttcatttcacctgttttctagtctcagtccaatttttctcagccctggattgctcagaccatactagttggattggacagagtgtaatataatttactcctatcaatcagaaaatactacagtgactggtgaggcagccttagcaaatgatata

SEQ ID NO: 61922 - DNA, 1215 bp, Homo sapiens
aaccaagctgattcatttttagattctcctcacgtttgtcacctttgctctcattctttgaggtgtttggtttgacttacgtgggtaggcagtctaagactagtactttggcctgataatttgattgtttgtcacatgcctctttgttttcaaagccttttccaatccttagtcaacctcttaaccactgggaatgttggattgtctgaagttgaagcacagttttctctctgagccctctaaagaagtcttttagttgttgataatcaaatttgctccttcagaaactaaaattccaaggtattttatgaacttaaggcagataagatgaggtctcaggtatcaaaatcactaataattaatttgctgccactagctgctgctccaaagctgacatttaagctatgtgaagaggaccaagtctaaactggattttataacccagtcaaagctgggggtgatgaagactctcattgactttatgtaatggagatttatatagggatattggagagttggggatactgctgaatatttctaaatctcctctttcttgaaaaacttatgcttttattcctcagtggcttttcctatttcctgttcattaagtcaacaaatattgagccccagctaacaccatgcatgagtgacaatgtcaaaaccatatccttctactcccccaccaaaccaaatcagaaccaaaatttgtctttggaaaatggatctctttgtcactaaggttcaaaattttggaataaggtttgaattcaggggcgagttatcaggatgtgttttgtcgttccaacctcctgtctcaagtcattcatgactgtgcagcatcaaccagtcagatatttgaggaccttctgtgttwcttgtcctgtgctccatgttgttggaaagcctacaaagtagctggggagaaaaggctaagactcagataatgctcaacctccatgactgggaggatcttgtcaggctcttttaactagtattcagcccaacacattttcttagtaaacatgaggaacttggcttagcattcagaaataataaggcccattttatttcccttctctttaccttttataatgtaattcgaggacccttgaaaggtaacctccagctttttttcttcccaggctatctttcgaaatttatttttttagtttaaggcgaggataaaaagggcacaccaaagggaattgggaagtt

SEQ ID NO: 61923 - DNA, 591 bp, Homo sapiens
cagccctggaggctcccaaagccaggtctgtgactccctctttggggccctgtggttcctgatgtctccaggcttccgggcaccactgcattccctggtgccagccagggaagctgcttgtggtgcacctggtccagctgcagtctcacagagagtgggcacccatcccagcacctggagctgcctgtgccatggcagcagctgtcgtgtctgactgtgtgcagtggctggaccccacactcgttcacacaccccttgctgttccatgcctgactcccactcagagtcgtggggtccaggctggtggcgtgagccgagcgtggcctgccaggccaagtgagtggaacaagctcagtgggcccgagcaacactcagggaaaggtgccaccagccacagaggtttctggccagraaagcaacaccccaaagatcctgtaacgatatgtaaaatcttatcaaagatactgtttgatacagtttgggtcaggtgcttttgcttgcatcaatcgtggtggcccgaggataagatattgaaatggagagtaccattaaagcctcacaaaagagagggtaagaaaaattccacaaaga

SEQ ID NO: 61924 - DNA, 1077 bp, Homo sapiens
caaaatatattatttaaggaaaaggaaatwagaaaaataaagacaaaaattaaagaattattaaataaaagccattacagttataagtataccaaaagttgtgtctttgaaggaaaaaataatacaaaaatgccctgaagacagagggcggtgactcatgcctgtaatcccagcactttgggaagctgaagtgggaagttgcttgagccgaggagttagagatcagcctaggcaaaatagtgagaccctgtctctacaaaaagaataaaaataaattagccaggtatgatggcatgcacctgtggtcccccagctacttgggaggctgaggtgggaggattgcttgggcctgggaggatgaggctgcagtgagccatgattgtgccactgcactccagcctggatgacagagtgagaccctgtctcaaaaaaagataaatgccctggagatttctaattaagaaacacacacacgcagagacacagacccacaaacacacacacaccacaaatacacacacacacacacacacaccacaaatacctaatacattaggaatgaaaagggggatagaaacacttggatatgcttttataattacaaaagaagatttccacttccagctgtatggcaggctgggttattcagaccaacattcccggctgaaggaaagaataacttaaaatgctgtatagcacatgaaaagtgaatccttttaagcaataaagatatgataaggtagtaagacatttccagggcaaaacctaaaaagaggaaagacccaaggtaggagcacagcattgaaactgcttttgccctaaaagcatttgctaaaccaagcgaatttggtttcagtggccttgtagagcacggaaaacagaactcaaagcctagtgtgtacttgagatgaacaatgtgaagatctaaaaggaggcccttctgccataaagccaagataccaaaacgatattccctcaggaaaaaagataaaccagaaatgaacctgctccacctctgccaggaaggttaacttggctctaagcagagcagggctggaaaataaccacccctgaaaa

SEQ ID NO: 61925 - DNA, 1077 bp, Homo sapiens
caaaatatattatttaaggaaaaggaaattagaaaaataaagacaaaaattaaagaattattaaataaaagccattacagttataagtataccaaaagttgtgtctttgaaggaaaaaataatacaaaaatgccctgaagacagagggcggtgactcatgcctgtaatcccagcactttgggaagctgaagtgggaagttgcttgagccgaggagttagagatcagcctaggcaaaatagtgagaccctgtctctacaaaaagaataaaaataaattagccaggtatgatggcatgcacctgtggtcccccagctacttgggaggctgaggtgggaggattgcttgggcctgggaggatgaggctgcagtgagccatgattgtgccactgcactccagcctggatgacagagtgagaccctgtctcaaaaaaagataaatgccctggagatttctaattaagaaacacacacacgcagagacacagacccacaaacacacacacaccacaaatacacacacacacacacacacaccacaaatacctaatacattaggaatgaaaagggggatagaaacacttggatatgcttttataattacaaaagaagatttccacttccagctgtatggcaggctgggttattcagaccaacattcccggctgaaggaaagaataacttaaaatgctgtatagcacatgaaaagtgaatccttttaagcaataaagatatgataaggtagtaagacatttccagggcaaaacctaaaaagaggaaagacccaaggtaggagcacagcattgaaactgcttttgccctaaaagcatttgctaaaccaagcgaatttggtttcagtggccttgtagagcacggaaaacagaactcaaagcctagtgtgtacttgagatgaacaatgtgaagatctaaaaggaggcccttctgccataaagccaagataccaaaacgatattccctcaggaaaaaagataaaccagaaatgaacctgctccacytctgccaggaaggttaacttggctctaagcagagcagggctggaaaataaccacccctgaaaa

SEQ ID NO: 61926 - DNA, 1007 bp, Homo sapiens
agatgaacccagttctccctcaagggtgggagctcagggtatcaggctgtcagtggccccaggaggtgcccttctgcagctgtgagccaggcttgctgctggactctacttacctcaggctgacctgatgccccaacccacgttcttcttccattgaagtgacactagacttccctccatctaagagcaacctggcctggaggaagaatccctcagaggccaagctctctgggtcaaggagagggagacccacctgagtcctttccagcttgcaatgcatgaagcatttcccacttttctaaaactctgaaatcaaattcttaatagagttaattagaacccatgcttttaattcgttttgggaaacagaaatcttaaagattcaaggatcctagatgaaaaatgccttcctgcatctggagttagagagagagggtgatctttgtatttttcagggaaaatagtttttactctcaatcattgacttctccctactttatgtgctcagagaccagccaatgccagaaatgtggaaagtcccttcaggtggtaaaacatttgagatacaaactttccgttcacatccaatgtaaaaacaaatcattttcaagccaattccaagataccaaacccaagttttaataaaaataggtcatctctcactggataaagagtatctgaaaaggyctataaatcctagaactatcctatctgactatcctataataaatggcttagctaccttaagaacatatctaagctctatgtcagtgcctgatgtctaagatctaaaatcaaagaatgatattcctttttacaaaatcaaggacgtttctggctcttacctgcttgctgctgctgggcatgagttgtaggaaagcctgagagaaagaggcaaaagacggccactaagggcaagtgccgatgtttcctcattttgaatttgtctaagcaccaaatatgaacctaaaagagaaaacagggcaaagggaatgatcagtttttga

SEQ ID NO: 61927 - DNA, 970 bp, Homo sapiens
tagtagtttgtgcagtatctaacagatgttgaataatattgcrtttccctcaaaagtctgaattatctggtagcaaccctgtgagttccttggaagacagtttggaaactgtaggtttaaggtatttgctcaaatatcattcctcagaaagactactgctcccagccattttctctactagttcactctactttacaccaactgagcacatagcaccaccttgtattacattataaatttgcttatatctgcttctctactacgatgtaagttctataaaagcaaacacgttgtcttccccaccatcactgtaccttcactccgtgacgcagtgcctggcacagaacaggcactcaaaatgcttgctgaatgagtgaataagtgatataaatggagacctggggtctccacatcacaatacataaaattctgtacaggtaataggtctcttccatgtgcctttcaggtacatatttcctgactctcttcagcttcagcgatgtccaaccctttgaatgagaggaactttttgctaatctgtggtgatggaatactcaaaaaatacgcactgaccttttttttaagctcaatcagccatcattagtgtattttatgtgaggcccaagacaattcttctttcaatgggcccagggaagccaaaaggtcagacaaccgtgatctacatctttaaaaagtatatgatctctcagtgcaaaatctcttatagttctcttttaaacttttattttaggttcaaggtacattcaaagtttcttcagcaatataaaatgtatttctctgaactctacaggtcagtggttgatctcatagtaataaaataaaaatgtaagaatattgacttaggttgtcctgtctatacaccaccattctgtgacattagaggggcaaaatttaagactcgatgaaagaagagttggaagttcatgttaaaggggaaataagagagaca

SEQ ID NO: 61928 - DNA, 750 bp, Homo sapiens
gacttctgacaatgttctgagatatgacacatcattgaaatgaatgctttgtttcccaaggtaagtatttacatgggtcaaccttatttggatgtagaattctgataggtttaatttttttaaaaatagcgttgtagtgtttagattcacatcttgtatgtattggagagtatgtagaagaaaagcaactgtcttacctgaaaatgaatgaaacagctaattaatgtgatgtgaccttgttactttcagaagcctgcatgataagtcctgagacctgaccctgtgcttccagagccttgggtccctctgagtccttagctctggatctgtattrtttggggttgaagagattccccacttaggggaagtgattttgaaaatgtccatggcagtctccatatatgcccatggcagccttttcagtatatttgagccttcttctctttcagggcagagcagatacaagaggacatgagcagggacaagccattggcactcacttatttcctcttccctttaacatgctgaattatcagtaaacttgaatatctgagactgctccaaattgagttcttgtacatatgcagcaagctctgcaaagagccttactactttggtattaaagtcagcttctgaaaagagaagaaaggatggagctgtatgttccatatttgctttcaactgcgtgtaatggcaagtgattaaagaggtcaaactcatgtcctgcatcgcacaaaacatctgtaatgg

SEQ ID NO: 61929 - DNA, 562 bp, Homo sapiens
tttaattgtgaaagtagcaattttctcattcattctaatacattttcttttttggttttattttatttatttatttttaatttaatttaatttaatttaatttataagttctgggatacatgtgcaggacatgcaggtttgttacataggtaaatgtgtaccatggtggtttgctgtacttatcaacccatcacttaggtattaagcccagcatccattagctatgcttcttgatgctctccctccccctgcactccctgacaggccacagtgtgtgtgtttcccctttctgtgtccatgtattctcactgttcagcttccacttataaataagaacatgcagtgtttggttttctgttcctgtgttagtttgctgaggatgatggcttccagctccatccatgtccctgcaaaggacatgatctcattctttttatggctgcatagtattccatggtgtatatgtaccacrttttctttatccagtctatcattgatggacatttgggttgattccatgtctttgctattgtgaatcgtgctgcagcaaacatatacatgc

SEQ ID NO: 61930 - DNA, 1241 bp, Homo sapiens
aaatgatcttgaaatttcaaaaaatgcttaacaatgaaactatttttcatgttagttttatttaagatatctaaaagtgaaacttttaattgttttgctgttctcaaccttgaaaacttgaaaaattaatcagatttattccagtgatgatgacaaatgtaaatgggaagcaggaattttttgttttcattaagtattctgatattctctataacttttaattatacaaaaattgtgttatatctgtgcagaaatattcaaattttaagtaatggctactattcaactctactttcatatttaattattttaaatacccgtgactccaaagtttatgagttagtatttattattttaactagtgctttgcatgtgtccttgtacatgaattttcagaatgttacaaatcattatgcaagtagggaatttacagatcctgtgtccacattataaatagtcccaatatatttcaccctcttatgagtttccatatgaatgaggaaattgacctgatgcagaccataagtcatacatagacagccatctttaattgtaaattgtggactgaattttgaattacttatttttttaaactaggttttttttttctatttttcaaataccataaatacacaataagtaatacgtatatagtgtcaattgaatcttgttttcaagaagataaattcacaccattaatggttaatgaatgatatctagctgcataaagatatctgaaaaatgctaattgaattatagcaaaatatttattaatatgggcatatttgtaaactgtttcagaaaactagaagccatttattaatacaagtaaygtaataagggtgtatataagcaaaatcagctacctccatgaagctgttgatataatctttaacttttactaatttttcttgaaaatagaggtgaaataataatccatagctattgtaaaaaggaggtcaatgatatgatagaaaaaatgatctttaactttttaatagaaatatttttaaaaaactcacatgcaatttatttcttacccaattagtacaattctcttgtctgtgacaacctagagcaagacaattgccttttccatatttcttaccttcgggtatttgcatataattattttgtttccccataggctcctcctttttcatcaacactttctcattgcctttaactattcttctatgacattcttaatttccaagttacagtgatacatatgtatgtat

SEQ ID NO: 61931 - DNA, 1241 bp, Homo sapiens
aaatgatcttgaaatttcaaaaaatgcttaacaatgaaactatttttcatgttagttttatttaagatatctaaaagtgaaacttttaattgttttgctgttctcaaccttgaaaacttgaaaaattaatcagatttattccagtgatgatgacaaatgtaaatgggaagcaggaattttttgttttcattaagtattctgatattctctataacttttaattatacaaaaattgtgttatatctgtgcagaaatattcaaattttaagtaatggctactattcaactctactttcatatttaattattttaaatacccgtgactccaaagtttatgagttagtatttattattttaactagtgctttgcatgtgtccttgtacatgaattttcagaatgttacaaatcattatgcaagtagggaatttacagatcctgtgtccacattataaatagtcccaatatatttcaccctcttatgagtttccatatgaatgaggaaattgacctgatgcagaccataagtcatacatagacagccatctttaattgtaaattgtggactgaattttgaattacttatttttttaaactaggttttttttttctatttttcaaataccataaatacacaataagtaatacgtatatagtgtcaattgaatcttgttttcaagaagataaattcacaccattaatggttaatgaatgatatctagctgcataaagatatctgaaaaatgctaattgaattatagcaaaatatttattaatatgggcatatttgtaaactgtttcagaaaactagaagccatttattaatacaagtaacgtaataagggtgtatataagcaaaatcagctacctccatgaagctgttgatataatctttaacttttactaatttttcttgaaaatagaggtgaaataataatccatagctattgtaaaaaggaggtcaatgatatgatagaaaaaatgatctttaactttttaatagaaatatttttwaaaaactcacatgcaatttatttcttacccaattagtacaattctcttgtctgtgacaacctagagcaagacaattgccttttccatatttcttaccttcgggtatttgcatataattattttgtttccccataggctcctcctttttcatcaacactttctcattgcctttaactattcttctatgacattcttaatttccaagttacagtgatacatatgtatgtat

SEQ ID NO: 61932 - DNA, 762 bp, Homo sapiens
aagagaaatatacagggatgcttattatagcctatcaagaaatgaaggacaaattgaggcatatttcttcattcaataaatatggcacagagctacttgtaggaacaagaataaaacccaaaaacatactgaacaaaacacccaaggtgcagaagtttatatatgggatgccacttatataaagtttagaagtatgcaaactcatacaatataatgcttacgtatttataatctgtagttaaaacttgcatcaaaagaataaatcctaaattcaggagggtgattacctctgggaagggagggaggagaatgagtcttgggggaaacatacagggggtttccatcatacttataatgwtttgtttctttaaaaagatatatatctgaagcaaagatagcaaaatgctaagatttaacaaagctgagtagaagatacatgggtgatcattatattattgtttatagttttctttgtatgagaaatatttcataataaaaaagctaatttagaaaataagaacggggtgggaggctctgaatggtgacagacaatttaagaagatatagagaccgggcatggtggctcacacctgtaatcccagtgttttagggggtcaaggcaggagaattgcttgaggccaggagtttgagagcagcctgggcaacatagtgagaccccatcttgacaaaaaattaaaaaatatttgctgggcgcagtggtgtatacctgtagtcccagctactcaggaggctgaggcagga

SEQ ID NO: 61933 - DNA, 670 bp, Homo sapiens
agcaagggaagtgttgygagaagtgctctgcagagcctgagcagggagctttccagaagtggggtgcggccacatgtgtcagagctgctggggagtgccaggcaggatgtgattaatgtcggccgtgggtgtgacagccagccagccctcagcctcattgtcagagtggctcgaacgcagccccctttcctctccccacccctgctcacagcacccacccctgctatgtgtggcatcccctctcctccctccaagtgtactgatccatggtgccagtcacttaaaaatagcatcctacctgaaacgtaggcatgagacggaactccaggaaaggagacagcacccctcttgtgccttggagcacacagattcttgagcaatctgtccctggtgctgacaaggagggcctctcgccggcgccttctgttccactggggaagggaaagcccgtgttgtaagtccccccatctaaagctggcatctcagctccacagggccatagggctgcccaaccagggtcactctttctctgcccaggggctggcctgagaaccataccctcccccttcctcaccctctctgcttcccactgggggagccctggcatgagatgtgagggagggtggggagggaggctgggatacttatcccccatctttctccctacaag

SEQ ID NO: 61934 - DNA, 670 bp, Homo sapiens
agcaagggaagtgttgcgagaagtgctctgcagagcctgagcagggagctttccagaagtggggtgcggccacatgtgtcagagctgctggggagtgccaggcaggatgtgattaatgtcggccgtgggtgtgacagccagccagccctcagcctcattgtcagagtggctcgaacgcagccccctttcctctccccacccctgctcacagcacccacccctgctatgtgtggcatcccctctcctccctccaagtgtactgatccatggtgccagtcacttaaaaatagcatcctacctgaaacgtaggcatgagacggaactccaggaaaggagacagcacccctcttgtgycttggagcacacagattcttgagcaatctgtccctggtgctgacaaggagggcctctcgccggcgccttctgttccactggggaagggaaagcccgtgttgtaagtccccccatctaaagctggcatctcagctccacagggccatagggctgcccaaccagggtcactctttctctgcccaggggctggcctgagaaccataccctcccccttcctcaccctctctgcttcccactgggggagccctggcatgagatgtgagggagggtggggagggaggctgggatacttatcccccatctttctccctacaag

SEQ ID NO: 61935 - DNA, 1458 bp, Homo sapiens
ttttgtaagctgttgaaaatcattgcagttcagaggtgaaacatgggatagttcatcgtctggttatcaggcaaagtggtttctcccttagccctaaactctgggccgattgcagccaagagtcatctagcattccataagaacrgactctctctggagcagctgttgtcactgatggttaaaggaatagctgtgacctaaaagcactgttttgtctccatctttaacactcgttctcctgggcagctgggaaccgcctggtctatgaacttgtctgtgaactaagtcttctggctgtctttgtatacgttgcttttttttttattgcattacaggagatacaggaaataatattctaactcatagtggatctttatttttatttttattttttggccagctgttacaggtctaaaacactgtgctgtttcatagtacagtacagtacatgatacgggaattgagtcatgtgctgcttaaggacacagatacgttctgagaaaagcgtcctcagctgatcttgttgtgtcagcaccacagtgtgtacttgcacaaacatgggtggcagaacccgctacacccctgggccacattgtagagcctgttgctcctcggctataaacctgtgcagtgtgttactgtactgaatactgtaggcagttgtaacccagtggtatttgtgtatctgaacacagaataggtacagtaaaaatgcattattagaatcttagaggatccctggtccgtgtggtctgtcagtggtggaagcatccttatgcagtgcgtgaccgtgctgggatgcagttctgattgctttcttggtggtagtatttttgttgatgccatgatggagctgcagtagcactgccatctactgtgtaatggcttggattatgtggtactttaattactgtcctttgccctcacattaaatgaaggccatttactttgatatgagctagttcacacttgcctcatttagttgaacacacatttgagttttgctgttttctactgtgttctggagcacagttgtagaaactggaaattctgtgtcatatttgggtatgatgagtaatatgatggtatcatttgttcaagtgcgaagataattgcagataagcatctgcgttagtcttgtcactgcaggtgaagcttaccgtttacttaggctttagtttacccattttctctttagtcctgtaaacttcatctaccttttggtttaacatgcttttccaacaaatctacatgagtcttaaaacttcagagtccaactagtagaatagaatagtaagaggtacttgcactggggcatctttttttgttgaattgatgacgaagaaatttttgttatgctaggaaaaatttctactttagtgttctcccccgccccccaccttagagggattagattttagaaaaagatccttctttttttttttttttttttttttt

SEQ ID NO: 61936 - DNA, 1458 bp, Homo sapiens
ttttgtaagctgttgaaaatcattgcagttcagaggtgaaacatgggatagttcatcgtctggttatcaggcaaagtggtttctcccttagccctaaactctgggccgattgcagccaagagtcatctagcattccataagaacagactctctctggagcagctgttgtcactgatggttaaaggaatagctgtgacctaaaagcactgttttgtctccatctttaacactcgttctcctgggcagctgggaaccgcctggtctatgaacttgtctgtgaactaagtcttctggctgtctttgtatacgttgcttttttttttattgcattacaggagatacaggaaataatattctaactcatagtggatctttatttttatttttattttttggccagctgttacaggtctaaaacactgtgctgtttcatagtacagtacagtacatgatacgggaattgagtcatgtgctgcttaaggacacagatacgttctgagaaaagcgtcctcagctgatcttgttgtgtcagcaccacagtgtgtacttgcacaaacatgggtggcagaacccgctacacccctgggccacattgtagagcctgttgctcctcggctataaacctgtgcagtgtgttactgtactgaatactgtaggcagttgtaacccagtggtatttgtgtatctgaacacagaataggtacagtaaaaatgcattattagaatcttagaggatccctggtccgtgtggtctgtcagtggtggaagcatccttatgcagtgcgtgaccgtgctgggatgcagttctgattgctttcttggtggtagtatttttgttgatgccatgatggagctgcagtagcactgccatctactgtgtaatggcttggattatgtggtactttaattactgtcctttgccctcacattaaatgaaggccatttactttgatatgagctagttcacacttgcctcatttagttgaacacacatttgagttttgctgttttctactgtgttctggagcacagttgtagaaactggaaattctgtgtcatatttgggtatgatgagtaatatgatggtatcatttgttcaagtgcgaagataattgcagataagcatctgcgttagtcttgtcactgcaggtgaagcttaccgtttacttaggctttagtttacccattttctctttagtcctgtaaacttcatctaccttttggtttaacatgcttttccaacaaatctacatgagtcttaaaacttcagagtccaactagtagaatagaatagtaagaggtacttgcactggggcatctttttttgttgaattgatgacgaaraaatttttgttatgctaggaaaaatttctactttagtgttctcccccgccccccaccttagagggattagattttagaaaaagatccttctttttttttttttttttttttttt

SEQ ID NO: 61937 - DNA, 1338 bp, Homo sapiens
caggtctcttcagtgaagaaagattttaaatcggtaatgtaaccagaggtaggaaatggaaaagtgccagaggctgctgcatggaaagtcccttctcccacagatggcagggaagggcacccaggacgttttaagggtcaggcaaggttctcctttccctgggtattgataacttttatttcacatgtaaaaaacatgtttcttaccctcttcccagccatccagttcccctctttgcagacagcacacttcctcttagaaccttccagataaaccatatgtatttacaagtaggtacctgatgtcccactgcacacacaggtgcctcctggtcttctcttggcagtctttccagatgaggcttctctgtcagtccataaagagcttgttcagtggcacaaatgtgttatttaatcaggccctgttgataacattttgttccatcgtattattacaaaccagtgcagtgtcatttacatattatatacatatcacctacatgttacagacaacagatgggacctttcacattcaggtaagtctacctgtgaagtagaaatctggaagtggagttgggtcaaacggtctgtgcttttgtaattattttacctgttgccgagatctgcttttagaattcccacagccatgtacaaggcctgtttccctaacctttaacgagcccagtgagttagccacttgctggttgcagccattcagttaggtggagacttaccctggtgtggtgtagttttatcttaggaatgaggttgaatattgtttcaagtaaactatttcattgatatttggtgagctgtttgtctcctttgctcatctctgttgagttgttggtcttttctttttttaatttttactttatttgagacggagtctcactctgtcacccaggctggagtgcactggtgtgatctcggttcactgcaacctttgcctcccgggttcaagcaattctcctgcctcagccacccaagtagctgggattacaggcacgtgccaccaagcctggctaatttttttttttttttttttgkatttttagtagagatggggttttgccatgttgaccaggctggtctcaagctcctgacttcaagggatccacccacctcggcctcccaaagtgctgggattccaggcgtgagccactgcgcctggctgggttcttagtttttagaaactccataagtttcaaggaatcatctttagtaggaattgcatgtatttgttttctgggtttttaatcttgtcttttgactttgccatgcaattattttcttttctttttttttttaatgctatatttatcagtcctttttggtg

SEQ ID NO: 61938 - DNA, 1041 bp, Homo sapiens
ctacatgcacaaaatgaggttttggggggcatttttaaaatagagataaaagtagagttaaaatttgattcatttgtgtgttccaaaatatttacaacagtgattcagaaattgatgtttacaaagatacctacaaaggaagttctgtatcagttttattaattcaatccctgaaatttgcttacagaataaatgttgtatgaaaaatctttcaaataattaaaatttctcaaatacacatttatattgttccttttctttagtgacttaatgtyattttctgagaaagtcttcaatctaataatctttgtcatctcctccatgccagcacagctgcctcctccctggggtttctgacactctcaggatgtgggttttcactctgtgtctctcgcacagtaatacacggccatgtcctcagatctcaggctgctcagctccgtgtaggctgtgctcatggacgtgtccctggttatggtgactctgccctggaacttctgtgcatatgttgtgttaccattgccagcattgatccatcccatccactcaagtccttgtccaggggcctgtcacacccagtgcataaagttgttggtgaaggtgtatccagaagccttgaaggagaccttcactgaggacagaggcttcttcacctcagccccagactgcaccaactggtcctgagagtgcgcacctgtggggaggatacagtagtggatgagatctttcagaaatggacacaatccccttctcatcactgggacttgggagtcccttacctgtagctgctgccaccaagatgttcctccaggtccagtccacggtgaggcactgagctctaaggagattctgcagaagaggcatgtggttgttggatgatgtgcttagggcacagacacatccatatttacctcagtgcatctcaggttatttgcatattcatgagacagacgatttcatagctcaaagcctgatacatgataagaaagggaagataaatgacacatcagccttacaagagtgagatgcaaatggtctaag

SEQ ID NO: 61939 - DNA, 1041 bp, Homo sapiens
ctacatgcacaaaatgaggttttggggggcatttttaaaatagagataaaagtagagttaaaatttgattcatttgtgtgttccaaaatatttacaacagtgattcagaaattgatgtttacaaagatacctacaaaggaagttctgtatcagttttattaattcaatccctgaaatttgcttacagaataaatgttgtatgaaaaatctttcaaataattaaaatttctcaaatacacatttatattgttccttttctttagtgacttaatgttattttctgagaaagtcttcaatctaataatctttgtcatctcctccatgccagcacagctgcctcctccctggggtttctgacactctcaggatgtgggttttcactctgtgtctctcgcacagtaatacacggccrtgtcctcagatctcaggctgctcagctccgtgtaggctgtgctcatggacgtgtccctggttatggtgactctgccctggaacttctgtgcatatgttgtgttaccattgccagcattgatccatcccatccactcaagtccttgtccaggggcctgtcacacccagtgcataaagttgttggtgaaggtgtatccagaagccttgaaggagaccttcactgaggacagaggcttcttcacctcagccccagactgcaccaactggtcctgagagtgcgcacctgtggggaggatacagtagtggatgagatctttcagaaatggacacaatccccttctcatcactgggacttgggagtcccttacctgtagctgctgccaccaagatgttcctccaggtccagtccacggtgaggcactgagctctaaggagattctgcagaagaggcatgtggttgttggatgatgtgcttagggcacagacacatccatatttacctcagtgcatctcaggttatttgcatattcatgagacagacgatttcatagctcaaagcctgatacatgataagaaagggaagataaatgacacatcagccttacaagagtgagatgcaaatggtctaag

SEQ ID NO: 61940 - DNA, 1041 bp, Homo sapiens
ctacatgcacaaaatgaggttttggggggcatttttaaaatagagataaaagtagagttaaaatttgattcatttgtgtgttccaaaatatttacaacagtgattcagaaattgatgtttacaaagatacctacaaaggaagttctgtatcagttttattaattcaatccctgaaatttgcttacagaataaatgttgtatgaaaaatctttcaaataattaaaatttctcaaatacacatttatattgttccttttctttagtgacttaatgttattttctgagaaagtcttcaatctaataatctttgtcatctcctccatgccagcacagctgcctcctccctggggtttctgacactctcaggatgtgggttttcactctgtgtctctcgcacagtaatacacggccatgtcctcagatctcaggctgctcagctccgtgtaggctgtgctcatggacgtgtccctggttatggtgactctgccctggaacttctgtgcatatgttgtgttaccattgccagcattgatccatcccatccactcaagtccttgtccaggggcctgtcacacccagtgcataaagttgttggtgaaggtgtatccagaagccttgaaggagaccttcactgaggacagaggcttcttcacctcagccccagactgcaccaactggtcctgagagtgcgcacctgtggggaggatacagtagtggatgagatctttcagaaatggacacaatccccttctcatcactgggacttgggagtcccttacctgtagctgctgccaccaagatgttcctccaggtccagtccacggtgaggcrctgagctctaaggagattctgcagaagaggcatgtggttgttggatgatgtgcttagggcacagacacatccatatttacctcagtgcatctcaggttatttgcatattcatgagacagacgatttcatagctcaaagcctgatacatgataagaaagggaagataaatgacacatcagccttacaagagtgagatgcaaatggtctaag

SEQ ID NO: 61941 - DNA, 1041 bp, Homo sapiens
ctacatgcacaaaatgaggttttggggggcatttttaaaatagagataaaagtagagttaaaatttgattcatttgtgtgttccaaaatatttacaacagtgattcagaaattgatgtttacaaagatacctacaaaggaagttctgtatcagttttattaattcaatccctgaaatttgcttacagaataaatgttgtatgaaaaatctttcaaataattaaaatttctcaaatacacatttatattgttccttttctttagtgacttaatgttattttctgagaaagtcttcaatctaataatctttgtcatctcctccatgccagcacagctgcctcctccctggggtttctgacactctcaggatgtgggttttcactctgtgtctctcgcacagtaatacacggccatgtcctcagatctcaggctgctcagctccgtgtaggctgtgctcatggacgtgtccctggttatggtgactctgccctggaacttctgtgcatatgttgtgttaccattgccagcattgatccatcccatccactcaagtccttgtccaggggcctgtcacacccagtgcataaagttgttggtgaaggtgtatccagaagccttgaaggagaccttcactgaggacagaggcttcttcacctcagccccagactgcaccaactggtcctgagagtgcgcacctgtggggaggatacagtagtggatgagatctttcagaaatggacacaatccccttctcatcactgggacttgggagtcccttacctgtagctgctgccaccaagatgttcctccaggtccagtccacggtgaggcactgagctctaaggagattctgcagaagaggcatgtggttgttggatgatgygcttagggcacagacacatccatatttacctcagtgcatctcaggttatttgcatattcatgagacagacgatttcatagctcaaagcctgatacatgataagaaagggaagataaatgacacatcagccttacaagagtgagatgcaaatggtctaag

SEQ ID NO: 61942 - DNA, 664 bp, Homo sapiens
ggatccactggatttatggcctccatgctcagggtgtcaggtcccaaaccttctcaatcacaggaaagcaggactcaggccaagggaaggaagcacatgtcgcagctggagaccacacataccttggcagcaccccagggagagaaaattccctgctgcaccaggcttctctgtgcacttccagcccccrtcacttaaggaacccctgtcccactctgagtcttcttctgaggcctctgtttgtgttgtcctgctcctgtcctggcctccagatccctcctctcgtagggtcctaggtctgaaggaaaagcaagatggcggcagtctgggggaagagcatgtgcttggggtccccgtggcccatttctgggcttggcctggtcacctgctgcagtcagtatcactcattcagacctaagcagtaatgccaggcgggtcatgtcctccttgtaaaattgtttgtttggagaatttgtggtgaactccaaatctctctctctctctcaaaattaataccattagagtcatttgtgcttgactgcagccctatggaagggacagccccacttctccccttgcctctttgtggttatttgtagggcagtcacaggaaaccagtacaatggcatttccccctaaacatgagtgtggctctcagcgcaat

SEQ ID NO: 61943 - DNA, 664 bp, Homo sapiens
ggatccactggatttatggcctccatgctcagggtgtcaggtcccaaaccttctcaatcacaggaaagcaggactcaggccaagggaaggaagcacatgtcgcagctggagaccacacataccttggcagcaccccagggagagaaaattccctgctgcaccaggcttctctgtgcacttccagcccccgtcacttaaggaacccctgtcccactctgagtcttcttctgaggcctctgtttgtgttgtcctgctcctgtcctggcctccagatccctcctctcgtagggtcctaggtctgaaggaaaagcaagatggcggcagtctgggggaagagcaygtgcttggggtccccgtggcccatttctgggcttggcctggtcacctgctgcagtcagtatcactcattcagacctaagcagtaatgccaggcgggtcatgtcctccttgtaaaattgtttgtttggagaatttgtggtgaactccaaatctctctctctctctcaaaattaataccattagagtcatttgtgcttgactgcagccctatggaagggacagccccacttctccccttgcctctttgtggttatttgtagggcagtcacaggaaaccagtacaatggcatttccccctaaacatgagtgtggctctcagcgcaat

SEQ ID NO: 61944 - DNA, 1501 bp, Homo sapiens
ccttacaaagcaactaacacaaaaattgtccatatatattgaggatttaaaacttctaggagaggcccggcggggtggctcatgcctgtaattctagcactttgggaagccgaggtggcagatcatgaggtggggagttcgagaacagcctggtcaatatggtgaaaccctgtctctactaataatacaaaaattagccgggagtagtggtgcacgccttgggaggctgaagcagaagaatcgcttgaacctgggtggtggaggttgaagtgagccgagatcactccactgcattccagcctgggtgacagagcgagactctgtctcaaaaacacaaaacaaaacagaacacaaaataaaacttctaggagaacatgaagaagaatattgttattataactgtggggaaaaaaacttcttagacatcgcacaatataaaaattatgcataggctgggagtggtggcttgtgcctgtaatcccagcattctttgaggcccaggcaggcagatcacttcaagccgggagttccagaccagccagaccaacatagtaaaaccccatctcaatttaaaacacaaaaatcagcagggtgtgctgcgcatgtttgttatcccagctattcaggaggctgaggcatgaggagcacttgaacccaggaggcaaagattgcagtgagctgagattgcaccattgcactccaccctgggtgatagagtgagactttatctaaaaaaaaaaaaaaaaaccattaaaatatttgtgaattagactataccaattttaagaatttttgattaccaaaaacataaaacatgttttaataaagatggtgaaaagccaaaccataactgggggaaaatagtttaaaaacacatagtacaaaaaattagtatttagaaaatatatattacagaatgtgtatgaataaacaaggaaatggaaaacattaaaaataggacagatggcaagtcttaaagcactaactkatgaaaaatgctaacttcattagtaactatggaataaaagtataaataatgtgtttctaattaaccattttgtcaaaaaattatgtctagcaattccaagagttggtaaaagatatgtactagtaataagtgtagatacatcaaatgaaaaatggtaattgagaatgtcactttcaatgtttgagtatttggacttttggtttaaaaaagtgtaataaaatagagcttttggtaagctttctgtagcttaacattatcataattaggaaaaaacaactttaaaaatgtaaataaacaaaaaagcctaccccaaaataaaacaacaactaagacatattgatccttgttttgggagagtatgaaacagaccattgtgtgaactttatacagttattttgccacactggcatagtaataaaaattatttatattcaatttgaatgaacatgtccacatcttaaaaatactgctttgtactatgaataataaatgtaaaagtctttatactcaaga

SEQ ID NO: 61945 - DNA, 650 bp, Homo sapiens
tcaccagtatctagccagtgactggtagattggcacactaatatttgtcacgtgtggatgaacaccaccagaatttagagaagatatgttcaaacttatttttataaagtrctataaaggaaagtctcatgacatcatattagaatcagattttttaggctgggtgcggtggctcacgcctgtaatcccagcacttcaggaggctgaggcaggtggatcacctgaggttaggagttcaagaccagtctggccaacatgaggaaaccccgtctctactaaaaatacaaaaattagctggcttggtggcaaaacacctgtaatcccagctactcaggaggctgaggcaggagaattgcttgaatctgggaggtggaggttgcagtgagctgagatcatgccattgcactccagcctgggcaacagagcaagactccgtcaaaaaaaaaagaatcagatttggagagagctagccaattccatgggactttgtggtaaggaacaataccaaccttctgcaaacttgtatctttattaagcaaagtgttctcatatgtgtgtaactgcatctgaaaagagacgaatttagggaaggccgttgggacattgctttggtaaaaggacagtgccataaaatcattccagtaagatgt

SEQ ID NO: 61946 - DNA, 891 bp, Homo sapiens
gaataggagatgctttaacgaagtgttgagttggggcccactcaggatgcaagaaaagagaccaaacatatattgcatgggctagacagtttatgtagatcatcatatttaatccttaaaataaataaccctgtatgatgaggatatattattcctaattcacaattgaggaaacacaagctagagagatggggtaaattgttcaaggtcatacagcaagtgagtttgacaccaaaatttgactccaaacctagtgatctctttctgtgacaccatggtcacaaggaggggagcatgcgccctctgaagttcaccaaaattctgcagttctttcttttgtgggttgtggcatctaagggaaagcagagatagagaagagaatcccaagacccaggagcaaccaagtgagagctaagcttagctgggcagtgagccagggctgggtggggggctttgtgttggcaggctgccaggcatggcctcctgtrtcctgcccgtgacaggacagagatttggctgacagcacatctgtgcccatttctgctccacaaatcaagagaactagtactcttctttctgggggtatctgttgagtcgatcataaaaaaacaatagaggggggctggacgtggttgcttacgcctgtaatcccagcactttgtggggctgaggcgggcggatcaccggaggtcgggagttcgagaccagcctgaccaacatgcagaaaccctgtctctactaaaaatacaaaattagccaggtgtggtggcgcatgcctgtaatcccatctacttgggaggctgaggcaggaggattgcttgaatccggaaggcagaagttgcggtgagccgagactgtgccattgcactccagcttgggcaacaagagcaa

SEQ ID NO: 61947 - DNA, 891 bp, Homo sapiens
gaataggagatgctttaacgaagtgttgagttggggcccactcaggatgcaagaaaagagaccaaacatatattgcatgggctagacagtttatgtagatcatcatatttaatccttaaaataaataaccctgtatgatgaggatatattattcctaattcacaattgaggaaacacaagctagagagatggggtaaattgttcaaggtcatacagcaagtgagtttgacaccaaaatttgactccaaacctagtgatctctttctgtgacaccatggtcacaaggaggggagcatgcgccctctgaagttcaccaaaattctgcagttctttcttttgtgggttgtggcatctaagggaaagcagagatagagaagagaatcccaagacccaggagcaaccaagtgagagctaagcttagctgggcagtgagccagggctgggtggggggctttgtgttggcaggctgccaggcatggcctcctgtatcctgcccgtgacaggacagagatttggctgacagcacatctgtgcccatttctgctccacaartcaagagaactagtactcttctttctgggggtatctgttgagtcgatcataaaaaaacaatagaggggggctggacgtggttgcttacgcctgtaatcccagcactttgtggggctgaggcgggcggatcaccggaggtcgggagttcgagaccagcctgaccaacatgcagaaaccctgtctctactaaaaatacaaaattagccaggtgtggtggcgcatgcctgtaatcccatctacttgggaggctgaggcaggaggattgcttgaatccggaaggcagaagttgcggtgagccgagactgtgccattgcactccagcttgggcaacaagagcaa

SEQ ID NO: 61948 - DNA, 891 bp, Homo sapiens
gaataggagatgctttaacgaagtgttgagttggggcccactcaggatgcaagaaaagagaccaaacatatattgcatgggctagacagtttatgtagatcatcatatttaatccttaaaataaataaccctgtatgatgaggatatattattcctaattcacaattgaggaaacacaagctagagagatggggtaaattgttcaaggtcatacagcaagtgagtttgacaccaaaatttgactccaaacctagtgatctctttctgtgacaccatggtcacaaggaggggagcatgcgccctctgaagttcaccaaaattctgcagttctttcttttgtgggttgtggcatctaagggaaagcagagatagagaagagaatcccaagacccaggagcaaccaagtgagagctaagcttagctgggcagtgagccagggctgggtggggggctttgtgttggcaggctgccaggcatggcctcctgtatcctgcccgtgacaggacagagatttggctgacagcacatctgtgcccatttctgctccacaaatcaagagaactagtactcttctttctgggggtatctgttgagtcgatcataaaaaaacaatagaggrgggctggacgtggttgcttacgcctgtaatcccagcactttgtggggctgaggcgggcggatcaccggaggtcgggagttcgagaccagcctgaccaacatgcagaaaccctgtctctactaaaaatacaaaattagccaggtgtggtggcgcatgcctgtaatcccatctacttgggaggctgaggcaggaggattgcttgaatccggaaggcagaagttgcggtgagccgagactgtgccattgcactccagcttgggcaacaagagcaa

SEQ ID NO: 61949 - DNA, 891 bp, Homo sapiens
gaataggagatgctttaacgaagtgttgagttggggcccactcaggatgcaagaaaagagaccaaacatatattgcatgggctagacagtttatgtagatcatcatatttaatccttaaaataaataaccctgtatgatgaggatatattattcctaattcacaattgaggaaacacaagctagagagatggggtaaattgttcaaggtcatacagcaagtgagtttgacaccaaaatttgactccaaacctagtgatctctttctgtgacaccatggtcacaaggaggggagcatgcgccctctgaagttcaccaaaattctgcagttctttcttttgtgggttgtggcatctaagggaaagcagagatagagaagagaatcccaagacccaggagcaaccaagtgagagctaagcttagctgggcagtgagccagggctgggtggggggctttgtgttggcaggctgccaggcatggcctcctgtatcctgcccgtgacaggacagagatttggctgacagcacatctgtgcccatttctgctccacaaatcaagagaactagtactcttctttctgggggtatctgttgagtcgatcataaaaaaacaatagaggggggctggacgtggtkgcttacgcctgtaatcccagcactttgtggggctgaggcgggcggatcaccggaggtcgggagttcgagaccagcctgaccaacatgcagaaaccctgtctctactaaaaatacaaaattagccaggtgtggtggcgcatgcctgtaatcccatctacttgggaggctgaggcaggaggattgcttgaatccggaaggcagaagttgcggtgagccgagactgtgccattgcactccagcttgggcaacaagagcaa

SEQ ID NO: 61950 - DNA, 891 bp, Homo sapiens
gaataggagatgctttaacgaagtgttgagttggggcccactcaggatgcaagaaaagagaccaaacatatattgcatgggctagacagtttatgtagatcatcatatttaatccttaaaataaataaccctgtatgatgaggatatattattcctaattcacaattgaggaaacacaagctagagagatggggtaaattgttcaaggtcatacagcaagtgagtttgacaccaaaatttgactccaaacctagtgatctctttctgtgacaccatggtcacaaggaggggagcatgcgccctctgaagttcaccaaaattctgcagttctttcttttgtgggttgtggcatctaagggaaagcagagatagagaagagaatcccaagacccaggagcaaccaagtgagagctaagcttagctgggcagtgagccagggctgggtggggggctttgtgttggcaggctgccaggcatggcctcctgtatcctgcccgtgacaggacagagatttggctgacagcacatctgtgcccatttctgctccacaaatcaagagaactagtactcttctttctgggggtatctgttgagtcgatcataaaaaaacaatagaggggggctggacgtggttgcttacgcctgtaatcccagcactttgtggggctgaggcgggcggatcaccggaggtcgggagttcgagaccagcctgaccaacatgcagaaaccctgtctctactaaaaatacaaaattagccaggtgtggtggcrcatgcctgtaatcccatctacttgggaggctgaggcaggaggattgcttgaatccggaaggcagaagttgcggtgagccgagactgtgccattgcactccagcttgggcaacaagagcaa

SEQ ID NO: 61951 - DNA, 891 bp, Homo sapiens
gaataggagatgctttaacgaagtgttgagttggggcccactcaggatgcaagaaaagagaccaaacatatattgcatgggctagacagtttatgtagatcatcatatttaatccttaaaataaataaccctgtatgatgaggatatattattcctaattcacaattgaggaaacacaagctagagagatggggtaaattgttcaaggtcatacagcaagtgagtttgacaccaaaatttgactccaaacctagtgatctctttctgtgacaccatggtcacaaggaggggagcatgcgccctctgaagttcaccaaaattctgcagttctttcttttgtgggttgtggcatctaagggaaagcagagatagagaagagaatcccaagacccaggagcaaccaagtgagagctaagcttagctgggcagtgagccagggctgggtggggggctttgtgttggcaggctgccaggcatggcctcctgtatcctgcccgtgacaggacagagatttggctgacagcacatctgtgcccatttctgctccacaaatcaagagaactagtactcttctttctgggggtatctgttgagtcgatcataaaaaaacaatagaggggggctggacgtggttgcttacgcctgtaatcccagcactttgtggggctgaggcgggcggatcaccggaggtcgggagttcgagaccagcctgaccaacatgcagaaaccctgtctctactaaaaatacaaaattagccaggtgtggtggcgcatgcctgtaatcccatctacttgggaggctgaggcaggaggattgcttgaatccggaaggcagargttgcggtgagccgagactgtgccattgcactccagcttgggcaacaagagcaa

SEQ ID NO: 61952 - DNA, 1161 bp, Homo sapiens
gcccatttcttgatacattttcaatttaccttcatggtaatttacactcaaggaagctgtccaagatatgcgggggattcaataaaataggtcatggagttaaatgctgtggtgaaacacagggcttaattttatggataaaatttaaactgcttagctgccttttttgcattattcatgttaagactaatgattactcactaaatgggaaggaatcactgtagaaatcaggaagccattttcttaattctttaagcacatctgatggagctgtggactctgcccttgaggttaacagcattgtattagggaagagacctgcttggcccaccagtcaacctcccttgcctgggctgctcctgaaactgctacaggaacaggaaacttgaaacaagattttttcctaaaattgacattgggtagaatgaacaggatagaagacaatatattaatgtcagttccttctggtatttttcaaagtgaagtctgcattgatgtcattgacaaaaatgcaaattccagattgtaaccaaatctgcttactggcagtgaggtttaggcactttaattattcacaagcatcccaggcaattcttatgtgctagtggagaaccacagattggcattggctatagagagaccacttcctttcagtcatccaaggttattttattaacttagcactgggctccaacgtaaacaagggctacttttctataatgatcaaattactaattttataagtatagaataaaaggatatgggtttcttagattgtaaatgtttgatgtagttaatgcaatttcatttttgaggtttgtttctaataatactcttaatttacatgtctaatggattccttgtacacaattctgatyatgtaaatttaagatgatcttttccactttgcaatacaagacatttaaaataacctaaagttgcccattctcactaagcacctgaaaattagtccctgtggggaaacttttttcaagttttatttttctttttatttcaagtgttgtttatattgtttctctaactgttctacctaatgattgataggcacctaccttccccaaagaaaaagggttaagtgatcaaatatgtttgggaaacacgagggcaaacaaagtgaaacagacttttactgcagattgc

SEQ ID NO: 61953 - DNA, 758 bp, Homo sapiens
acttcattggctcagccaattatcattttcttaagttaattataatttgactccatctttattataatggctaggccagaaggtaatcagattggcagggtttcctgctactctcaacactttctttcttcagatttctgacaaataattattccttttttttacactcctctcttgtttcttcagagtgagtttctttcctacctgagattattatttatccagatatctatccagagtataattatctatgagattaaaaattaatcttattcctgagagacttaaagatttgagtttcatagatataacttcaaaccaagcacatccagtcactgattttcacatggggttgctcagcgcttatggagactgcaatctaaccttccccactcacgagacatctaggcctgagccataaagtagacatagaatgtgaatcacagatttaaaccacatataaaactttacatcgtttgtgagcaacattaacaataaataaataagaatcagatgaaaattrttttaaatatattttatcccaatatatccaaaatattatttcaatatgtaactaatatcaaaacttattaataagatatttttatttattgaaatggagtatgtattttacactctatggcacatctcactttgactaaagttacacttcaagtgcccaatagccacatgtggctagtagttattgtattggatcattcaaatatgaatgatccagaaatacctggtttcaaagt

SEQ ID NO: 61954 - DNA, 758 bp, Homo sapiens
acttcattggctcagccaattatcattttcttaagttaattataatttgactccatctttattataatggctaggccagaaggtaatcagattggcagggtttcctgctactctcaacactttctttcttcagatttctgacaaataattattccttttttttacactcctctcttgtttcttcagagtgagtttctttcctacctgagattattatttatccagatatctatccagagtataattatctatgagattaaaaattaatcttattcctgagagacttaaagatttgagtttcatagatataacttcaaaccaagcacatccagtcactgattttcacatggggttgctcagcgcttatggagactgcaatctaaccttccccactcacgagacatctaggcctgagccataaagtagacatagaatgtgaatcacagatttaaaccacatataaaactttacatcgtttgtgagcaacattaacaataaataaataagaatcagatgaaaattgttttaaatatattttawcccaatatatccaaaatattatttcaatatgtaactaatatcaaaacttattaataagatatttttatttattgaaatggagtatgtattttacactctatggcacatctcactttgactaaagttacacttcaagtgcccaatagccacatgtggctagtagttattgtattggatcattcaaatatgaatgatccagaaatacctggtttcaaagt

SEQ ID NO: 61955 - DNA, 655 bp, Homo sapiens
accacaactggacaataaactttagttactagctagtagtggagcatcaaatcatttgaagtggggaggggcaagatcataaaatcaaatttatatatttgtaattatctctgaaacctctctctctctctctttckctctttctctctctctctgtctctctgtctctctctctctctctctctctgtgtgtgtgtgtgtgtgtgtgtgtgtgtgttggggagggggaaagatttttggagttgagatcagctagaaatacataatctgctctaacacagtcattgtaggattggaaagtaaagcacatagatgatacaatattaacaaaaaataattatagctacaatttaaaacaataaacaatcttaaaacaatatttagatatacaatcaagaatacttagtacctgtgagtagaggctgagaagcagtgagaaagaataagagattctttctataaaccctgggctttatagactgaggccaccacaaggacagtggtgcccttaactgaaagtaaagatggaagagagaaacaggtttgggttttgttgtgatgaatttcattttaaacagactgaatttgggcagtcaaggtttatccatatggagaaatccaacaagcagtaagatgcccgggtctagagataaaa

SEQ ID NO: 61956 - DNA, 655 bp, Homo sapiens
accacaactggacaataaactttagttactagctagtagtggagcatcaaatcatttgaagtggggaggggcaagatcataaaatcaaatttatatatttgtaattatctctgaaacctctctctctctctctttcgctctttctctctctctctgtctctctstctctctctctctctctctctctgtgtgtgtgtgtgtgtgtgtgtgtgtgtgttggggagggggaaagatttttggagttgagatcagctagaaatacataatctgctctaacacagtcattgtaggattggaaagtaaagcacatagatgatacaatattaacaaaaaataattatagctacaatttaaaacaataaacaatcttaaaacaatatttagatatacaatcaagaatacttagtacctgtgagtagaggctgagaagcagtgagaaagaataagagattctttctataaaccctgggctttatagactgaggccaccacaaggacagtggtgcccttaactgaaagtaaagatggaagagagaaacaggtttgggttttgttgtgatgaatttcattttaaacagactgaatttgggcagtcaaggtttatccatatggagaaatccaacaagcagtaagatgcccgggtctagagataaaa

SEQ ID NO: 61957 - DNA, 655 bp, Homo sapiens
accacaactggacaataaactttagttactagctagtagtggagcatcaaatcatttgaagtggggaggggcaagatcataaaatcaaatttatatatttgtaattatctctgaaacctctctctctctctctttcgctctttctctctctctctgtctctctgtctctctctctctctctctctctstgtgtgtgtgtgtgtgtgtgtgtgtgtgttggggagggggaaagatttttggagttgagatcagctagaaatacataatctgctctaacacagtcattgtaggattggaaagtaaagcacatagatgatacaatattaacaaaaaataattatagctacaatttaaaacaataaacaatcttaaaacaatatttagatatacaatcaagaatacttagtacctgtgagtagaggctgagaagcagtgagaaagaataagagattctttctataaaccctgggctttatagactgaggccaccacaaggacagtggtgcccttaactgaaagtaaagatggaagagagaaacaggtttgggttttgttgtgatgaatttcattttaaacagactgaatttgggcagtcaaggtttatccatatggagaaatccaacaagcagtaagatgcccgggtctagagataaaa

SEQ ID NO: 61958 - DNA, 726 bp, Homo sapiens
acattttaggaaagacagcttattagttcattctcagccttgcctatcattgcttatcattttcaaatgtcaccattcttgctttataatcagacattaggcttgcttaatttcatcctaaatttgtcatgcactttttgtttaaacaagtttgagtaaggtatcttcatcaataaaattttgatgtaggatttggtaacatttacttcaaccagtttgctctgccttttgacacaaatcagccatatctttattgctaaatagatacatacactcataacttgaacgtgcactgtgttactcatcattaatttattttccattggaatatgagacatagtgatacaatgaacatgaaatcttttgtctagactcagtggatagcatgaaaaagtttaagacactaataagaagttatttcaaagtacataatggggtattgatacaaatctaatgttgatcctaaagtgaaatctatatcagctaatggaagaaaaacaaatgaatgtaagatttgtcttgagtaaaattgttaacgtaggaaatgctggttatgttttgtctttgtcttctccatccttgccagttcttaatcccatgctaccaaaagactggactctgtgcctttggcagcctcctcctccccactagccctagagctagtggtcccacattcactatattccccycctttctcaacacacacacacacacacacacacacac

SEQ ID NO: 61959 - DNA, 853 bp, Homo sapiens
ggatcctctaagagccaagggtctcgtggtggggcaaggtgtggccaggacaagccactcttagggaatgacagctgctgagtgggagcatagattctcgtggtaaagtagattatcctgcctttgttaccaaagctgattgtgtgtgagctttgtgtytgcgtaaacattttagtcaaacatctgcatggaaaatagaaatcatgaaagttatatctaatgcatattattctaggcactttgctaagcattttatgtgttggctcacgtaaacagtgatctgattaattcgaccaaaaagatcaccaaatgatgtaaatcaggatttcacgcacttcctagaggcctcattttccagtccggttgtctacatggttttctccagtcaatggatgatcacctaacctgcctttccaatgtaaatagcaggcaaatacacagttgtctccaaatactgccaatgcaaagtgtttcagatggggacatatcttgaagtatttgacctcatctaatctaacaggatcgcttagcatgtccctacacttccttaggctgtctccataggaaaggttatgcaaagaatgaaagaatagaaaaccttatcagtttaattccctcagcaccacagttagcctagcgatgtgcatttgttgctatctcatgagcatatagaagcgggctgggggacaaggggtttctgggagattgaattcatcccaggattgaaaaagggaaaacagaggcccagagaggtcaagtgacttgcccaaggtcacacagccaatttgtggcaaagccaaactagcacttgcttttcccaactcccggttagattgtccttctttcagaggat

SEQ ID NO: 61960 - DNA, 692 bp, Homo sapiens
cgaggagtgctaggatgtacttggctgtggaaccacacagactgggtttaaatcctatttaagtcatcctgagaagttgtttaagtccttggagcctcattttctttatctgtgaaatggggataataatatcctctatccagggttgcattgaagattaactaggaaagaactggtcatagtgctgggctataaaacacaggcagttgtgattttcctaaatttctgaaagatcatggaagactttctgattcattgaagagagaataaatcttttttttttttttttgacggagtctcgctctgtccccaggctgaagtgcagtggcgagatctcggctcactgcaagctccgcctcccaggttcatgccattctcctgcctcagcctcccgagtagctgggactacaggcgcccaccaccatgcctggctaatttttgtatttttagtagagacggggtttcaccgtgttagccaggatggtctcgatctcccgacctcgtgatctgcctgcctcggcctcccaaagtgctgggattacaggcgtgagcyactgcacctggccagaataaatcctattttgtgtaggttcggagttaaagtggagaatacttattactgtactccagtgttttgagattgggttttccatttatatatagcaaatctcaactagaatattgatttaagt

SEQ ID NO: 61961 - DNA, 2692 bp, Homo sapiens
ctgtggttcagccataccgattcattggatctataaaagtgcatgtgggatgaacatcctaaagtgaagcaaataagtgtgcctggggagagatgctgggctccccagtgaacccaagagaatgtgcaatatcagaagcatcagtgctctgggggaagccctctgccacaccagagcagggttaacagagggccagggcctagctggggtgtcagtcaaaccaaagtgcaaaggccatgtgtaggctgaatgatggccccttaaagatgcccatgacctcatccctagaatctgtgaatacattaccctatgtagaaaagggactttgcagatgtgatttttaagttaaggattttgagatagggagaatatcctgggttatctggatgggcccagtgtaatcatgggtccttaaaagtgacaaaaggaggtgggagaatcagagtgagaggagatggaactgtggaagcagaagtcagagagaaagaggccgggcgtggtggttcacgcctgtaatcccagcactttgggaagctgaggcggcagatcacttgaggtcaggagttcaagaccagtctggccaacatggtgaaaccccatctctactaaaaattcaaaaattagtcgggtctgatggcaggcaactgtagtcccagctactagggaggctgaggcaggagaatcacctgaacctgggaggcggaggttataatgagccaagattgtaccactacactccagcctggacaacagggcaaggatctgtcacacacacacacacacaagcacacacacacacacacacacatacacacagagttggagaaaaagagatttgaaagtgttacattgatggctttgaagatggaagagggggcacaagttagggaagatggatggcctctagatgctggaaaagccaaggaaacagattctgccctaaagcctccagaaagaacacagccttgccggcctttgattttagctggtaagactcatttcagacttctgacctccagaactataagrtaataaatgtatgttgtttgaagccggtaaggtttgtgtaatttgttacagcaagaattggaaattaatagaggcctcatttgtttctgatgtacaaaacactttctattacagacctgaatccacattagtgaacgaggctgggtaattttgaagcagaatctgtccaaaattcaaaaaaatgaaagaatttgtaacaaacatgcatctagtttcagaaatagcttgggagtattttaaccacacttacataatgcaagattgggaatttggactccagaaacttagaaaggaggtggttagggggagtagaaaggagactgcctcaggagtcgacagactcaagttcaaatcccagctttgccaggtattatgttggctgggtggccgttagagagctgcttacccttactgagactcatttggttcatgccctcatattacagaggaggatcctgaggcctaagtcacccagccattcaaggcaaagaggagggtggactggacttcctaagacacaccctgcctcgcaccaatgcattccttcctcatgtagctacagaaagagcatgcacatttgcagtcatgaggacttgagttcaaatccaagatatgttttagtataagcttttgtttcctcatttgcgaaacacagaccatacttttcgtgtagggctgtttcaaaacttaaaaatcatatgttaatccctttattattgagagccagccataggctagtgtttgtggataaatgtttagtgtaaatacagaaactgttcctgctctcttgtatgtaaaagcacagcacaggtgtgtaggtcctaaataaatgtgagctaccactattatcttcatcatccttatcatcattaaaataggtgattcccctcaattcttccaagaaagacttttaaggccgtacaaaagtagacttcaatggccttctgtatattgttacaattctagccaagaaacattatgtcattttcatatcacacctctctgggtaggtcagagcccttttatgtttcttccccattcagtactctgatcaaaattaaaaatcagagagggagattgagttgctcaaggtcacaccgcaggtcactgggaagcttgaaatagactgtaaggagattcattcttaagcctacagatgacacttttgtatcacagcaatatcagtttgttcctctgtaaactctctcttcttccaaaatatgtattctggccatccccatctgattctgatggcatatctgatctgaaagttgttgatactctgatcttagaaagtgaagggtttaatcttctcttggaacccctcccagtgaaaattattttgccactttgaaatggcacgggcatccactgtgaactcacatccataaatctaagtctactgctcaggaaagcagatgaggtttgattctgcttctcagcacagtctcacagagaaaattatggaaagaatttgatttatagaaccacctcaaaggctctggagtgagacgcatgttgattcactttattaccatttattttacactatctctttacgctccctgcacatggatttgaaagatgatttggataaatgcttatgacctgtcagattgcatagccctgttgaggcacatggctgccaacatctcgggttggg

SEQ ID NO: 61962 - DNA, 2692 bp, Homo sapiens
ctgtggttcagccataccgattcattggatctataaaagtgcatgtgggatgaacatcctaaagtgaagcaaataagtgtgcctggggagagatgctgggctccccagtgaacccaagagaatgtgcaatatcagaagcatcagtgctctgggggaagccctctgccacaccagagcagggttaacagagggccagggcctagctggggtgtcagtcaaaccaaagtgcaaaggccatgtgtaggctgaatgatggccccttaaagatgcccatgacctcatccctagaatctgtgaatacattaccctatgtagaaaagggactttgcagatgtgatttttaagttaaggattttgagatagggagaatatcctgggttatctggatgggcccagtgtaatcatgggtccttaaaagtgacaaaaggaggtgggagaatcagagtgagaggagatggaactgtggaagcagaagtcagagagaaagaggccgggcgtggtggttcacgcctgtaatcccagcactttgggaagctgaggcggcagatcacttgaggtcaggagttcaagaccagtctggccaacatggtgaaaccccatctctactaaaaattcaaaaattagtcgggtctgatggcaggcaactgtagtcccagctactagggaggctgaggcaggagaatcacctgaacctgggaggcggaggttataatgagccaagattgtaccactacactccagcctggacaacagggcaaggatctgtcacacacacacacacacaagcacacacacacacacacacacatacacacagagttggagaaaaagagatttgaaagtgttacattgatggctttgaagatggaagagggggcacaagttagggaagatggatggcctctagatgctggaaaagccaaggaaacagattctgccctaaagcctccagaaagaacacagccttgccggcctttgattttagctggtaagactcatttcagacttctgacctccagaactataaggtaataaatgtatgttgtttgaagccggtaaggtttgtgtaatttgttacagcaagaattggaaattaatagaggcctcatttgtttctgatgtacaaaacactttctattacagacctgaatccacattagtgaacgaggctgggtaattttgaagcagaatctgtccaaaattcaaaaaaatgaaagaatttgtaacaaacatgcatctagtttcagaaatagcttgggagtattttaaccacacttacataatgcaagattgggaatttggactccagaaacttagaaaggaggtggttagggggagtagaaaggagaytgcctcaggagtcgacagactcaagttcaaatcccagctttgccaggtattatgttggctgggtggccgttagagagctgcttacccttactgagactcatttggttcatgccctcatattacagaggaggatcctgaggcctaagtcacccagccattcaaggcaaagaggagggtggactggacttcctaagacacaccctgcctcgcaccaatgcattccttcctcatgtagctacagaaagagcatgcacatttgcagtcatgaggacttgagttcaaatccaagatatgttttagtataagcttttgtttcctcatttgcgaaacacagaccatacttttcgtgtagggctgtttcaaaacttaaaaatcatatgttaatccctttattattgagagccagccataggctagtgtttgtggataaatgtttagtgtaaatacagaaactgttcctgctctcttgtatgtaaaagcacagcacaggtgtgtaggtcctaaataaatgtgagctaccactattatcttcatcatccttatcatcattaaaataggtgattcccctcaattcttccaagaaagacttttaaggccgtacaaaagtagacttcaatggccttctgtatattgttacaattctagccaagaaacattatgtcattttcatatcacacctctctgggtaggtcagagcccttttatgtttcttccccattcagtactctgatcaaaattaaaaatcagagagggagattgagttgctcaaggtcacaccgcaggtcactgggaagcttgaaatagactgtaaggagattcattcttaagcctacagatgacacttttgtatcacagcaatatcagtttgttcctctgtaaactctctcttcttccaaaatatgtattctggccatccccatctgattctgatggcatatctgatctgaaagttgttgatactctgatcttagaaagtgaagggtttaatcttctcttggaacccctcccagtgaaaattattttgccactttgaaatggcacgggcatccactgtgaactcacatccataaatctaagtctactgctcaggaaagcagatgaggtttgattctgcttctcagcacagtctcacagagaaaattatggaaagaatttgatttatagaaccacctcaaaggctctggagtgagacgcatgttgattcactttattaccatttattttacactatctctttacgctccctgcacatggatttgaaagatgatttggataaatgcttatgacctgtcagattgcatagccctgttgaggcacatggctgccaacatctcgggttggg

SEQ ID NO: 61963 - DNA, 678 bp, Homo sapiens
agggaccattctttgagaaccactgggcttgagatgtataggatggtagaaagagtcttcactgagaagttgaagacatgggttgtcatgccrgctgtgccatcttctaaaaaaaaaaaaaaaaccaaaggtttctaacaaaacagagatccctaataaaaactaagatccctgccaatatcacacagttgtgaggatggacagtgataacagcacataagtgctttgcaaactgtctggggctatgtagacaggaaatgtggcttgaagagatttgcctatagactccatctaagtgttaatatccttttttcagagtgacatgagaattcagcaccacatgacagctgaagactgtagcagaatctactaacccatttcctgtttgctcctacagattcctgttcttcccagaagctcttgtaatctggaaataaaagtaaattgtgaacatatactgagtggtttccgcatgcacatggaagaggttacattccgaaaggagaagagctgagctgcttcctagctgggacaattaattattctgagcctcagtttcctttggggaaagggataacaatagcactacctcaaaagttgttgtgaggattaaatgagttaatatatgtaaagcccttagaaacaggcttggcaaggattcattactgttgttattgt

SEQ ID NO: 61964 - DNA, 678 bp, Homo sapiens
agggaccattctttgagaaccactgggcttgagatgtataggatggtagaaagagtcttcactgagaagttgaagacatgggttgtcatgccggctgtgccatcttctaaaaaaaaaaaaaaaaccaaaggtttctaacaaaacagagatcsctaataaaaactaagatccctgccaatatcacacagttgtgaggatggacagtgataacagcacataagtgctttgcaaactgtctggggctatgtagacaggaaatgtggcttgaagagatttgcctatagactccatctaagtgttaatatccttttttcagagtgacatgagaattcagcaccacatgacagctgaagactgtagcagaatctactaacccatttcctgtttgctcctacagattcctgttcttcccagaagctcttgtaatctggaaataaaagtaaattgtgaacatatactgagtggtttccgcatgcacatggaagaggttacattccgaaaggagaagagctgagctgcttcctagctgggacaattaattattctgagcctcagtttcctttggggaaagggataacaatagcactacctcaaaagttgttgtgaggattaaatgagttaatatatgtaaagcccttagaaacaggcttggcaaggattcattactgttgttattgt

SEQ ID NO: 61965 - DNA, 744 bp, Homo sapiens
acacaggagtctgtttgtctcccctcagggtgaaggttagtcctgcaatagccaggacttagtcatgctaactgccaggcactcctctgagcacctcatcaaacctgctcaaatataattgttgtgccaagaaacagacagcttcgtatcgcataacccttaacctaagaatctgcatttcttgaaagcaagaaattttctggcatatacagcaggaatagttatctatggcagagtctgaaacaaataatgcagttaagtttagccttaaattgaaattggggagagagaattgcaaaacaacgtgcaatrgaaatacagtattagctgctcagccatttaatatatttaccatttggagaacagggagtttctctggaggtgttggtaaccaaaacacttggatgttaaggaatgggcataacgaacaagctagggggttgggctacctttgagattctctctctctttttgattcacagaagtgaagcagcaattcctgttcatttcctggcggcccactcctaggagttgcaaacaagatgttttctatggatgctctttatctttggaatcctcttccttcctggactggaaactgcagaatcaaaatctcttggccttccacaaagccttttctaaggtttgtctttttaattgagcttccacttaaggatacttaagaatctctttgtttactacagacaacaccatgaaacttcaccataaaatggtgtgggatcc

SEQ ID NO: 61966 - DNA, 744 bp, Homo sapiens
acacaggagtctgtttgtctcccctcagggtgaaggttagtcctgcaatagccaggacttagtcatgctaactgccaggcactcctctgagcacctcatcaaacctgctcaaatataattgttgtgccaagaaacagacagcttcgtatcgcataacccttaacctaagaatctgcatttcttgaaagcaagaaattttctggcatatacagcaggaatagttatctatggcagagtctgaaacaaataatgcagttaagtttagccttaaattgaaattggggagagagaattgcaaaacaacgtgcaatggaaatacagtattagctgctcagccatttaatatatttaccatttggagaacasggagtttctctggaggtgttggtaaccaaaacacttggatgttaaggaatgggcataacgaacaagctagggggttgggctacctttgagattctctctctctttttgattcacagaagtgaagcagcaattcctgttcatttcctggcggcccactcctaggagttgcaaacaagatgttttctatggatgctctttatctttggaatcctcttccttcctggactggaaactgcagaatcaaaatctcttggccttccacaaagccttttctaaggtttgtctttttaattgagcttccacttaaggatacttaagaatctctttgtttactacagacaacaccatgaaacttcaccataaaatggtgtgggatcc

SEQ ID NO: 61967 - DNA, 573 bp, Homo sapiens
tccaggacttttgacttaaaattattttgcctccctatgggtctcttatgggtccaggccttctggtgcttgcaaatgatggcccaaaccttcttgagggatattaatcagtccatttaagtgccaaatggaagcagttacgttctcaccgtagaaacacaaatcaagggtcagaagaaatctcaagaagtcttccaaggcaaggactttgcaattataataataagagagatgatgtggagaaatgggccttatcataccccactgagaggaaygtaaattgatggaatatttccagaggacagcttggcaatatgtacatctagagtgtaattgacccaataaagtctagcactttattaataggaaataagcaattaaggctttgtacaaagttaaagctaaaatggagttcatcctgctgttgtttctaatagtgaaaaatggaaacaatttaaattttctgtaacagaactggatgaatagttagtacatatatgaactgaaacctgtcagccattaggttgatgtataagaagagtagcagggaagcactatattattcaatcaaaa

SEQ ID NO: 61968 - DNA, 931 bp, Homo sapiens
gcatgcacacagacctcaaagagcatgttcaaaattcaacactatatcttcccctaagattttattttcttcctatattttctgtttcttggagcggtaccaccactgttagcactcacgctagaaaaatgtaagttgtctctcacccttcaggtccaaatactcatcaagtcctgccaagtttacaccttatttgagctccacctctcctttctatcctacctctaccctagttcagtatctcagcatttctcatctagactattgcaataaactcccaattggtctcttcatttctaatcttgcatggtctaggccaggggttatacgtctaagagggcagaaagcaaayttggactgtgatctaagttaaagaggaaccatgagttaataagtgcctctatggcaatatagaaatcccccaaattagattgttaacatcagcaaaaattaatatgtttgttctcttttagtgaaggcagacagatttaataatagtaggtccttgggtagaccatgggtaggcagaccacagcttctgatggccctggtccatttgagaaataaagttatatataatatatataaaatattacatacgtaataagttatacataaaactttatttctcaaatggctaaagttgagggatctccgaggatttttctaggaccttcatgctaggatctggtgctattttataaggaataaacttatcaggagcaaaataagtcccagatgtacttctgctatggatgaccaagtttgaggcaaaaaaaaaaaaaaaaaaaaaaagccagcctcctccctaacccaaaaggaaaggctccaagctcttgttttcttacttctcccctcatcttattatgttctaccagcaagtttctggttagaaactttcaccaaacatcttggcatcaggcactatgca

SEQ ID NO: 61969 - DNA, 931 bp, Homo sapiens
gcatgcacacagacctcaaagagcatgttcaaaattcaacactatatcttcccctaagattttattttcttcctatattttctgtttcttggagcggtaccaccactgttagcactcacgctagaaaaatgtaagttgtctctcacccttcaggtccaaatactcatcaagtcctgccaagtttacaccttatttgagctccacctctcctttctatcctacctctaccctagttcagtatctcagcatttctcatctagactattgcaataaactcccaattggtctcttcatttctaatcttgcatggtctaggccaggggttatacgtctaagagggcagaaagcaaacttggactgtgatctaagttaaagaggaaccatgagttaataagtgcctctatggcaatatagaaatcccccaaattagattgttaacatcagcaaaaattaatatgtttgttctcttttagtgaaggcagacagatttaataatagtaggtccttgggtagaccatgggtaggcagaccacagcttctgatggccctggtccatttgagaaataaagttatatataatatatataaaatattacatacgtaataagttatacataaaactttatttctcaaatggctaaagttgagggatctccgaggatttttctaggaccttcatgctaggatctggtgctattttataaggaataaacttatcaggagcaaaataagtcccagatrtacttctgctatggatgaccaagtttgaggcaaaaaaaaaaaaaaaaaaaaaaagccagcctcctccctaacccaaaaggaaaggctccaagctcttgttttcttacttctcccctcatcttattatgttctaccagcaagtttctggttagaaactttcaccaaacatcttggcatcaggcactatgca

SEQ ID NO: 61970 - DNA, 2329 bp, Homo sapiens
tatattctttttatattttgaattttcaaaatgtcaatcacatgaacccaaaatagtatcaactgtcatggttttcacagataatttctctttttcaattgcattcatctttcttgactatttgccaatagttcatcaattacattagttttctggaaactcttggacaaggttttgttaggtgcgcctttctgctttcccatggatttcctctgggtgggctgcagagcactggctgagtgtgggatgcagggtgaagcagattgggggtacaagcttctgggctgcttcttgctaagcatgatcatggacacatttcttcacctctccaggtcttacttctttgtctacaatctgaggataattccctcccacctttattcactaatgcatgttattcttttggccattcacctgggacatcaatctccaattcctagaagtatccaggagagttggtgcagaagactctccctctttagtgtcctccacagtaacttctgttccctcacatagctgccttctgaggaaatttactcctttaattttaaaaaataggctttattttttagagcagttttaggttcacagcaaaattgagcagaaaatacagagagttctcatatgcccccagtacagagcctgtrccactgataatatccctgtatcagagtggcacctttgttacaatcgatgaactacattggcacaccattatcacccaaagcccatagttccatcgtttatatcagggttcacctttgttgttgcacagtctatggatggcatgtgtctaccattatagtatcatacagaatatagtttcggtgcactaaaaatccgcggtgttccacctattcatttcttcttcccctctaactcctggcaatcagatttttaaaatgtcttcctagttttgccttttccagaatgttctatagttaggatggtatagtacacaatctttttttttttttttttgaggtggagtctcgctctgtcacccaggctggagtgcagtggtgcgatctcagctcactgcaagctctgcctcccgggttcacgccattatcctgcctcagcctcctgagtagctgggactacaggcgcccgccaccacacccggctaattttttgtatttttagtagagatggggtttcactgtgttagccaggatggttcgatctcctgacctcgtgatctgcctgcctcggcctcccaaagtgctgggattacaggcgtgagccactgcgcccagcccagtatgtaaccttttaagattgatgtattttatttaataacatgcatttgggattctcccatgtcttttcagggctcaatagctcatttctttttagtgctgaataatattccattgtatggatacaccacagttttttatccatatacccactgaaggacatcttggttgctttcaatttttggaaaatataaataaagctgcaatagccatctgcgtgcaagtttttgtgtagagataagtttcagattaatttgggtaaacaccaagaagctcaattagtggattgcatgataaaaaatgtttagttttgtaagaaactcccatcaactgtcttccaaagtggctgcactcttttgcattctcatcggcaattaatgagagattctgttgctccctatctttgaaagcatttggtattgtcagtgttttggatttttggtaattctaatgggtgtgtagtggtatctcattgttttagtctgtaatttcctgatgacatgtgatgtggagcatgactcttaattttcttacttcattttattgatttttggtttggcttagtagtgtctttattgcaaaaaataatacttgcctcatgggattattatgagaaataaggaaagaatctgataatttcaaatacagaggtgaatttatagacttcatttctatatcttgctcaagtttgataaggctagagctagaagccacattggtagaaagttagtgcccagcaatggtgtttaagttgcataggacagtggatttcaaatattttggtctcaagatccttttacagtcttaaaaattacttaggaccccaaagagctgttgtttatgagaaataaatccctttatatttaccatataagaaattaaaaattagaaaaattatatgtattaatttattaataacaataataaacccattacatgttgctataaataacattgtatgagaaaatgtctatattttaaaaacaaaaaaattaatgagaagaatggcattgtgtgactttttttggaaatctttttaatgtccagctcaagacttccagattctc

SEQ ID NO: 61971 - DNA, 2329 bp, Homo sapiens
tatattctttttatattttgaattttcaaaatgtcaatcacatgaacccaaaatagtatcaactgtcatggttttcacagataatttctctttttcaattgcattcatctttcttgactatttgccaatagttcatcaattacattagttttctggaaactcttggacaaggttttgttaggtgcgcctttctgctttcccatggatttcctctgggtgggctgcagagcactggctgagtgtgggatgcagggtgaagcagattgggggtacaagcttctgggctgcttcttgctaagcatgatcatggacacatttcttcacctctccaggtcttacttctttgtctacaatctgaggataattccctcccacctttattcactaatgcatgttattcttttggccattcacctgggacatcaatctccaattcctagaagtatccaggagagttggtgcagaagactctccctctttagtgtcctccacagtaacttctgttccctcacatagctgccttctgaggaaatttactcctttaattttaaaaaataggctttattttttagagcagttttaggttcacagcaaaattgagcagaaaatacagagagttctcatatgcccccagtacagagcctgtaccactgataatatccctgtatcagagtggcacctttgttacaatcgatgaactacattggcacaccattatcacccaaagcccatagttccatcgtttatatcagggttcacctttgttgttgcacagtctatggatggcatgtgtctaccattatagtatcatacagaatatagtttcggtgcactaaaaatcckcggtgttccacctattcatttcttcttcccctctaactcctggcaatcagatttttaaaatgtcttcctagttttgccttttccagaatgttctatagttaggatggtatagtacacaatctttttttttttttttttgaggtggagtctcgctctgtcacccaggctggagtgcagtggtgcgatctcagctcactgcaagctctgcctcccgggttcacgccattatcctgcctcagcctcctgagtagctgggactacaggcgcccgccaccacacccggctaattttttgtatttttagtagagatggggtttcactgtgttagccaggatggttcgatctcctgacctcgtgatctgcctgcctcggcctcccaaagtgctgggattacaggcgtgagccactgcgcccagcccagtatgtaaccttttaagattgatgtattttatttaataacatgcatttgggattctcccatgtcttttcagggctcaatagctcatttctttttagtgctgaataatattccattgtatggatacaccacagttttttatccatatacccactgaaggacatcttggttgctttcaatttttggaaaatataaataaagctgcaatagccatctgcgtgcaagtttttgtgtagagataagtttcagattaatttgggtaaacaccaagaagctcaattagtggattgcatgataaaaaatgtttagttttgtaagaaactcccatcaactgtcttccaaagtggctgcactcttttgcattctcatcggcaattaatgagagattctgttgctccctatctttgaaagcatttggtattgtcagtgttttggatttttggtaattctaatgggtgtgtagtggtatctcattgttttagtctgtaatttcctgatgacatgtgatgtggagcatgactcttaattttcttacttcattttattgatttttggtttggcttagtagtgtctttattgcaaaaaataatacttgcctcatgggattattatgagaaataaggaaagaatctgataatttcaaatacagaggtgaatttatagacttcatttctatatcttgctcaagtttgataaggctagagctagaagccacattggtagaaagttagtgcccagcaatggtgtttaagttgcataggacagtggatttcaaatattttggtctcaagatccttttacagtcttaaaaattacttaggaccccaaagagctgttgtttatgagaaataaatccctttatatttaccatataagaaattaaaaattagaaaaattatatgtattaatttattaataacaataataaacccattacatgttgctataaataacattgtatgagaaaatgtctatattttaaaaacaaaaaaattaatgagaagaatggcattgtgtgactttttttggaaatctttttaatgtccagctcaagacttccagattctc

SEQ ID NO: 61972 - DNA, 504 bp, Homo sapiens
aaaatgttaccatacagagtgtttttttcttttttttctsttaaaatacattttccagctagaaatctgtcaagtactagtacttatctcatagcaaggctttaagaatttatggtacacattaaattagtgttatctaatgtgttttcttattgttttctttgttccccaaatattcgtgttatgaacatcttttcttagaaatatttcatggaaaacaatccctttatctttaaagtattacctatgctatgcaataattctattttaaaatatataaagctttcccatatacattgaatcaattctgaatcctatcaaaacaggtttcccaagggcaagaacttttgttcattcatgtgagttacctgtcattatgtaagttacttaccattgttttccacagaagagtttctggaacatggtagtccttactactgcataaattaatgaatttggatcttacaaaaatggaagtcaactggctactgtttattagtttca

SEQ ID NO: 61973 - DNA, 784 bp, Homo sapiens
agagaagctaagaggatgaagtacagtggagagcaattaattgcattacttcacaccttcaacgcagatcttttccttttaaagttaaaaattaaaagaattaaaaaagcactttaaatatctggtgctttctaattagtagtaaaatttttctaaaacaatagttggcaaacttttttctgtaaagtgacaatgagtaaatatttaggctttatgggccatttaatttcttttgaaactactcagctctgttgcaatagcgaaaaagcagccatagacaatagcgaatgaacaaggtgattgtatcctattagtcactgctatggccatagtttgccaatatctttcttaaaaagtgagttctctatattttgagtgaatatcaggagtaatttttamaaacatacctagtacatgtttaaaatgttccagctgaaatgaaatccactttagaaataaaggatgaaaagagcatgctattatgctgttactaaataatatagtgttttcatgctttaggcaaatggagtgggctgtttttcaggtctttgcttctcttttgtgaaggaaagatgttctagtgttggaataagtgcagtcactctaccatcagagtccttccatgtaaatgaaagagaaggtctttacagatacaggtacctaaatttaattttaggttacaggtatatgaacttggagaatgtgtctactatactgagctttggtcttttcacctgttaaatagtgttctctgctttgaaaactgttattaatatataatgca

SEQ ID NO: 61974 - DNA, 784 bp, Homo sapiens
agagaagctaagaggatgaagtacagtggagagcaattaattgcattacttcacaccttcaacgcagatcttttccttttaaagttaaaaattaaaagaattaaaaaagcactttaaatatctggtgctttctaattagtagtaaaatttttctaaaacaatagttggcaaacttttttctgtaaagtgacaatgagtaaatatttaggctttatgggccatttaatttcttttgaaactactcagctctgttgcaatagcgaaaaagcagccatagacaatagcgaatgaacaaggtgattgtatcctattagtcactgctatggccatagtttgccaatatctttcttaaaaagtgagttctctatattttgagtgaatatcaggagtaatttttacraacatacctagtacatgtttaaaatgttccagctgaaatgaaatccactttagaaataaaggatgaaaagagcatgctattatgctgttactaaataatatagtgttttcatgctttaggcaaatggagtgggctgtttttcaggtctttgcttctcttttgtgaaggaaagatgttctagtgttggaataagtgcagtcactctaccatcagagtccttccatgtaaatgaaagagaaggtctttacagatacaggtacctaaatttaattttaggttacaggtatatgaacttggagaatgtgtctactatactgagctttggtcttttcacctgttaaatagtgttctctgctttgaaaactgttattaatatataatgca

SEQ ID NO: 61975 - DNA, 784 bp, Homo sapiens
agagaagctaagaggatgaagtacagtggagagcaattaattgcattacttcacaccttcaacgcagatcttttccttttaaagttaaaaattaaaagaattaaaaaagcactttaaatatctggtgctttctaattagtagtaaaatttttctaaaacaatagttggcaaacttttttctgtaaagtgacaatgagtaaatatttaggctttatgggccatttaatttcttttgaaactactcagctctgttgcaatagcgaaaaagcagccatagacaatagcgaatgaacaaggtgattgtatcctattagtcactgctatggccatagtttgccaatatctttcttaaaaagtgagttctctatattttgagtgaatatcaggagtaatttttacaaacatacctagtayatgtttaaaatgttccagctgaaatgaaatccactttagaaataaaggatgaaaagagcatgctattatgctgttactaaataatatagtgttttcatgctttaggcaaatggagtgggctgtttttcaggtctttgcttctcttttgtgaaggaaagatgttctagtgttggaataagtgcagtcactctaccatcagagtccttccatgtaaatgaaagagaaggtctttacagatacaggtacctaaatttaattttaggttacaggtatatgaacttggagaatgtgtctactatactgagctttggtcttttcacctgttaaatagtgttctctgctttgaaaactgttattaatatataatgca

SEQ ID NO: 61976 - DNA, 784 bp, Homo sapiens
agagaagctaagaggatgaagtacagtggagagcaattaattgcattacttcacaccttcaacgcagatcttttccttttaaagttaaaaattaaaagaattaaaaaagcactttaaatatctggtgctttctaattagtagtaaaatttttctaaaacaatagttggcaaacttttttctgtaaagtgacaatgagtaaatatttaggctttatgggccatttaatttcttttgaaactactcagctctgttgcaatagcgaaaaagcagccatagacaatagcgaatgaacaaggtgattgtatcctattagtcactgctatggccatagtttgccaatatctttcttaaaaagtgagttctctatattttgagtgaatatcaggagtaatttttacaaacatacctagtacatgtttaaaatgttccagctgaaatgaaatccactttagaaataaaggatgaaaagagcaygctattatgctgttactaaataatatagtgttttcatgctttaggcaaatggagtgggctgtttttcaggtctttgcttctcttttgtgaaggaaagatgttctagtgttggaataagtgcagtcactctaccatcagagtccttccatgtaaatgaaagagaaggtctttacagatacaggtacctaaatttaattttaggttacaggtatatgaacttggagaatgtgtctactatactgagctttggtcttttcacctgttaaatagtgttctctgctttgaaaactgttattaatatataatgca

SEQ ID NO: 61977 - DNA, 548 bp, Homo sapiens
agccagtggtctttacccagcatttccaaagcctgtgttctatatgatgataatagatattccatgtataaaagtttccatcaacaagcaagtttataaaacactggattaagattaaagagacatcttttgcagagctcttcagagacttttatgtgcaacaggagtctccaagacagggatataatatgaaacattgcacaaaagtatttgatgtgggacccttttgcaggagcatattaagcgtctctcagaactctttcagaaatgccactctaaacactgccccagggtgatggaagtttcccatgggttttgatctgtggggtgtggttgtttttattctaaattagaagcaaatatattatttccactagtcctttctgtcagcatccctgtcccagctgacttgtgagcctgaggatataaagataatgaaaaccagactccaggaaaagcacactygtttagagtcacccagctgcatccataaggcagatgcaatatgcctctctcccaagagtagaacacagacaaaacatacacta

SEQ ID NO: 61978 - DNA, 1438 bp, Homo sapiens
agggaagagaccaattaggatgcttaggttcagatagaagacaacaatggtttagaatgatgattggtagaggatatgggcagaggtaagtgtattcaacttctattttagacatagcatctgtagaacccgttagtagataaaatgttagggaaaggaagtaataaaaaatgatccttggtttttgtttgggtgggtggtaatgttaatttacagagataacagactgaaggaggaccactcttaggtgtatatgttgtgggggaatcaagaactctgttctagagacactaattttgaggtgtctgttagacatcccaatgtatcaagtaggcagttggctatgtagtcagatgatcagagaagagatgtgggttcttggctttctttgacagtgracctataattccttgcactcttttatctctttggtttttatgacaccaatctcgtttagtctttcaaaagaagacaacaatggtttagaatggtgatggtagaggatatgatatgggcagaggtaaacatattcaacctctattttagacatagaatttgtagaagactctcctaactccagcttctcttcttcccttcctttaaagttgatattccctagggatccattcttgacctttttcctttctgctctatactctctctgggctactcatgcaagtaaaggatgtccaaataatcttatatgctctaacatgtgtggtgacccacaactctataacttaagtccacatttctcccctgagctacaagtctatatatccaactacctataggacattgctacctggttgacccaaacaccttgaacttaatatgtcccaaactgaattaatcacgcttcttctctgtccctatgaatggtaacactgttcttcacttagctgaccagggccaaaatcttacattagcatttaaatctttctgccagtaagacagagctcggtatgtctgcagtcctccaacataagaagaaaaacaaatacaagaacacaggcttatgacccacccagaagccccaaatcgtggttcaatactgtgctgcattcttctatttcccctccagagccacttttcacccttctccattctgctttctgtcacagaggctgacccatcaagtggaatcctgtggccaagaagcagctccggcagaaagtcagagagagaggagagtgaggataaggtaccattcctctggttctgttgttgaaaactccgattcatttttcaagtacttgctgcaatgtgactttatgaaacggtagagaggatggatttaggaagggatagagaaatcaaggacaattaggaataaaagaactaaagaagacatttttgtaattgtacacattgagaagtaataaataccattagggatacacattctttgaggaccagcctcagtgtttttaacttt

SEQ ID NO: 61979 - DNA, 1438 bp, Homo sapiens
agggaagagaccaattaggatgcttaggttcagatagaagacaacaatggtttagaatgatgattggtagaggatatgggcagaggtaagtgtattcaacttctattttagacatagcatctgtagaacccgttagtagataaaatgttagggaaaggaagtaataaaaaatgatccttggtttttgtttgggtgggtggtaatgttaatttacagagataacagactgaaggaggaccactcttaggtgtatatgttgtgggggaatcaagaactctgttctagagacactaattttgaggtgtctgttagacatcccaatgtatcaagtaggcagttggctatgtagtcagatgatcagagaagagatgtgggttcttggctttctttgacagtggacctataattcyttgcactcttttatctctttggtttttatgacaccaatctcgtttagtctttcaaaagaagacaacaatggtttagaatggtgatggtagaggatatgatatgggcagaggtaaacatattcaacctctattttagacatagaatttgtagaagactctcctaactccagcttctcttcttcccttcctttaaagttgatattccctagggatccattcttgacctttttcctttctgctctatactctctctgggctactcatgcaagtaaaggatgtccaaataatcttatatgctctaacatgtgtggtgacccacaactctataacttaagtccacatttctcccctgagctacaagtctatatatccaactacctataggacattgctacctggttgacccaaacaccttgaacttaatatgtcccaaactgaattaatcacgcttcttctctgtccctatgaatggtaacactgttcttcacttagctgaccagggccaaaatcttacattagcatttaaatctttctgccagtaagacagagctcggtatgtctgcagtcctccaacataagaagaaaaacaaatacaagaacacaggcttatgacccacccagaagccccaaatcgtggttcaatactgtgctgcattcttctatttcccctccagagccacttttcacccttctccattctgctttctgtcacagaggctgacccatcaagtggaatcctgtggccaagaagcagctccggcagaaagtcagagagagaggagagtgaggataaggtaccattcctctggttctgttgttgaaaactccgattcatttttcaagtacttgctgcaatgtgactttatgaaacggtagagaggatggatttaggaagggatagagaaatcaaggacaattaggaataaaagaactaaagaagacatttttgtaattgtacacattgagaagtaataaataccattagggatacacattctttgaggaccagcctcagtgtttttaacttt

SEQ ID NO: 61980 - DNA, 687 bp, Homo sapiens
tgatctctgggcctcaacaataatcctgcaaagtaagtgttaccgccattttacagacgaggctcaaagagagtaaacaacccrttcaagacaatcaactaagtggtagaacaagaagcggaagccaagttccaaagtccaaactgcctctatatttgcgaagcatttttgccgtttatcaatcgtctccaaagaggagtgcacacatcctgcatgtactggggtgcagaaagaactctattttttataaaaattaaaaaaagaagtgatgttttactgacactaaatatatggattaacactggtactcttgctagtccacacatccgtctgttgaggcatctcgaggggactgtgagggttgtactaggccagaggggttgacactggtacctttcctcagctgtcctgagccatgagtcctgtccttgagacccttctcttggtcagtacattaccatataccagtgacttaacacagagatcttcccttctttttcacccacagcccataaagtagcaagtcctttctatactttatttaactcaactttatccagttctttccatcactgctcctatattgaattcaggtgaccatcacacctcatctagactgctgacacagtgtactaactgatcttcctgcctggaagtttgcccctcaaaacccactcatcatgcagg

SEQ ID NO: 61981 - DNA, 687 bp, Homo sapiens
tgatctctgggcctcaacaataatcctgcaaagtaagtgttaccgccattttacagacgaggctcaaagagagtaaacaacccattcaagacaatcaactaagtggtagaacaagaagcggaagccaagttccaaagtccaaactgcctctatatttgcgaagcatttttgcmgtttatcaatcgtctccaaagaggagtgcacacatcctgcatgtactggggtgcagaaagaactctattttttataaaaattaaaaaaagaagtgatgttttactgacactaaatatatggattaacactggtactcttgctagtccacacatccgtctgttgaggcatctcgaggggactgtgagggttgtactaggccagaggggttgacactggtacctttcctcagctgtcctgagccatgagtcctgtccttgagacccttctcttggtcagtacattaccatataccagtgacttaacacagagatcttcccttctttttcacccacagcccataaagtagcaagtcctttctatactttatttaactcaactttatccagttctttccatcactgctcctatattgaattcaggtgaccatcacacctcatctagactgctgacacagtgtactaactgatcttcctgcctggaagtttgcccctcaaaacccactcatcatgcagg

SEQ ID NO: 61982 - DNA, 552 bp, Homo sapiens
tgcttgccctatcccagggctttcccattcccagctcyactccaggagcatatgagctagtgtccctaactaggaagaggggcctgggccaggggcctctggagcccaagagacaaggtcagacgcagagacacagagctcaaggaagtaggatcaagaagctctgatctccagaaaatcaaactgcataatttttttttttttttgagacggagtcttgctctgttgcctaggctggagtgcagtggcacgatctcagctcactgcaacctctacctcctgggttcaagcgattctcctgcctcagcctctcaagtagctgggattacaggtgtatgccaccatgcccagctaatttttgcatttttagtagagacaggatctcgccatgttggccaggctggtctcgaactcctgacgtcagttgatccacccacctcggcccccaaagttttgggattacaggcgtgagccaacatgcctggccacactgcataaaatttgtttgcacatcctgctcagcagattcagcctgccacctgctccccagct

SEQ ID NO: 61983 - DNA, 488 bp, Homo sapiens
gagaatttgaagcacataaaataaaagcactatttatttatttacctatttatttatttattaagtagagacagggtcttgctatgttgcccaggctgttctccaaccactgggctcaagcaatcctcctgcctcaccctcctaaagtgctgggattacaggkgttaagccagggtgccccgctgaaacaaactatttttaagtgtttagtggaaaggcacaaaacgttttgtcgaaaatgattaaaatctatgtcatcattaaatattaattgtacttaattgtaacattttaagggaaatgttatgaatgacactaggctatgataacctagttcatcttcttgccatttttccatatatgaaacttcagaaccaatcattaaaagatcactaagaaaaaaaaaatcgccaagactcttagtggagatttaatcttccataaaaccaaactcaatgcattttagaactaatgtggcctctcaaaaa

SEQ ID NO: 61984 - DNA, 616 bp, Homo sapiens
aggatagtgaatatcagtaaacattcagcaaaaaagctttgccacattgagtacttcgacgtaacgtctccattcaacaagtcaatttacccaggatctcctgtatatgttaatctcactcttggaaggactcatcattctgcttaccctaaatttccttccaccttcctccctctctcaccagactagactctgaaatgggaaggagaagcggggaggagagcccaacaccccctcaagtttagagtggagaggacacagcctctgctgggacagggaaaagaggaatgtggagaccctgaggatgcttttggacaatgctcagaggttgggacaytgccaggagataccgttcaccccggatctccaagaaaagagatcagtctggcagttacatgtgtttttcttcaaagtagttgccagtttggaatgaccgatgacatcagagattccgactttcctgattggaaggaccggactctggttgcttgggagttcaggtggacaacagcaacttctcagaactactcttcactcctaacttctcccgagcctctagaagagaaacgcactcttctgggtcctaacggagtctggaagaaggctttggacagaa

SEQ ID NO: 61985 - DNA, 546 bp, Homo sapiens
gcatactcataaatgactaaagaaataaaaatgttaatgaggagaagagatagggctatcagttctkcatatcactcttgtggtgttaggaggcttttattttgcctaaaattaatttattcactcagcaattgttttatgtctacaagaacacaattttatttattttatttttctaattgacaaataataattgtgaatactcatggggtacaaagtgatgtttggatacatataatttacggtgatcagatcagggtaataagcatatctatcatctcaaacgtttatcattactttgtgttggaaaagttcaatattctccttctagctatttgaaactgtataataaactatagtcatcctacagaggtacaaaacacgagaaggcatttctcctatctagctgtaattttgtatcctttaacaaatctctttctattccccccttagatttccccttcccagcctttacggtatcctcggttctacttttcagttctatgagattgacatttttagctttcatgtgtgtgacaacatgca

SEQ ID NO: 61986 - DNA, 546 bp, Homo sapiens
gcatactcataaatgactaaagaaataaaaatgttaatgaggagaagagatagggctatcagttcttcatatcactcttgtggtgttaggaggcttttattttgcctaaaattaatttattcactcagcaattgttttatgtctacaagaacacaattttatttattttatttttctaattgacaaataataattgtgaatactcatggggtacaaagtgatgtttggatacatataatttacggtgatcagatcagggtaataagcatatctatcatctcaaacgtttatcattactttgtgttggaaaagttcaatattctccttctagctatttgaaactgtataataaactatagtcatcctacagaggtacaaaacacgagaaggcatttctcctatctagctgtaattttgtatcctttaacaaatctctttctattcyccccttagatttccccttcccagcctttacggtatcctcggttctacttttcagttctatgagattgacatttttagctttcatgtgtgtgacaacatgca

SEQ ID NO: 61987 - DNA, 662 bp, Homo sapiens
ctaaaagagttaaaggatgtgaagtaatgaaatagaaattttaattatactacctgtatttgctgcataattggaatttcatttccattctgaatttgttgggagaagcrgaaacagcttgctgctttagtgggctggcatgtttgcaatgaaatgttccaagcttctcagcagtcaggtgaatatcccagcctgaggtcaccttcactgtatatccctaagataaaagcaattttagagtatttttgatcctgaggatgtcctaattatccagttccagaaattgccaattgaggcgatattcaattctaaccctactttccattttagactattattattaacactactattattgttattaaacaatttttactcttgtgaaatttcccaattagtttaattaattgtgtagtctctaggtttctgaatatttgagactcaacagcactaatctttcttctccacttccttcttcctttatattatcttgttcttattggtgtgtaattccaaagaaacaggatgggagatgataattatttttaaagccctgagaaattttagtttactatacaaaaacctaacttacattcacacaaagtttattctatgaaataattttcataagtgagaaagaatataactatctatgagggctc

SEQ ID NO: 61988 - DNA, 662 bp, Homo sapiens
ctaaaagagttaaaggatgtgaagtaatgaaatagaaattttaattatactacctgtatttgctgcataattggaatttcatttccattctgaatttgttgggagaagcggaaacagcttgctgctttagtgggctggcatgtttgcaatgaaatgttccaagcttctcagcagtcaggtgaatatcccagcctgaggtcaccttcactgtatatccctaagataaaagcaattttagagtatttttgatcctgaggatgtcctaattatccagttccagaaattgccaattgaggcgatattcaattctaaccctactttccattttagactattattattaayactactattattgttattaaacaatttttactcttgtgaaatttcccaattagtttaattaattgtgtagtctctaggtttctgaatatttgagactcaacagcactaatctttcttctccacttccttcttcctttatattatcttgttcttattggtgtgtaattccaaagaaacaggatgggagatgataattatttttaaagccctgagaaattttagtttactatacaaaaacctaacttacattcacacaaagtttattctatgaaataattttcataagtgagaaagaatataactatctatgagggctc

SEQ ID NO: 61989 - DNA, 1243 bp, Homo sapiens
atacagagaactgattatttgctcatttacacaatatataattactttgaagtcaaaccgtacatcaggcacaatcctaagcgtcgcagataaaaagacatgtcaggtatgggctcttcagagaggatattgacaggcttcatgaaataataagagcttaagcattaaaacagtgacagtggaaagggaaaagatgggttaaagaaaaatgaaggaagaaccatcaggctgtaggagatgactagctctgagagttatggggactgtaaaaaaaatgactcacagagcccaaacagggcagctggaggagttgtgtaggtatagtagtacagcagtatagatatagcaatagctgatttagagaagccaggaaggaaggtagcttgggagtttggttttaatttggctttgatgtgatgataagargcccaagtacaaaaactcatcagatatttggatatatgggacaaaggtttggggacagccaaaggcaagacacgtaaattcaggagtaattattatgcagggagtttctgagagagaggtttaaagttgggtttctgaaagtttaacaatagagagctaaatatatattgtacaatctttgtattttgttaggcattactctcaaatgatctaggcaattgtggagttggataagaagatttatagctagtgggaccccagcggcttatctgacataagataccccaggggctctgagttagctgattcagccatcaccctttttcaccctctctcagacctgctactggggtattgatggacagctggccacccctggactttgaagctccaagccagaagcaagatggaggaaagggcttcgtcttcatgacacatcctgcctcctcatgtgtggctccgactgagagtccccttctggctgtgcataatcacttgctggagaaagggtgtgaggggaaggaaatgaaatattagaaagggagaagctgggctgggccagggaaactgctaagacgaaggctcgttgtgtgagggtcagttacaggctccctgacttctgaagtcagggaattgtgagggggtgtgggattctgaagtcaggaaattgtgaggaggtgtgggatgaggggatgtcactgtggtccttccaaatggaggccagagagatcattgcctagaccttagctatgcccccacaggcttcagttgggagaactcaacttcctccctcagacctagcagcaggcagtcagcc

SEQ ID NO: 61990 - DNA, 635 bp, Homo sapiens
gatcctttctacctctccatcgtctcctacctctcttactgactttggagcacacaggscagcgataccaagttctcatgctgtttcacatctctgaaaactcttattcatccttgaaggccctgtttgaatgttgcttcttaatgaagcttccatgggtaatggtttgtctctgctacccttgcacatacttcctttttgcacctctcagggtactgcagttgattgtctacatgtcagtctctttccagatttggagctgattgctccaaattactccaagtgtcttttcactttggagtccctagcacacaagcacagttcctggcaattaacaggggcttaatcaatacctgttgaatgacaatgctttctggagaaaaaaatgacctaaatgtagactcaaagaagaatagaatgagcactgctaataattcaacccatgtatagtttgtaaatgtattactttagttatcttgttacataactatgtagataatgggttaaaaatttctggtaactagcctgaccaacatggagaaaccctgtctctactaaaaatacaaaattagctgggcgtggtgacacatgcctgtaatcccagctactcaggaggttgaggcaggagaatcact

SEQ ID NO: 61991 - DNA, 635 bp, Homo sapiens
gatcctttctacctctccatcgtctcctacctctcttactgactttggagcacacaggccagcgataccaagttctcatgctgtttcacatctctgaaaactcttattcatccttgaaggccctgtttgaatgttgcttcttaatgaagcttccatgggtaatggtttgtctctgctacccttgcacatacttcctttttgcacctctcagggtactgcagttgattgtctacatgtcagtctctttccagatttggagctgattgctccaaattactccaagtgtcttttcactttggagtccctagcacacaagcacagttcctggcaattaacaggggcttaatcaatacctgttgaatgwcaatgctttctggagaaaaaaatgacctaaatgtagactcaaagaagaatagaatgagcactgctaataattcaacccatgtatagtttgtaaatgtattactttagttatcttgttacataactatgtagataatgggttaaaaatttctggtaactagcctgaccaacatggagaaaccctgtctctactaaaaatacaaaattagctgggcgtggtgacacatgcctgtaatcccagctactcaggaggttgaggcaggagaatcact

SEQ ID NO: 61992 - DNA, 1448 bp, Homo sapiens
acaaattaccaaggtgccacaccaagtctttctgtagtcatttctcataatcagaataccttaaactcagggagaaggtcaaagcaaaattgccttaaactaaactcaattttaatattaagattttgctgtatagagagaagacaatrgcttacatagctattaataaacatagttttttggtcagattaaatcaatttgataaattatctttatttccacaaattacctttttctatgacgttgagactttggagattcaaattctacttatgactgcattttgattaccttatgtggatttccaaaagcttaggccatgaaataacaagattcctaaaatattgactactgttcggtctgatttgctgtgtgcttaatagctttatcttgtaacaatatacacatcaatatgaatattctattacctcaatcatttttatctcatgatgaataaacttatttaagcatacttgccagctctttacacaaagtgagatttatgtattagttatctcagtgaagtgttgaagccagagttttatcccctatttcagccaatgaataaaattctgttgcccactctccatgtgccagacactgtacaatccaccagaaaccctgtgtacacagtgcacaccaggatcctgctgtcataaagcttacacttctgcagaaaatagatcattaaagatctccaaataattaattaaatcattattagtgttgcaaagtgttttagaagagaaaaagaaactcaatctcctgaaatcgtaaaagacagaactgatagtatctttgtggcatttccaaagtgaataatgctaggaagtcgaacatagttgagcagaaaaataaaattacatgtttttggcaaagtaaagcggattaaaaacaaggaaaaatgctttaaaaatagagaccataaatcccctttcctccagtagccaaattgaactaatacacaaaatagagtgcacaaaatattgaaaggcagatatttcctccagcacatttggcttgtgacgttttgccaaattaactggtataaccgtagtgaaactgttctactcttattataaatcaacatcaaatggtgtttcacagatccatcagagatcatattacaaatgtaacacaaatgatcaaataccatacaaagggtctactcccaactacagatatcttaattttattccatagttctatgttctgtggcagaaagatcaaacatggtctttctatccattcccaaagatttagattttttttttgcaatagcacactgaggagataattatgatacaatttcttctccagcaaacactcaaaatataatttctcctacttgcttcaagttctagaaaacttaatttttattccttttaaacagtaaatacaagtctctcaacatacagtgaaaattttaactcgtttttattttttaa

SEQ ID NO: 61993 - DNA, 1131 bp, Homo sapiens
tacatatatatatatataggggaaggtctaaaatgtatacagcaagatgttaagataggtttataatggcaatgatggataataaattgtttttattaatatttccttttgcttttttttacattttcttgtgtaaatgctttacaatgaccattttattattattagaaggtggcaatttccatttaagaaaaaaagaatgcttgaatacatcacaaccaacttcgttcaataatattgattaatatgactaaccacattattctagcttatacatacatcagaaatgtccccattataataatgtaatgggttcaaaaatccaaacgagagaatcagggcgatttatctcaggcaggaaggaatcagcaattggatttgttgctaacttgtttcctcatgagtccttcttgtttggttcttttattcctgtatacatggtgaacaaaaatgaattgttcgccctggacaagctataagcaagatagttccagaggcaatgagaggcaatggagcagataaggctcaccaacagcattcccaggttctgtaaagccaatctggggaagaattagctcagagctgtgaaatataggaaattgctgcagagggctggatgtgcagatcctgtgctgagcaaagtgacatcatccactctcccatatgagatatgccagataattttccctttgtgtgatttaattttattgtttttcttttatgctgaaaccgctgattatataaagatgagaaaaatattttctatttacttttgatcatcttataagttatccagcagtccagccaggcctggagttcaactgttgctgtaggcaattttttactacaaattgctcttttctaaaaggcaacactttttcacaccatccaagattgaatcagtcttagaagagaattcaaygaatgagagaatggtaaggaacagtattttgaaaattaatgggcacactcgtaaccttctttttagcattggtaattgtacctccaagtgaaagtgttaagtctaaaatcctgcaaataaatacctgaatttagtggtattttttaaatagtccgagaaattttaaatgacctataatttctggtggagaccagaagactgctatcaac

SEQ ID NO: 61994 - DNA, 760 bp, Homo sapiens
ccctaatgattagtgatgttgggcatcttttcatgagcttgctggtcttttgtatattttctttaaaaaatgtctatttaagtactttgcccatttaaaaatcaggttgtttgtttttttgttgttgagttttaagagttcttcatatattctgcatattaataccttatcagatgtatgatttgctaatattttctcccattccataggttgcctcttcacttctgttgattttgtcctttgatgctaracctttgtcatccacatctttgtcatccacatctgaaccccatctctcgtttccattggtggtagtcgtggtggtggtgggcctcagtatgactgcagtaatggtacctggtgcgtcttctttccaagactgcccttacttagtttcttttgtttgcaatgagacaaagatttctgagcaccaaatgacaaagaagagttaagtttttaaaagcaattgttttcttcttgaaatgtttctttagttcctgttcaagacaatgctaagcaaaattcagatatcaccacacaacctctggtcttctgtggaaggcaagacttcttcaaatatccaaacaccttgagcccctgagttggtctgactcgctagtcccagggacagacacagtgaggtttatttgctgctgacagccaagctccaaggcaagatgggacagctattgtcatggggggagacattcagatccctcttatgacttgccataaaaatgatgggcctctggtgggatcc

SEQ ID NO: 61995 - DNA, 760 bp, Homo sapiens
ccctaatgattagtgatgttgggcatcttttcatgagcttgctggtcttttgtatattttctttaaaaaatgtctatttaagtactttgcccatttaaaaatcaggttgtttgtttttttgttgttgagttttaagagttcttcatatattctgcatattaataccttatcagatgtatgatttgctaatattttctcccattccataggttgcctcttcacttctgttgattttgtcctttgatgctaaacctttgtcatccacatctttgtcatccacatctgaaccccatctctcgtttccattggtggtagtcgtggtggtggtgggcctcagtatgactgcagtaatggtacctggtgcgtcktctttccaagactgcccttacttagtttcttttgtttgcaatgagacaaagatttctgagcaccaaatgacaaagaagagttaagtttttaaaagcaattgttttcttcttgaaatgtttctttagttcctgttcaagacaatgctaagcaaaattcagatatcaccacacaacctctggtcttctgtggaaggcaagacttcttcaaatatccaaacaccttgagcccctgagttggtctgactcgctagtcccagggacagacacagtgaggtttatttgctgctgacagccaagctccaaggcaagatgggacagctattgtcatggggggagacattcagatccctcttatgacttgccataaaaatgatgggcctctggtgggatcc

SEQ ID NO: 61996 - DNA, 527 bp, Homo sapiens
gccatgaaaatcaataaaactgtcatagtagaaattaaaagtgagtaggaacttatttaaaaatcatcattctccttttcaatgcaaaaataagaactagaaaattttaataaggcaatagtccgaagaaattacttatggaagataatatgggttttttaatcttaaagggttcttttatatattcaagcttcgagattggctgccttgaatcctactaaaatttcagtgtaagttttasagagggaggaaagagtcaaagaaaaaattgcactggaaaaagttaaataagtaaggaagatattattcaagctattgcaatactggagagagtccagacctagtctgaactcagctcccctgatacaaaaggccgtggagtttttgaaagtgagggtaagggggcgatcataggccacctgtctttactaactgtcttttttcaaaggaaaaataaactttcttttatctttatgatataaggtaatttttacaacttggagcaagattaggctcttactctctca

SEQ ID NO: 61997 - DNA, 527 bp, Homo sapiens
gccatgaaaatcaataaaactgtcatagtagaaattaaaagtgagtaggaacttatttaaaaatcatcattctccttttcaatgcaaaaataagaactagaaaattttaataaggcaatagtccgaagaaattacttatggaagataatatgggttttttaatcttaaagggttcttttatatattcaagcttcgagattggctgccttgaatcctactaaaatttcagtgtaagttttacagagggaggaaagagtcaaagaaaaaattgcactggaaaaagttaaataagtaaggaagatattattcaagctattgcaatactggagagagtccagacctagtctgaactcagctcccctgatacaaaaggccgtggagtttttgaaagtgagggtaagggggcgatcataggccacctgtctttactaactgtcttttttcaaaggaaaaataaactttcttttatcttyatgatataaggtaatttttacaacttggagcaagattaggctcttactctctca

SEQ ID NO: 61998 - DNA, 631 bp, Homo sapiens
tctgcaaggcaacctgggagggagtttaggattgttctgaggcagtgaaagccatggagattcacatgtaagagggtagagaaagggaatccacatgttttgatccctccatgtgctggatataacttggtcttcattacattgcarcacctttggtgtcagagagaactggatttgaatcccagttccatcactcattatgatttgatggtgaatgtgtttttaactcgtctgagcctcagtttgctcatctataaatgatgggattgttatgagacttgcataaggtaagtgtttaaaaatctgggaataatcctgtaatttaaaagacggggttgtgatgaggcttcaataaggtaagtgtgtaaaaatctggacacaatattactaattttgtaggttttcaatatatagagaaggaggattatttttatctcatttaatttttagaacaagtttataaaattggtattattcatatttttgagataatcaaaggatcagtaagtttaaataaatcaccatagtcacaaagcagttcacaatatattgactggataattgctagtgaaaagtagcaatgatgatcacattgaaaatcttgtgttaggtggtggttttctcttgcata

SEQ ID NO: 61999 - DNA, 743 bp, Homo sapiens
agccatgacctgcagcacattggcgaccagaagacgcccaaaggtagggaggcgacagataccgcttggcctcaggagctcctctggccgttgctcaaccaaggttcccccagagacatccacagcctggggctcctcccttcttcatctagttcctttcctaggcccaggccccaagcctgaggactggctctgcctggggtctccatcccttcgtctttccctgttgcatccagccagtttcttttcccctccctacccatatgcccagttctgggccctcttcttcttcctagaggctggccaaaaactaagttttcaaagtacaaaatggatgctacagatttcgttgttgtagaggaaatgtctsacagctcttttatttaaatttaagtagttccactgggactcacagtttcataacttgagttctagaccagagctctctaccctaaagcaacagcaaggggttagaggtactcttcttgattctaataataaaaaatgatttttttgtagggacaaggtctcactgtgttgcccaagctggtctcaaagccctggcctcaagtgattcacccaccttggcctcccacactgctgggatgacaggcaacagccaccacacttggtcattggaggtgctcttgctttgtgtgtttcggctggtcttcaggcgcagctctctgtaagatgctcctgcagtatagttctatgtctttctgcacagattcagtggatcc

SEQ ID NO: 62000 - DNA, 743 bp, Homo sapiens
agccatgacctgcagcacattggcgaccagaagacgcccaaaggtagggaggcgacagataccgcttggcctcaggagctcctctggccgttgctcaaccaaggttcccccagagacatccacagcctggggctcctcccttcttcatctagttcctttcctaggcccaggccccaagcctgaggactggctctgcctggggtctccatcccttcgtctttccctgttgcatccagccagtttcttttcccctccctacccatatgcccagttctgggccctcttcttcttcctagaggctggccaaaaactaagttttcaaagtacaaaatggatgctacagatttcgttgttgtagaggaaatgtctcacagctcttktatttaaatttaagtagttccactgggactcacagtttcataacttgagttctagaccagagctctctaccctaaagcaacagcaaggggttagaggtactcttcttgattctaataataaaaaatgatttttttgtagggacaaggtctcactgtgttgcccaagctggtctcaaagccctggcctcaagtgattcacccaccttggcctcccacactgctgggatgacaggcaacagccaccacacttggtcattggaggtgctcttgctttgtgtgtttcggctggtcttcaggcgcagctctctgtaagatgctcctgcagtatagttctatgtctttctgcacagattcagtggatcc

SEQ ID NO: 62001 - DNA, 743 bp, Homo sapiens
agccatgacctgcagcacattggcgaccagaagacgcccaaaggtagggaggcgacagataccgcttggcctcaggagctcctctggccgttgctcaaccaaggttcccccagagacatccacagcctggggctcctcccttcttcatctagttcctttcctaggcccaggccccaagcctgaggactggctctgcctggggtctccatcccttcgtctttccctgttgcatccagccagtttcttttcccctccctacccatatgcccagttctgggccctcttcttcttcctagaggctggccaaaaactaagttttcaaagtacaaaatggatgctacagatttcgttgttgtagaggaaatgtctcacagctcttttatttaaatttaagtagttccactgggactcacagtttcataacttgagttctagaccagagctctctaccctaaagcaacagcaaggggttagaggtactcttcttgattctaataataaaaaatgatttttttgtagggacaaggtctcactgtgttgcccaagctggtctcaaagccctggcctcaagtgattcacccaccttggcctcccacactgctgggatgacaggcaasagccaccacacttggtcattggaggtgctcttgctttgtgtgtttcggctggtcttcaggcgcagctctctgtaagatgctcctgcagtatagttctatgtctttctgcacagattcagtggatcc

SEQ ID NO: 62002 - DNA, 743 bp, Homo sapiens
agccatgacctgcagcacattggcgaccagaagacgcccaaaggtagggaggcgacagataccgcttggcctcaggagctcctctggccgttgctcaaccaaggttcccccagagacatccacagcctggggctcctcccttcttcatctagttcctttcctaggcccaggccccaagcctgaggactggctctgcctggggtctccatcccttcgtctttccctgttgcatccagccagtttcttttcccctccctacccatatgcccagttctgggccctcttcttcttcctagaggctggccaaaaactaagttttcaaagtacaaaatggatgctacagatttcgttgttgtagaggaaatgtctcacagctcttttatttaaatttaagtagttccactgggactcacagtttcataacttgagttctagaccagagctctctaccctaaagcaacagcaaggggttagaggtactcttcttgattctaataataaaaaatgatttttttgtagggacaaggtctcactgtgttgcccaagctggtctcaaagccctggcctcaagtgattcacccaccttggcctcccacactgctgggatgacaggcaacagccaccacacttggtcattggaggtgctcttgctttgtgtgtttcggctggtcttcaggcgcagctstctgtaagatgctcctgcagtatagttctatgtctttctgcacagattcagtggatcc

SEQ ID NO: 62003 - DNA, 586 bp, Homo sapiens
tctataggtataactattctattttattcacatctggctaaaatatccttcaaaaataaagacaaaatgaaaacatttttagaaaaggaagaattgaaataatttgtagaactgcaccataagaaatgttaaagaaagtgctttaggttgaagaaaaacaatactagaaggaaatttaggtccacatgaagaaatgaacagcattagaaatggtaatgatttttacgctttacatgaaacaatagaatactatttattaacctataataacattattaacttatatataatttagtaactgtgagaagttaaaaatgcatattgtaaatcaggacatagggataagcttaagaaactattctcagaaacagtataatgaaaacaatactgttagaagttaaagaagacctaaatgttcatacattggaggcttcaatattaccaaaatgtccactttcaactaactgactatttaaagtaatccaattgaaaaytgaagtggtttgtaaaaagaagaaactgaaaagctgattctaaaatttatatgaaaatgcaaaataattagaatagtcaaaacaattttgga

SEQ ID NO: 62004 - DNA, 594 bp, Homo sapiens
tcaggagaatgaataaacaaactgtggtttattcatatcatggcatactactcaacagtaaaaaggaacatacatgaacctcaagaatattatgctgagcaaaagaagtcagacagagtacatattgtatgattccttaatatgaagttctagaacaggcaaattgaatctatagttatagaaaccagatcagtagaatgttctggttctaggcacagaaccagagggacagaaataggcacagaaatagaaatgttctgtgccttgattggcaaggcagttacatgggtccatmtatttgtcaaaactcaatgaactgcacatttaaaatggatgtattttactgttaaattatacctcaataaaattgtttttttaagaaaagtgaaaggggaggaagacatgggaaagttataaaatagtatgcagttattaaaaggaataaggtagataaatatttctgaattgaaagatatagtgttaagtggaggataagagttgttaaatagtacacttgatctagtttacattttcaaaaaaagtagtagagtgtgagggcagaacaagatggtcaaatagaagcctccaccaaat

SEQ ID NO: 62005 - DNA, 635 bp, Homo sapiens
gtggctgggaggccttataattttatttttggtttacaattatgttatcttgctatttgtgtgtgttttccttttctcagttttcacttaccccaaacaaggaaacatgttcataaatatgtattaaaccactacagcaatctctaaactgggaaaatgtatgcatgtttgggtgtgggtgtatgcttacagtctgcttaattcctgggttttttgtttgtttgtttctttgtgtgttcttttgtcaagcaagctgctaacctccaccccgcatccctcacaaccactccaagaccttttttgttgttgacaccttccccaaaccagaaagaaataaggtgtgtttattactgwctccctggcagttttaatgaggtcatttccccagtccttcctccaggacagactgtactttcactgttgagcctcaatatttgctgcagaaactacagatatgtgatagaactgctgtcagtttggtaaagtaaccctttctccccttaatccaacttcagatgacaagagttattgagagctgagaatgacaactttaaactcatccagtagctaaaaatcagtggattttctaacacagtatttaagcatagtatactttgctgcaaaagagccagcca

SEQ ID NO: 62006 - DNA, 407 bp, Homo sapiens
aaatgccccagagaatgttttcttcccttttataggatgcaggyttctctttagcttctccaccaatcctgaaattcctttgtttaaaacaaaacgaaacaaaacaaaacttgtggcttttctcaaaatgacaaactaaacatgcagaatctaaaaatccccaaacacatcccagactataaacctttctgactcaacaagcagattttatggagaccccagtaaaaccccaaggatggcaataaataaatcgccagccggttctcccatacagctgcctcttccacaagacctcaagcctctgaaggcagagggaagaccccatgcgtcttggttttggggacccacagatgggccatccaaatggccgagctgcctagatttctcccaaatagtcgcgatggaag

SEQ ID NO: 62007 - DNA, 1034 bp, Homo sapiens
tcgtatggttttgctggtggagaaggactgtctgatcattgaacttgccacatcaaacattcttttgctctttctgcctcccaggatcccagatcccctaattctgtcaggtccaaggacatgggaatcttgggactgaaatggcaagtggcccamccccaggtgtcccggctccactcacactgttgacctggctctaacaggctgtcgggagaaggggatctgtctggacaggcaaggtcccccttgggtggctgagccctgcagacctcttccccttccccagccccccagcatctatgtttcctgaacactgctgcccttctgccttgagtggagaggctgggatggcgcatgtgctgtgcgggaccttccgacccatttcagtcctcacggctccaggtctgcgagagaaggctggctcttcagtggggccataagtttgaattcccagaaacacccgcacacaccagggaaatgagaactcatttccctcctggaccacccccagtcgtgtgtttcctgggcaggggattggtctatttttctcctggaaaattcacccttagaaactctccgtggacctgaatgcccccgaactgtagctgcacccctagactgtgtcccctctagaaattctgttttgcttttcttttgctccagagcactttgtttctgtgacaatactcagattccctgagatgttggggaggctgtttgtttcctggttgatagattcccttatcccgagctcactgtggctcggacaccaatttataaatacaaggccgctttcctcgctcaagaagtgcgttagtcctgcggccaaacgacatctttaaatggtagcgaggcatttagatttctcttctgcccagctgacagtaggtttacagtttataatctggcctttgtaaaagcatttgtcagcctggatatttcatttttaagcccgaccacccatgcagagggccaggcaggaagcggcccttcgtctgcacccagtcagcttagaggttggccgcagaatccca

SEQ ID NO: 62008 - DNA, 1034 bp, Homo sapiens
tcgtatggttttgctggtggagaaggactgtctgatcattgaacttgccacatcaaacattcttttgctctttctgcctcccaggatcccagatcccctaattctgtcaggtccaaggacatgggaatcttgggactgaaatggcaagtggcccaaccccaggtgtcccggctccactcacactgttgacctggctctaacaggctgtcgggagaaggggmtctgtctggacaggcaaggtcccccttgggtggctgagccctgcagacctcttccccttccccagccccccagcatctatgtttcctgaacactgctgcccttctgccttgagtggagaggctgggatggcgcatgtgctgtgcgggaccttccgacccatttcagtcctcacggctccaggtctgcgagagaaggctggctcttcagtggggccataagtttgaattcccagaaacacccgcacacaccagggaaatgagaactcatttccctcctggaccacccccagtcgtgtgtttcctgggcaggggattggtctatttttctcctggaaaattcacccttagaaactctccgtggacctgaatgcccccgaactgtagctgcacccctagactgtgtcccctctagaaattctgttttgcttttcttttgctccagagcactttgtttctgtgacaatactcagattccctgagatgttggggaggctgtttgtttcctggttgatagattcccttatcccgagctcactgtggctcggacaccaatttataaatacaaggccgctttcctcgctcaagaagtgcgttagtcctgcggccaaacgacatctttaaatggtagcgaggcatttagatttctcttctgcccagctgacagtaggtttacagtttataatctggcctttgtaaaagcatttgtcagcctggatatttcatttttaagcccgaccacccatgcagagggccaggcaggaagcggcccttcgtctgcacccagtcagcttagaggttggccgcagaatccca

SEQ ID NO: 62009 - DNA, 1034 bp, Homo sapiens
tcgtatggttttgctggtggagaaggactgtctgatcattgaacttgccacatcaaacattcttttgctctttctgcctcccaggatcccagatcccctaattctgtcaggtccaaggacatgggaatcttgggactgaaatggcaagtggcccaaccccaggtgtcccggctccactcacactgttgacctggctctaacaggctgtcgggagaaggggatctgtctggacaggcaaggtcccccttgggtggctgagccctgcagacctcttccccttccccagccccccagcatctatgtttcctgaacactgctgcccttctgccttgagtggagaggctgggatggcgcatgtgctgtgcgggaccttccgacccatttcagtcctcacggctccaggtctgcgagagaaggctggctcttcagtggggccataagtttgaattcccagaaacacccgcacacaccagggaaatgasaactcatttccctcctggaccacccccagtcgtgtgtttcctgggcaggggattggtctatttttctcctggaaaattcacccttagaaactctccgtggacctgaatgcccccgaactgtagctgcacccctagactgtgtcccctctagaaattctgttttgcttttcttttgctccagagcactttgtttctgtgacaatactcagattccctgagatgttggggaggctgtttgtttcctggttgatagattcccttatcccgagctcactgtggctcggacaccaatttataaatacaaggccgctttcctcgctcaagaagtgcgttagtcctgcggccaaacgacatctttaaatggtagcgaggcatttagatttctcttctgcccagctgacagtaggtttacagtttataatctggcctttgtaaaagcatttgtcagcctggatatttcatttttaagcccgaccacccatgcagagggccaggcaggaagcggcccttcgtctgcacccagtcagcttagaggttggccgcagaatccca

SEQ ID NO: 62010 - DNA, 646 bp, Homo sapiens
atctagaatttgctcacctcttccggtccgacctagggctgggattgggaraggcatccctggggcagtggagcagggatggggacccttctaggatgtgctcacctcttcaggtctgacctagggctgggactcggggaggcagaggcagcactgaggagttatggcaaccatgtcacccagtcttccctgagactcctacccgcttctctatccatcccttgcctgctggctgccagtgaatacccctcccagggtgtgtgtgcatgccactcagtgactcctggacatgcagaggccaccaggaacgaagctgggctgaggagtggtgggaggcactgggaggtggacagagcctccttagacattgaacaggctttgcaaaacttcttaagagccagacccaggagctctgaggcctgggtggaggtatgtgtggagaaggctacattcctaagtcaagcccctggccctgccacctaggccccaagccaggaccaaggtatctcttcatcctctcttcttagtgaagtcagacgtggagcagggacctacctatccccagcttctcgacacttcccagggttagagcaaacttacaaatatcaaaagcagaatgcaggtttctttcagcatggctaggcac

SEQ ID NO: 62011 - DNA, 526 bp, Homo sapiens
taatgcatgcagcaatgtttcagttttcaaaattaattcttaaaaaaggaggctttataatatctattcccaaagtaacttagatgatcttgctcttcaaatgtacaaaggttcccatagatattaaatgaacaatttataattaattttcttgagtcgcattttaatggtgctctagttatttgtgtaatattggatacagtatcaagaacttagtaactgaaaataattccattgttcttgccctgaattattagagatggcatttttaaatggactgtctgcctaaactaaatgaawttttcaagctttctgcaatctcccatactcttttcatttctttcttcaatagttacaaaaaggtgttgtcaaagcgtggagaggattgccaattgaaacagaaaaatccaaacaatgttccttaagtactttgctttctttggatcgcatttttcatcactgcttatatagtcatcttattattgaactttatctactctaaatcacatttttttcacacatctca

SEQ ID NO: 62012 - DNA, 526 bp, Homo sapiens
taatgcatgcagcaatgtttcagttttcaaaattaattcttaaaaaaggaggctttataatatctattcccaaagtaacttagatgatcttgctcttcaaatgtacaaaggttcccatagatattaaatgaacaatttataattaattttcttgagtcgcattttaatggtgctctagttatttgtgtaatattggatacagtatcaagaacttagtaactgaaaataattccattgttcttgccctgaattattagagatggcatttttaaatggactgtctgcctaaactaaatgaatttttcaagctttctgcaatctcccatactcttttcatttctttcttcaatagttacaaaaaggtgttgtcaaagcgtggagakgattgccaattgaaacagaaaaatccaaacaatgttccttaagtactttgctttctttggatcgcatttttcatcactgcttatatagtcatcttattattgaactttatctactctaaatcacatttttttcacacatctca

SEQ ID NO: 62013 - DNA, 652 bp, Homo sapiens
gcctgcctccgccttccaaagtgctgcaatcacaggcgtgagccaccacgcctggcctcaatacacttttaactgcctaggattggaaacaagacttcatttctgcccactctcccagtggaaaactatgaaataaaaacttcctggactttcaagaagaaaaaggtgtggtgagcacagtactgtctctgccacaggtaccactggcaataatcgcaatgacagctccatccaggtgcattgtcttttaacagggccaatggtcacaggaaagaaacaaattgtaatttcactttatatttattatagaaaactaaggtataattatactaaggtaaaatttaaatactcctaagcacagaaagatcttttattagaataaaattttgtaaaagaatggaaataagaattcaaagggaaaaagaaatgatgtaaaattcccacctcttatcaagtggatgatggtgctatactacttatattccattagmtatattataacaagctgagtaatagtattacttttgaaagccaatatttacaacagaccatatattacacccttgcaacctttgaagttttgatgaaaacttttagattataacataaaactgaatgaaggtatatagtttttcaaaattccctaggagat

SEQ ID NO: 62014 - DNA, 1319 bp, Homo sapiens
  misc_feature (1)...(1319): n = A,T,C or G
tggcatcctcatagtaccacatgcagagaagagagattttctaagctcagattttctgtgtcatccacagaaacatctcagattttctgtgtcatctttcttccagcaaagggctggaagaaatctcatttaagctaattactgctccgtcatttactaactcagcttcttgaatttttttcctccatggtctggagcctggtacaatattaatttgaaattaactaataaaactttttaatagctaaagatttcctagcagaaatgtgtttctctctaagattgagatgtatatacagctggggttgggattttactgagagcttgaaaagagatgggtgtagtatagaaggagaaacacttgatggtcattttacgtaatatccaaagccgtttaactgagcctacagccaaaaaaggagtccacccnnnnnnnnnnnnnnnnnnnnnnnnnnnnnnnnnnnnnnnnnnnnnnnnnnnnnnnnnnnnnnnnnnnnnnnnnnnnnnnnnnnnnnnnnnnnnnnnnnnnttgcttttcagttttaatttttgtgggtacatagtaggggtatagccaaatatatttagaaggtggaatcattaggacttggtgtcttacatcaggtcccctacaagcagatcctgagatggggatttgggtgctgatgctttattgagcgataaacttgtgagaaagtgagagaagtaggatagacagggaggaaatgccaggtaggatgtggaatcagatagtctatccttggcctgatgaaaatagaggaataaatttcaccataaaggacacctgtgtgtccttcacagctaaacactcacagcagctgggggtagggttgggtgtatacagcagccaggaacagggatctgcttgaaacactaccagcattaaccacatttggtgatggggcagtgggtggagggagacaaggatggctcccaaatttgtggtatgaacaactgaatagcttcttgtatataacagcaacactcccctcataatatcaaaaacctaagattttagaagaactattaaaagactcttcattttccaaacaaamaaaaaaaaattccccttagcttttacttttctaggttaaaaataacaactctttgacataattgcatgggatcaatttcccattaaaaacacataaactttttttaaagtattgctcttttagactttttccatttagtcggcttcctgttgaaaatagatacaaactggttctagtactctaatgatcgaagattcacctacagttccaatattatgttagctttttatttaaaaagtacgt

SEQ ID NO: 62015 - DNA, 645 bp, Homo sapiens
actttgaacgcccagccccgttgcagagcatcctcctggatcagtcaggcttttgtttgcagctgcatcagaattcagcctctccctctgccctgttttactgcctgtattccctcacaggtgttgccccagagcactctgaataaacttcctgcctgtgaatctctaccagagagtcagcttcctgcacccagtgctctataaggtttctaggcaacaggaaatgccctaaaggccagaattcctctcgcgggtatagcagagagtaaacagagtagtgttttrtagtggctacaaaagaaaagggcaatggtggtggactttaaaagacaggatgagctgtcagccctgatggggagcccccagaaagctgtagctggcccatgtgccgcacattttgccgagtagggatactgccgagcccccgatgttctgtttgtaaagtgggtgtgtagcccaggtatcagctctcatcttcactgccaactgtcctcttcagctgcagtcctatgaattgggccctgaagctggaaccggaagatctgattttagatctcccttgccaattttgtggctttgtgattctagaagttgtatttctcgtttgaaaaatgggtatgctttgaggattgaaatgatcctaat

SEQ ID NO: 62016 - DNA, 1654 bp, Homo sapiens
  misc_feature (1)...(1654): n = A,T,C or G
tattctaataaaggtattctttggagtcagcaaacattcacatcctattaagcatcaatgaacgtattatagtataataaagtggaaaggtcttagaagattatttatrggctattagttattagtgtaattttaaaacataatcagtaacaattagcaaaattgataatattggatatacagtggtttccactcactagtactagtaatactagcaataattctatatagtaatatcagttgaaaactaaacctcttctaagttctttgttatccttatgggagttcttgtttatcagatcattggggcatcacttcactgaaactatttccttatattcataaacagtattgacatcatatactaaatttagaagtttattcatagagtagaataaagttataagattacttcaataccctttgtccaagcagatgcactggtcaaaaagccaannnnnnnnnnnnnnnnnnnnnnnnnnnnnnnnnnnnnnnnnnnnnnnnnnnnnnnnnnnnnnnnnnnnnnnnnnnnnnnnnnnnnnnnnnnnnnnnnnnngaattctctaaacttacttcataggttttatgaaaattgaatataaaatatctggcatatagcaagtgtttaatatgctaccagttactactgttgtatagttgataagactttggtgttaattaacttgcatttgcatctgtaagtatgaaatgaaagcctgtgaacaattttcagatgtcaacaagtaggtggaaagacattttggggcagaagattctgaagcatgcgacaatggtagcagtagtagtagtgatgatgatgatgatgatggtgatgatgatgatgatgatagctaccacttattaagaactaacaaggggccaggcactatgaggctggctggaatgcttagctctctcgggtaggacaacacttaagtccctggtccttctcagtgctgggtgatgaatcagaagctggagataggaatgttaccaagagagaaggggacatagaaccaatgagaaagaaacagcaggccgagcgtggtggctcacacctgtaatcccagcactttgggaggctgaagcgggagaatcatgaggtcaggtgtttgagacaagcctagccatcatggtgaaaccacatctctactaaatatacaaaaaattagctaggcatagtggaaggtgcctgtaatcccagctactcaggaggctgaggcaggagaatcccttgaacccaggaggcggaggttgcagtgagctgggattgtgccactgcactccagcctgggtggcagagtgagactccgtctcagaagaaaaaaaataaaagtaaagaaactgcaaagcattagagtgggtgctttgacagttaatggactagttcttcaaggatgaatgagagttttccagaaggaaagatggggtaacagtatttccagcaaagagaacagcagtcccaaggcaaaaagctgtggatggcctggctgttcagggaagaacagatgtttcattgtgtggcatagacttcagagacctgaggacagatctggtaagaagaatcttctatggtaagcaaattggaaggggatggaatttacattaaatgagtacctacgatctgtcaggtgctctgggtacttcatataca

SEQ ID NO: 62017 - DNA, 1023 bp, Homo sapiens
ttttgttggattttggaatatttgcattatgcttactggtgaggcatccctaatctgaaaatctgaaatattccacagcatttcctataagcatcatgtcagccctcaaaaagtttagaattttggagcattttagatttcagattttttaattacagatgctcaattttatatatatgtaaggtgaattatatatatattataccctattggttatgtttctctgaagaaccctgacaaatacagggttcatatgttcatatgtttaatgcatgtatcctacattaggactaggattttatctttttttatttttagcactgtatgctcagtgcctagtatgtagtagttaggctctccatgcatatttttggtgaatgaatgaagtgtggtgaactcaccaagaaagggaattggataatttggccctgagagggggctcttggaaatcagccaaacctgaaaatacctccactgaattcctttgggcaataaacctctcctcaggaatcttctagagtgtgtagatgaaccaacaggaaatcacatccaggaattgtgttgagtgtctctgtatttaatttcttacaagtgaaagaacgctctacactcggcaggccactcttcagctttgtttctatccacaggccatgattttaagtgcagtgactgcatttggcacttctgtaacgmcttgtatttaaaaccagcttttagagtagatccctatcagtactttgtttttctggaaagagtgaaattgaaaacttagcctcaaatatcatctattttagtgtcagccccaataccttaatctaaagaaggtgctttcctgagagatgggagcagactttgaggccgacactcatctctactcccacgtcacaccctctgtggggccagctcactcaaaacagcagcagagcttagtctccaggctgcggggattgttgtaatgctattgaagacgggtcaaaagtcatctcgataagattattttgaaacctctaggatagcaattcc

SEQ ID NO: 62018 - DNA, 674 bp, Homo sapiens
tctatttctttatcacacgttcacttctcaattcacttaaaactcttctagcactttaaccactttcctgaaactgtctttctgaggtcaaccaagggcctctttatcgaacagtctaatgacatttctcagtcctaatctcatgggaccttgctgcacccagtgtcacagcagtttgcatctccttccttgtgaaactgtcttttagattctgttcattactgagagtaaatattaccttttggctagtatttctcagacctgcttcttcactgttctcgttggatggggttggaaagaacccattctaatcatattttcttctacattccaggtgaggggagactctttaggcttatttgcagttcatttcctatcactctcaccaaactggtaggtaaatatgtagcagagctgtgtattaggatttggtctattccatccttcccctttcctcaagatacatcctcatttgcatgcctcacaataatgcctgaagaacacatttttcaatgagctagtttgtaagcctggggccttcayttagcattatacaaaggtccaaaattttaaaaacaccatagagtgttttgcacatttacagaaaaataaaagataattatgtggatgtcattttcttagcaatctgaataatgaatttattttatttaaat

SEQ ID NO: 62019 - DNA, 800 bp, Homo sapiens
cttgaggtcaggagttcgagaccagcctggccaacacggtgaaaccccgcctctacaaaaaatacaaaaattagccgggcgtcatggcgcatgcctgtagtcccagctactaaggaggctgaggcaggagaatcactggaacccacgaggcagaggttgcagtgagccgagatcgcaccaacgcactccagcctgggagacagagcaagactctgtttggaaaaaaaaaaaaaaaaaaaagaagacagtgacaatggatttcctagaaatacgcrggaaactacttgacagatgcaaaaggagacaggcaggttataaactcatgtgggttcaaaagtaacttaaaatactctatcaaaattggatcacaaattcaggttagaaataaagcaattttatcacattctcagggaattttaatcatcaccttaaaataaactaataattaaaaatatgagaaatgtcttacaagaaaatctattaatatgtcaaaaattctaagtgcaatcactgttgcaatggaacaattttaaaatcactaatcaaaacaaaatgaacaaacttgtccagactaagataaatccaaaaagaattctgaattttttttaaaaaatctgttttaaaagcacatgctttcctgtgagtattctaccttattttcaacattatcatttccaccttaaagaatacacagccctcattctcaactctgctttattcactgaaatggattctaaggcaaatggtctctccattagcctaagccatgctctgattaagaaacacagtttcttataaaa

SEQ ID NO: 62020 - DNA, 741 bp, Homo sapiens
tcagttaattaatgtggcatagttttaaggaggatcctttatagcaacatgcaactaagagctaccaatgcactaagtaccactggacacagaagtaaaatgtttttgctcatcttcttactcacatcaactaagacatagctaatatatgtgcagtmagacttctatgtttaagtggagatgagaattatttggtaaataaaaatgtggtgaatcaatgtgaaaaaaccaaattaattgtagttaacagatttgtttactcatttgctggcaaaacaagctcatctgttagtacagtcaagctgccagccaaagcagccttcctcaaggcagaaattgcttaattaatccttaactgaagaaatgtgtcccccaaacctgaactctctcattgtatcactaagagtccctcttgttgcattatcaatttgtagtcaattttttaattgtaatctatttctaatgtctttgtgatgtagtcaataaatagtttgtcttagaagttaaagctacatctgtgttttgcatatgtgattgctagaagaggtcatctggtaaaaagccaagatctttacacagtgaatatttaacggtgtaattattattactaacctcagaatatataattgatggtggttgctactaattataaaagcagcaaaatagcttaattggagcttaaagaatctattgaaagttatttcttgcaaattgtttttatttggagtgtttacataaaag

SEQ ID NO: 62021 - DNA, 741 bp, Homo sapiens
tcagttaattaatgtggcatagttttaaggaggatcctttatagcaacatgcaactaagagctaccaatgcactaagtaccactggacacagaagtaaaatgtttttgctcatcttcttactcacatcaactaagacatagctaatatatgtgcagtcagacttctatgtttaagtggagatgagaattatttggtaaataaaaatgtggtgaatcaatgtgaaaaaaccaaattaattgtagttaacagatttgtttactcatttgctggcaaaacaagctcatctgttagtacagtcaagctgccagccaaagcagccttcctcaaggcagaaattgcttaattaatccttaactgaagaaatgtgtcccccaaacctgaactctctcattgtatcactaagagtccctcttgttgcattatcaatttgtagtcaattttttaattgtaayctatttctaatgtctttgtgatgtagtcaataaatagtttgtcttagaagttaaagctacatctgtgttttgcatatgtgattgctagaagaggtcatctggtaaaaagccaagatctttacacagtgaatatttaacggtgtaattattattactaacctcagaatatataattgatggtggttgctactaattataaaagcagcaaaatagcttaattggagcttaaagaatctattgaaagttatttcttgcaaattgtttttatttggagtgtttacataaaag

SEQ ID NO: 62022 - DNA, 616 bp, Homo sapiens
ggcagtgttctggagggttcccatcttcccctaactggtgaaaaatcacctccttaaatatgaccctaaagtagttttgtggccattcatctgttttgttagtatctgttggaaactagtgcatggagggaagtccatgtgttcagcccctactcattcaatatgtgttcaagatagattgatagacaggtgatacatagattgattaacagacagacagatgggtggatacgttaataggcaaacagatggatagatgattaatggttacaatagagttgacagattaatgtgacagattggtagagatagatgataaacacacataagtagatgatcaatctgtatagatcattgatcgatcaatagacaataggtgctcaatatatctttatttttagatctctatagagatatattgagcacctactctatgttcagcactgtttcagacactagagacatattggtgagcatgccatatayagtccctgccctcttggagttgacggtctagatctggagagagagagacctgtaaattaaaagatgcagtactgtgggggtcaggagaaaagctatgatgatcaaatgcttagagatgtacctcagtggt

SEQ ID NO: 62023 - DNA, 660 bp, Homo sapiens
caggatatagaagaaattgcaggtggcacaagtggaaggagggaagcccaccagagaggattgctgtgggtcacagctgcacacacccccagctggctggcaggaaggaaggatcgcaggatgactctcatgcttacrgtccagatctaggtgccttgggaaagccaaagctgtctcttcctaggaaacctatttgaacccctgtagatgacaggcaatgctgagggtctctagcttatgatagagcagctgtaaaaacatgatctctattcttgttcagaaccattgcaccaagtggaggtgtgtgatttagaaaaccaaggatggaattggaaacccgctgtacctgttgagtggcagggtgtatgtttctgtggaatggcctgcaagcaagacatgcattcattcattcattcattcattcattcgttcattcattcactcattcagctcatgtgtggttttcttttcaaagcacatgccatacaccaggcacaggaggcccggtggtttaataaaaggaccacaggccttttgatccttcagactgagtccagatgccagatcttctgcttacaagctgtgcaaccttgagcaggtgacttagttggagcctcagtttcttcatctgtaaaatgggtatatgaaagctaacaaagg

SEQ ID NO: 62024 - DNA, 660 bp, Homo sapiens
caggatatagaagaaattgcaggtggcacaagtggaaggagggaagcccaccagagaggattgctgtgggtcacagctgcacacacccccagctggctggcaggaaggaaggatcgcaggatgactctcatgcttacagtccagatctaggtgccttgggaaagccaaagctgtctcttcctaggaaacctatttgaacccctgtagatgacaggcaatgctgagggtctctagcttatgatagagcagctgtaaaaacatgatctctattcttgttcagaaccattgcaccaagtggaggtgtgtgatttagaaaaccaaggatggaattggaaacccgctgtacctgttgagtggcagggtgtatgtttctgtggaatggcctgcaagcaagacatgcattcattcattcattcattcattcattcgttcattcattcactcattcagctcatgtgtggttttcttttcaaagcacatgccatacaccaggcacaggaggcccggtggtttaataaaaggaccacaggccttttgatccttcagactgagtccagatgccagatcttctgcttacaagctgtgcaamcttgagcaggtgacttagttggagcctcagtttcttcatctgtaaaatgggtatatgaaagctaacaaagg

SEQ ID NO: 62025 - DNA, 660 bp, Homo sapiens
caggatatagaagaaattgcaggtggcacaagtggaaggagggaagcccaccagagaggattgctgtgggtcacagctgcacacacccccagctggctggcaggaaggaaggatcgcaggatgactctcatgcttacagtccagatctaggtgccttgggaaagccaaagctgtctcttcctaggaaacctatttgaacccctgtagatgacaggcaatgctgagggtctctagcttatgatagagcagctgtaaaaacatgatctctattcttgttcagaaccattgcaccaagtggaggtgtgtgatttagaaaaccaaggatggaattggaaacccgctgtacctgttgagtggcagggtgtatgtttctgtggaatggcctgcaagcaagacatgcattcattcattcattcattcattcattcgttcattcattcactcattcagctcatgtgtggttttcttttcaaagcacatgccatacaccaggcacaggaggcccggtggtttaataaaaggaccacaggccttttgatccttcagactgagtccagatgccagatcttctgcttacaagctgtgcaaccttgagcaggtgacttagttggagcctcagtttcttcatstgtaaaatgggtatatgaaagctaacaaagg

SEQ ID NO: 62026 - DNA, 614 bp, Homo sapiens
gatccaaaatgttaatataatctttctcaaattatacagctctggggcagagctaaggttaaaaacctaaacctcttgayttctagcccaattttctttttgcttcagtggatggggacaaaaaatatagcaatgccaaaatacagtacactcaaacataaatcatggttaactaaactactgctgaggttgggtggctcaagaaccggacttctgtgtgtgtctaaattgggagtacacagttaaagatttcagcaattactcgtatttctctcctgctgatttgtacatagtaagtgatgaataaatataatctataataaactattggattattgttgaatttctccccaggctgactctttaagtagacctttgatggtggagttactatgaccttgagcccttagctgcctccaacttctaccacattccccatgccagtcatgaaccctagatcaccgtgttctgtaaaacagctggagacagtcacacactgagtaaacttcattctctaaatcactagcccttgatagattcagacagttgctcctaattaatgttcaggaatcctttgttcccctaattaattctctggaaagttcacattatag

SEQ ID NO: 62027 - DNA, 892 bp, Homo sapiens
actgtaactttttgcaataagtgatctatgagccttcaagccatatgtcttcattcctggatttgtgttattctctggaagggcataaaataggaaaaacacggtgacattagcacagtcttttgctatttgctttatagcatcaccagctccaacaccaatcctccagctcttaagggyatctcacatgtgcttcaaatagttcctttattgaccacagtgggtaggccttctttgtatacttctgctccggagccactgctctgctgtcaaggtctccagtgtatgtggaccatgttaaggtgccctgtatctgctggcagagcccattgtgattctctctttctcaccagtaccactgctttcatgagtattgccctcacctccacagggcactgatgctgccactaggcatggacactgcctctccctggtactgctttttttcagagagtgctatcagatgcttctgctacaatatgccactgccatctcaatgcacccctgacacacactctggctactgtcacctacattgggcctgtttttgcacagaaccctcaagaaaccctgtccaatactacatggggctctgtgaaaaactgcattcttctctttcgtgagatatcaaaaaagggctgtttgggtcccatgctctacagaatttttattgaaagctgtgatgagataaactttttgacatatatgtgttcacagcttttttcttccttttttcccctactttagctcctttgcctctcccctctctgaagagatgatgggaaaaagatctaagtagatggattaatttgagtaaagcaatcagggaaaaagaaccacattcctggaggagcgaggcctgtagtagaaagctatgccataccagatgcat

SEQ ID NO: 62028 - DNA, 892 bp, Homo sapiens
actgtaactttttgcaataagtgatctatgagccttcaagccatatgtcttcattcctggatttgtgttattctctggaagggcataaaataggaaaaacacggtgacattagcacagtcttttgctatttgctttatagcatcaccagctccaacaccaatcctccagctcttaagggcatctcacatgtgcttcaaatagttcctttattgaccacagtgggtakgccttctttgtatacttctgctccggagccactgctctgctgtcaaggtctccagtgtatgtggaccatgttaaggtgccctgtatctgctggcagagcccattgtgattctctctttctcaccagtaccactgctttcatgagtattgccctcacctccacagggcactgatgctgccactaggcatggacactgcctctccctggtactgctttttttcagagagtgctatcagatgcttctgctacaatatgccactgccatctcaatgcacccctgacacacactctggctactgtcacctacattgggcctgtttttgcacagaaccctcaagaaaccctgtccaatactacatggggctctgtgaaaaactgcattcttctctttcgtgagatatcaaaaaagggctgtttgggtcccatgctctacagaatttttattgaaagctgtgatgagataaactttttgacatatatgtgttcacagcttttttcttccttttttcccctactttagctcctttgcctctcccctctctgaagagatgatgggaaaaagatctaagtagatggattaatttgagtaaagcaatcagggaaaaagaaccacattcctggaggagcgaggcctgtagtagaaagctatgccataccagatgcat

SEQ ID NO: 62029 - DNA, 641 bp, Homo sapiens
gggacttcatagctcatctctctatcacacacagcatgtcagctttcctgagatggtaggaggacccccgcagcagctttaggtttcttattctttcacaacaacttcaaatgcaggaaaaagatactacattttcctgtgtgcgtttataagcagcaactaaactgtttccagagttttcccagtacccactttctcacatattggaatgagtatatacacatatatatacacatatatatgtgtatatatatgtgtatatatgtgtatatatgtgyatatatataaaatgtgtatatatgtgtgtatatatataaaatgtcagccattaactcaattacaataaaacaaaaaagcaagcaaaaacgattgtttttagaactcaattaagcatgctgacatgttattttatgagataaatatattttccaggaaatttttgaaaaaaggtagaataaagaatgactagctctttaaggtcccaaaacgtactatacatttattttttaaaatgcatttgttacggattttttttattaaatacgctagtaaaacagagtatagaattagaaacagaaagagttgagatttagtttcatttttttgtaagttgcattccaaactcatttctttcattaaat

SEQ ID NO: 62030 - DNA, 724 bp, Homo sapiens
aaggacttgcccaggtccctgtttagtaggtggagggcccagaggtggctccagatctccacaccccaacacagcgctccctccaccacgacatggtggaggggtggacatggtggagaggtccctccaccccaggacctctctctgtggttgcacagaggttggccaccatgatggcctgacctcaggaggagaaagcaggatgcttggggctggggactcagctcagggctcccctcccagctctattgccctgcctggcagctgggaccctggacacgtccctcggggtttgtggggggtgggtgagaggacacccwgggagctcccagcacacatgaatgctcagctcagagtctctgcctccattgggtcctggccttggcttcacttgtttccttccctgtaacccccatcctgtcctgtctgacccctgctgagcctccctccaagatccccctcagcctccacttcagacatagccctgtcagtgcctccaggactgtccaaggtcctctggtcacacaagggagcattcccatcctagacccagatccagggccctcaccaagcagcctccagagcccggttctctcgaagccccttcaatgggatgttggaaaaaagtcccctcctcaggctctcccagcccagcagtgacagctgagtgacaggctggtgccttctcctgccccctcgaaggggatgagcccattaatatgga

SEQ ID NO: 62031 - DNA, 649 bp, Homo sapiens
agggtagctggggtggaggaacgggggaagaaggcattgatgacaatagcagtagccaacacatctccacttgcagatgaggggactgggcacagaggggttgaatgctttgtccacgggcacacatcactggggtttgaacccaggagatccagctgcacagtcgggctctcaaccatgaacctgaggagtgagaatgtgggcaaggagctctggggagcccacagccagtctggcacagtgcaccatcctggccccatgtccctggtgtgaggtgacaagctggggcagggctgtcatgtgtggtaccagtaattgacaaggacagagcactcaggtctctctaaggggaaggagctgctcaagrgcataatctcaggctggggaggcattgattcaggaactggctgcacccagaattcaaacccagacctgcccgatgtcaatgtcctagggcttttgatggtcctgtttccccctgtaactgctgggcctcctcagcactcctgagactgtttatcagatacaccattacccagtgtgagcatttacgcaatgttaattagtcccaatgaggatcagtaagtgattaggagcagagtttgtcaactgcagcccgagtttcctcctcttggcttcctcctgggat

SEQ ID NO: 62032 - DNA, 620 bp, Homo sapiens
aaaatcctccaagacgctcatctcaaatcctttttggaaagaatgtgccagtgttaccgatgcttatgtaaatgtaagtggttattatttatgtaggagaacattactgactattatgcaggaagagggagagaacaatgtagaggaagaaaaaattttacaatgggcttcaaaggggaaagaggagaaagtaacatctcacccagcaatataaaagcagcccccatataactcagctctgctctgactgtaaaacattatatcaatagtcttccctgaaaaaagccaagaaagagaaacacatggaaaagaaaggagaaggacaacctcattttatttcccctaaaattaatcctaaggttgtatttatccaacagaatcttactraacacccaccccatgggagatgcagagacatagcaggcctggctctgtcctcagggaatttgcagtctaatgagggccttccaacaagtacataaataactaattaaaggtagaaagtgaagtgtcatgaattatcctcatcattgttattagatgtcatttttattgaattctcttttttattatatcatctctttttccaaaaagaattttggacaatttataacataaaa

SEQ ID NO: 62033 - DNA, 730 bp, Homo sapiens
tgcatttatacaatgttatattgtacagtccttaaaaattatgttatagaaaaattattaatatgaaaaaatatccataatacactrttaagctgaagaagcaagttttgaaacagcattttcaggataccaatttggcaaactctcatataagcgtagattaaagacatatcaaaattcagcagtacctacctctgaaggttgggattatgggtggtttttatttccttctttatctcttctgaatttctctgaatgttttatagtgaacacaatatatttgctctacaaatatattatgatgagatttaatcttatatgtaaaagattctaatttctaaagatgctattgttatgacgaaatcaggcgcattttcctactggcttaattcacaacgctaagtgaacgaaacctttttttggcacttctgactactacagcgccaaacatactccatcttttaaagcaagtttgaaaaccagtggacaattctacaattagccaagatactcagttcagtttccttgaaataaaaagatgtgtggagtctttcaggacaggaagagaatattagtattaccacccaagagcattagatgtggagtcaaaacaaccacagtcaagttcaaattctaatactaactaccaggtgacttgagcaagtctcttagtccttccatagggctcccagactggaactatatagatatactgatttttgctttaaaa

SEQ ID NO: 62034 - DNA, 1722 bp, Homo sapiens
  misc_feature (1)...(1722): n = A,T,C or G
caaaaagtcatcctctggggggttagaattattgctggtatttttcagttgagtagactaggggtaaaataaactgcctgaggccaaagctgcacaggaggtggtagatcagggctcagtctgcgttctggctccaaatttgctgttttccttacacttgaatttaagtttccatcaagagttatacaaccaaggaactatatctgctcctgtaaaggcagtatttaggggtggggtggggtgggtgtgagggtgtgcaggaatcactagaaaggacatagaaaaatctcccgcaggaggtggatgaattgagatgatagtcccatgggctccacttcctgtctttctatcccaaactttcactttccgcaggttcaacatcaaatgtgcatttttaggctcatgagagtaaagaraatactgttgccatgcgtatgagtttcctagggtggtttaaaaggaagagactattctctcaaagttctggaggctacaggtcctaaatcaaagtgtcggcaggaccatgctccctctggaggctccagaggaaaatttattctctgnnnnnnnnnnnnnnnnnnnnnnnnnnnnnnnnnnnnnnnnnnnnnnnnnnnnnnnnnnnnnnnnnnnnnnnnnnnnnnnnnnnnnnnnnnnnnnnnnnnnttgtacaatatgaaactatggacatatatgcaataatattttcgtgtgtgtgtgtgtgtgtgtgtttgtgtttgagaagaaaacactacctatgagtcaggaatgaagtgtaatgaaaaaaaagcatgaattttggaataaaacatacacacctagattcacatcctgattattacttattagctttttgacttgggacaaattgtattattttttgttatttttattttatttatgtttttattattttattattttatttttataaggtttcaaaaactgatatgtaatagttgtacatattttgagcatacctgtgatattttgatacatgcgtacaatgtgtaatgaccaagttagggtaactggaatagtcatcaccgacatcatttatcttttctttgtgttaggaacattataactcttctttcctagctattttgaaatatacaaaaaatattgctaactgtaattatcctactgtactattgaatactagaacttattccttctatctaacagtatttcagggaacaagttttaaatttactaaagcctcaatttccccatactaaaaaatggaaataaaaaacttagctcataagtctgctgggtaaatcactttgaaaaattataatattgaatagtcactaggacagagagggctcaataagtgtcactgttgcccattttgtgttctctgtctcactaaccctctgtgtgacctgggacaaatcgctccgccccttggagcatgttttctcaccatagaatgggagagaagagtttgatgattccatggattccttccagccccaggagtcacagtatcctatatccagtatctgttttatgcatgcacgtgggtttaagtaatcagggcagccaaggggtggccccttcagcctagcgtttgctcaatttccaaagcgtttcctttctctgaacgtgccagttgctcactttcatattttcaatacagggcccattgatgaccacaaaaaggaatgtccagtgcagctgcgggtccacttgagccctccaagcaagcactctcaa

SEQ ID NO: 62035 - DNA, 1477 bp, Homo sapiens
tttgcctttttgtactataagagctatttgcattaggaagatcaaagttaaaatacattagcagcaatttgaaagacagaatgaacaygtaagaaaacagtatggagacatatatggctagagttggaatgtaccttgataagtgcttagagaaattaaggcggaagaagtaggtggctttctttgctaacttcttgtgcctcctgtcttctggttgctactgctgtttcctacagggggacatagagaaacactggtagaatggataagccatgacttaactatgtcatttgacaagtagtatacatgtccttaaaaattaacaagatttattttcttgtgcacttaagtccagatgcaatagggtgaaagtatgtgtaaagtttgccaaccactgaaagcaaaataaactaccaaacaacccatgtaactcaggagcacagcaagaaaagatccaagggagtttaggaaagtgaatgaaaaggaatataatgatttatcaaatatgttatgacccaacatagttaatgggaataataacacattttcatataatgcctcctctgagctcaagacttggtggcagatggaatacttccattgttcccttatctcttttctgtcctctctctaacttacaaaataaaagcatttatgaacaaggaaaaaacctgtagggaaaatgtccactcatacagccagatagccacagttgctgctaaccatgcacgtttcacagcttggtgcttggctctgcagctgccaagtattatctcaagagtaactataaacactgttggcccgagtggtgtaagggatccagaaggctgacagagtccatgaactgattgccagcaagggatggggacatgccaaattgtgattgaattacacccgtgtgacacttcctactgtaatcacaccctcctttcacagaggccaggctgagactagaaaagcaactactgtgagtcaatgtcattagagatggatggatttggtgccgaccccagctcagcagttgttgtgagagctgggtcagggatatgtgtgctccaagagggacttgcctgaaagggctaagtgaacagatggaagaaagacaaatgtttttacagaaatgtgccccgtgctaaataatgagttgattttaatgagctatagcaggaatcaaatgcttttaaaaataagggttttggaaagtctcactggacagggcacacagaaagcaatacagggaggggatggcttggatttttttttttttaaacttgaccaatatatgaatggaagatcttatgttcaagatgtttccatgtaatcatctttcaagtatttttagtatatgtactctcaaagcttcattcccttttcctctaatttcctccttcaatttagttcagttgtagttttctaatactgggcctgatgtcattaaaccagagtactccctgagctatcaagtgtgtacccagca

SEQ ID NO: 62036 - DNA, 1477 bp, Homo sapiens
tttgcctttttgtactataagagctatttgcattaggaagatcaaagttaaaatacattagcagcaatttgaaagacagaatgaacacgtaagaaaacagtatggagacatatatggctagagttggaatgtaccttgataagtgcttagagaaattaaggcggaagaagtaggtggctttctttgctaacttcttgtgcctcctgtcttctggttgctactgctgtttcctacagggggacatagagaaacactggtagaatggataagccatgacttaactatgtcatttgacaagtagtatacatgtccttaaaaattaacaagatttattttcttgtgcacttaagtccagatgcaatagggtgaaagtatgtgtaaagtttgccaaccactgaaagcaaaataaactaccaaacaacccatgtaactcaggagcacagcaagaaaagatccaagggagtttaggaaagtgaatgaaaaggaatataatgatttatcaaayatgttatgacccaacatagttaatgggaataataacacattttcatataatgcctcctctgagctcaagacttggtggcagatggaatacttccattgttcccttatctcttttctgtcctctctctaacttacaaaataaaagcatttatgaacaaggaaaaaacctgtagggaaaatgtccactcatacagccagatagccacagttgctgctaaccatgcacgtttcacagcttggtgcttggctctgcagctgccaagtattatctcaagagtaactataaacactgttggcccgagtggtgtaagggatccagaaggctgacagagtccatgaactgattgccagcaagggatggggacatgccaaattgtgattgaattacacccgtgtgacacttcctactgtaatcacaccctcctttcacagaggccaggctgagactagaaaagcaactactgtgagtcaatgtcattagagatggatggatttggtgccgaccccagctcagcagttgttgtgagagctgggtcagggatatgtgtgctccaagagggacttgcctgaaagggctaagtgaacagatggaagaaagacaaatgtttttacagaaatgtgccccgtgctaaataatgagttgattttaatgagctatagcaggaatcaaatgcttttaaaaataagggttttggaaagtctcactggacagggcacacagaaagcaatacagggaggggatggcttggatttttttttttttaaacttgaccaatatatgaatggaagatcttatgttcaagatgtttccatgtaatcatctttcaagtatttttagtatatgtactctcaaagcttcattcccttttcctctaatttcctccttcaatttagttcagttgtagttttctaatactgggcctgatgtcattaaaccagagtactccctgagctatcaagtgtgtacccagca

SEQ ID NO: 62037 - DNA, 1225 bp, Homo sapiens
actgcgcatgctcccctcccaagtgctggcaggccactgtgcgtgaggacagcccacccccagggtagaatcaggagagaaggaacacaagagaccccggaagtataccagcstataaaacctcaagtcaaaaggtcaaaccacacacttgatctctcaagttgcccacttggccctcattcaagtgtactcttctttctttttattcctgctctaaagccttttaatcaacttttactcctgctctaaaacttgccttagtctcttctgccttatggccctcagtcgaattcttttttctgaggaggcaagaattcaggttgttgcagacccatatggatttgctgctagtaacaattatggggcatacatttggaggttttctgtttatttatttatgttcattaggtaacatatttatgatgtttgtgtgaagcttaatcaaattccaagttaaatgaccttttattctattaccattttatgagagatttgaatttgtaacctctcattcattggtcccagtaagaattctgataaacccagtgggataaatccatatttttcagagtatggtttacagactagctgtccgtcacagggcaagtacagaaattgagagtatgtggttagaaacatttagagcaatttgagtcattttatgtctgctgaatcagatgacaaataatttgggcttatgtttagtgtgtctaatttttcagaagttcatttttataatatttacaatattatcaatccatgaagaatagggaattgttaaaatgttctctaccatagtcccttgcataatactaacttaataagactttattctgactgtgcgttccacaattatttgtgcatgtatgcatgcttcaaaggccagtgtttacagaagaaaaccaaaatgaaatttctcaagtcatcccttaggagaggctttaaaacacacaatatctatttcccaaatctgactgctaagaaagctcaactgtgttgggggaaaatattaaacaagagggtctaagagagtggtcaatacttaatgatacatacaactacctatgtggaaaccttcatcttatgacttgtatgcaccagggaagaacactttatgtcatggagcagagtggagcttccttttataccattagctgggcatggtggcgcatgcctgtaatcccagctactctggaggctgaggcaggaaaatcgcttgaaccca

SEQ ID NO: 62038 - DNA, 1333 bp, Homo sapiens
agaccaggtcctgcactgtgacgccaccgtggacctcatccccggcatccagatcgtctccaccacccgcaagctcaacctggaggacttccccctggagctgaagatccaggccctggactctgagggtgaggacgtccccctgcctgtttgtcctctgcagcccatgctggattgtccctctcctctgaacctggcctctctgtgctccccactcctctggcatccaaccctgcaggtcccctagagggcagcttcagtcagggaggtgaaggtgctgctggcggaggtgctgaagaggcagaacccacctgtgaggtgggccccaagccctgggtagaatcgagcctggcgctcaggggcccctgcagcagggtctgtgtgctcagagctgtggcggaccctggagccagaccctgctggtcacagcgctggtccttggtgcagcacatcttggggaagccaacattctcagccatgatgagaggctaggagaggctggctggggccatgcctcctgctccggctttcggggcaggttttgcttcctggtccagaccttagagccagtgtgccaggcagggaaggtccttttattctggaggagactgaagcatggagtggggtgagatgcagggtgtacagggccctgcctgtcagcatgggattcaccttttttctctaagcagagggaagctgaggaaagggtgggtgcagaaggtgatgggatcctgtctgcagggtttatggggagtataagctgttcttgggagcagaatgagcaaagtttgagtccaccttgcggccaggcattcctacgggcacttcacacaccctagctcatttcccgtatggcgactggacaatgcatagagaatgaacacacccacacgctcacccgagtgtgcacacacagaacccacacgctcgccagagtgtgcacacacacagagaacccacacgctcacccgagtgtgcacacacagagaacccacacrctcgccagagtgtgcacacagagaacccacacgctcgccagagtgtgcacacacacagagaacccacacgctcacccgagtgtgcacacacagagaacccacacgctcacccgagtgtgcacacacagaacccacacgctcacccgagtgtgcacacacagagaacccacacgctcacccgagtgtgcacacacagaacccacacgctcacccgagtgtgcacacacagagaacccacacgctcgccagagtgtgcacacacacagagaacccacacgctcacccgagtgtgcacacacagagaacccacacgctcgccagagtgtgcacacaca

SEQ ID NO: 62039 - DNA, 573 bp, Homo sapiens
attccacattcacttgaaccaattttccaataaacacaaacataaattcaaaatgtggaaaattccaaaggacaacctacaaagcagaatacaaataaataaatacaacattataattttaaaaagtaattattcaggtgatagagtcactatacacaagactccagtgcacataaagtgtctattttgttattattatatttttattttttatcttaaataaagaagaggtctcactatgttgcccaggctggtctcmaactcttcttgttgaattgatccctttaccattatgtaatggccttctttgtctcttttgatcttttttggtttaaagtctgttttatcagagactaggattgcaacccctgctttttttttgttttgttttccatttgcttggtagatcttcctccatccttttattttgagcctatgtgtgtctctgcacgtgagatgggtctcctgaatacagcacactgatgggtcttgactctttatccaatttgccagtctgtgtcttttaattggggcatttaggccatttacatttaaggttaatattgttatgtg

SEQ ID NO: 62040 - DNA, 573 bp, Homo sapiens
attccacattcacttgaaccaattttccaataaacacaaacataaattcaaaatgtggaaaattccaaaggacaacctacaaagcagaatacaaataaataaatacaacattataattttaaaaagtaattattcaggtgatagagtcactatacacaagactccagtgcacataaagtgtctattttgttattattatatttttattttttatcttaaataaagaagaggtctcactatgttgcccaggctggtctcaaactcttcttgttgaattgatccctttaccattatgtaatggccttctttgtctcttttgatcttttttggtttaaagtctgttttatcagagactaggattgcaacccctgctttttttttgttttgttttccatttgcttggtagatcttcctccatccttttattttgagcctatgtgtgtctctgcacgtgagatgggtctcctgaatacagcacactgatgggtcttgactctttatccaatttgccagtctgtgtcttttaattggsgcatttaggccatttacatttaaggttaatattgttatgtg

SEQ ID NO: 62041 - DNA, 2576 bp, Homo sapiens
tccaagtctgctgatgacacctcatgggctctcactaacacaggtcaccataaagaactcaaaaggtgaggaagacatggtaaagtaaaactggcagggaaattaaaccgggaacacttaaaatcaacatgtaaataatgcacttcattcacagacctaaagcagatagcccaaaagaaaaatgggcaaaggatataaaaattccctccccctgccaaaacacaacacacatacacacccagtttaaggaaacttcacagtgattttaaaaaaacaacaacaaagatttaaaaaatataacgatgctcaagttcacaagtgatttaggaaacttatagtcttatgtattactggaataaggcgaggagtatacatttggaagaacagcctgacaaaatttactgtagctctcgggctcaagtatatataggtcaaagatgtatggcacagtgaaatgctacaacctaacaagccacaacagaggatcgagtcattaattatgcgacagctatcaacaagtcaaccaagccaagaggaagcatcacaacagatattaatgtatcaacatagaaagatgctgtaggcagaaaaacagtagatgatgaatgtggtcttgaaaaggttttaaaatgcattaacaaattgaaccctcattcaagccttctttaacttgtacttagacatattctatctgatccatacacagaagttggaaatactttctcactttgcaaaatgcaattgttcttctgaaaactaagacagtttcatttaaatcaatatgattttggttttttgtgtttttttttttaacaaaggctctaatatgtaaagatttctctggtttttgtttgtttgtttgtttgttttttgagacaggttttgtgctctgtctcccaggctggagtgcagtggcgcgatctcggctcactgaagccttggcctcctaggttcaagcaattctgcctcagtctcccaagtagctgagactacaggcacgcaccactacgctaggctaattttttatttttgataaagacggggtttcaccatgttggccaggctggtctcaaactcctggcctcaagtgatccacccacctcagcctcccaaggtgctgggattacaggcgtgagctgccaggcctggccctaatatgtgaagatttcttaaagaggttttacaaccaagctttatataactttcgctttcactacctataaaatgagggagatggcctaaatcatgatcaatagccctaaatcactactgtttctcctcctagtatcgatgtttccatttatagctgccagacacttaacccagaaacatactgctacaaaagaaatattttaagtataagcacttcctgaaaaaaacaaaatttggagacatcagcaaatgctcacctcactcaagactcaaaagggaaacacaagccacagttctgaaatccaaagaacattttacatgtacagcaactggcaaagctattcagaagcctgagaggcccctcttgaaatgacaaaactaagctttcacccagtaaattcaagtggaaaacaaccaaatttctattcgtagaaaaacagttataaattatggcacatccaaactactgaattctgtaaaatgtaaggcacttatccatataaggcacttacctctgtgtctagtacaaattagattctcaaaataattactgtcattaacawtataatttccagattctcagaatctggcacctttcttggttctactatagtattcatatgccagcatttccaaacctactttactatggatcctttctccacatacctatctacatggcatttgtttcatggagtacattttggggaatgcctctctatctcagacacaagcttcatgcattgtccattgaccaccatttgtccagggctgatctcccccaaaaaattgtgtgctccttgaaagcatggaccggtgttggcacatattaggtactaagtaaatgtctgtagaataaataacaacaaatgaaagaaggggtttggtgcaaatgactctgaggatcccctgaagctttaaagcccaggttctatcatttatactggaaccaaagggtctaaactcccaaatttcacactgctaaccttgaggactaacagaaatcaatgaaaaccacctgagggactcctaagtgttccaagtatgcagaccacagcccatgggctctctaggctggctcgagtttaaccttacttcattttcaacacagaccaatatacatcaaatgtggctcacagtggccaggcccagtggctcacaccataatcctagcactttgggaggcccaggcgggtggatggcctgagcccaggagttcaagagcagcctgggcaacatggtggaaccctaactctacaaaaaaatacaaaaaattgaccaggattggtggcatgtgtctgtggtccctgctactagggaggttgaggtgggaggaccacctgaacccaggaagttgaggctgtagagagccatgattgtgccactccaccccagcctgggtgacacagtgagatcctatctca

SEQ ID NO: 62042 - DNA, 1575 bp, Homo sapiens
ctaagaaatgggtgatggaaaaagtaagtaaataaataaataaataattttaaaaaatagatggaaagggcccactgagtgcctggcataatgaattttaaaagtaccacccagtaccccaaaatttagatatttctaaaagctttcagagaaaaaaaaaatgaatgacataaaaaaggaagaggaaccaagatggcaaaagacttcttaacaacaggtggttaaaagaactatgagggaaaattatttcaacctagaattccatatccatttcaaccagcagtcaagcatgggagcagaataaaaataacatccctgctgggtgcggtggttcatgcctgcaaggccaaagtgagtggatcacttgagtccaggagttcaagaccagcctgggcaacatggtgaaactccgtttctactaaaaaccccaaaaaatacctgggcatgatggtgggcacctgtaatcccaactattcaaaaggctgatgcagaaggattgcttgaggccacgaggttgagactgcagtgagctcaacatagtggggaacagagtgacaccctgtctcagaagataaaaataataatgtcccatgtacaaggatattatttagaatgacagaggcaggccaggcacagtggctcacatctgtaatcccagcactttgggaggctgaggcaagtggattgctttgagctcatgagctcaagaccagcctgggcaacatggggaaaccccgtctctactaaaaatacaaaaattgttgtggggtgtgctggtgtgcgcctgtggtcccagctactcaggaagctgagatgggaggatcccttgagcccagggtggaggttgcagtgagctgagatcgcaccactgcactccagtctaggtgacagacaaagacactgtctcaaaaaaaaaaaaaaagaaaagaactgtagaggaaaaaaagaactgtaaccgaagaaaaagaaaaagttacaagttagaaacagtgacttttcgggaacaagactaagagtagagcaggtggaacacagaatagaatccacagtggttttcattgacctttgagtagyatttgccttttttaaaaccacatacatggaattagcaggaaatacattgaactgagagccatgctgacattactcttgggcactgtggtggctcatgcctgtaatcccaaaactttagttttgtgcactgtgagtatgcacaaaagtaaagttatttcagacccgtggtaaactctacaggttcaacggcctatctctcagtagataaaatgtaaggaaaagaaaggcctggagggggacctgcagattgaaaaagacaacatacatatcaagttcttaagaacaggcaaaattttatgttgcctagagattatgataaaaagatggcagttactcttggagtggaggagagaggggttactaaggaagctggcaaagttctattttctgacctggatgtttattgtagaaggatttatcttataattcaccatcctattactgttttgtgtggctttgtgcatgtgattttaccaaaaaaaaaaaaaaaaagaaaagaaa

SEQ ID NO: 62043 - DNA, 757 bp, Homo sapiens
ggccaaagggccatcgaaaccctcattcctctaactctaccctgccgtagagacgtggcccctattcccaaccttcccaggttatggcctcctaagggtctcttaggagttcctgaacggtgtaaaaattatgtgtggtcttttttttttttttaaatgttctctacagaagatttaaatcaacaaaaagatataaaattgcaaaggttgctcagtcaaaaccatgattatcaaggaagcaaagcttctggttccaaatttggtaatctgctacccatgttaagtttccagtttttatctggttgcccttcagtttagggaccactggcccagaacacacattactggcttagataccggcctgacataggaaagagagtggtagggtgaagagagtcattctctgcaggctcagagatgtgtaggcacaaggactcccgctatgtaatatactgaattgctcaattatccaaagtccacataagcaaaaagctcaaataaacagatttttcaaactgtctgtatatgctaataggcaattatagcaatggccctggaatataggcctgattcagaactcagtaactctgaataaagcacattataaagtgtttcaatttactaaacacagcagcctgatatctaaccatcccaggtaaargagtcttggctaagggtggtagccagatggcactgcctcagaatcacagaataactgctggtggggataagagctggactccccagtctgggtcct

SEQ ID NO: 62044 - DNA, 669 bp, Homo sapiens
ggtggtgtgcacctgtggttccagctactagggaggttgaggtgggaggattgcctgagcctgacaggcagaggttgcagtgagctgtgattgtgccactgcactccagcctgggcgacagagcaagaccctgtttcaaaaaataaataaataaaatgaaaagcagatggggatgaaaaggacagactggacactgaggcagaactgaaaaattgatttaaaattccaaaatcagttttaagatccaaaatcaaacaatccagtgccttgggccacctgaaagctgggcttctgcccaggcccagggcccaccagcagatgacaaacacatgagttcccattttcaaaatagtaaacttgaccacagaaataattttgttttatttataataaattttaaagtaattttaaaaaaaaaggtggcttcctgccaactgaaaggtatagaaggccgtctgtcaagtaatcaagtgctcttaagagaccaaagcatggtcctctttcaaacctgtgccccctctggggagttggggtggygggggggtggggtgggtcctgtcatcctaacaggccactgggagaaccggaaataccaagaaacaaagccagggactggctcagaaatggccaaacgctgcagacacagcctgcctgagaccatgaaaacca

SEQ ID NO: 62045 - DNA, 645 bp, Homo sapiens
cagtgttaaaaaatgtcatcttcggccaggcgcagcggcttacacctgtaatcccagcactttgggaggccgagacgggtggatcacgaggtcagaagatcgagaccatactggctaacatggtgaaaccctgtctctactaaaaatacaaaaaaaattagccaggtgtggtggcgggcgcctgtagccccagctactcgggaggctgaggcaggagaatggcatgaacctgggaggcagagcttgtagtgagccgagagagccccactgcactccagcctgggtgacagagtgagactccatctcaacaacaacaacaaatgtcatcttcagcatcatgtgagcattcagacagttttggactttggagcattttgaatttcagattttggaattagagatactcaatctgttgcagattcttattttaaaatgagaatctggatgcctttgcattcaaaaacttgaattactcagcatattagaacctgacaaatacatatatacagagagagaatgtttaagaactcaaataatcgtcgaagtattctatcaattatctctctaatgtgtgayatgttttagaaatggtttcttgagataagcttccattttacttaatgaagttgaaagtaatggtgtcac

SEQ ID NO: 62046 - DNA, 529 bp, Homo sapiens
tgtaagcaggtgacaacaaaatttttatcaacrtatggggcctgataaaattactttttttatcatatactcattaattcagttttgaatcattaaaacaatctctctccttatatttattcaattctttcttgagtgagagagagagagagagagagagtaaatgcactttatgtgctgagagctgtgatagtggctagtaataaaatggttaatgaaacaagaccactatctttgagcaaactgcagacttacaaatagaaaatttcaatatggtgtctgataagcaccaataggggaaccgtagacttggacagggggccctgcttgtggatgagagaagacgtcctcagtgaatcttaaataatgcttggtgatttatctgttagaaaaggtaaaataaatggacatttgacatacaggataaaatgattaaaaaaaaatagtccagcttgggatgtgtgtccgtgtgtgtgtgtgtgtgtgtacccatgcgtgtgcatttgtgtgttttggggaaataggaaga

SEQ ID NO: 62047 - DNA, 733 bp, Homo sapiens
atttttgtatttttagtagagacagggttttgccatgttggccaggctggcctcaaactcttgacctcaggtgatccacctgcctcagcctcccaaagtgctgggattacaggcatgagccaccgtgcctggctgagtatgtgttttaaattcttttgggtatatacctagaagtggaattgctgggcatatggtacctcaatgttaacttgttgaggaacagccaaactgttttccaaagtggctgaaccattttatattcccatcagtaatatatgagggttctggtttctccacattctcaccaacgtttgttatcgtctgtaaggcattaattttataaaggctatatctttattttgaatacttcttatcttatatascatttaaaagaccatactactcagtcaaatagatgagaagattttcaaagttcacgggttcaagaggaaaaagtaaatttgcttccttccatttgtaaaatagctttaacaggaaagaacatgtaactattggctttcatatccttttttttttttttaccaattattactaacatttattcttatttaccatttgttcataacgtttcttctttatattctcttgttttgagaaatcatttcaagaatcttggaagagactaagttatatgaccttaggtccataagacctgctgttgtactggtagcagtagtagtagtgattatgtatctctactatgtgctaggca

SEQ ID NO: 62048 - DNA, 733 bp, Homo sapiens
atttttgtatttttagtagagacagggttttgccatgttggccaggctggcctcaaactcttgacctcaggtgatccacctgcctcagcctcccaaagtgctgggattacaggcatgagccaccgtgcctggctgagtatgtgttttaaattcttttgggtatatacctagaagtggaattgctgggcatatggtacctcaatgttaacttgttgaggaacagccaaactgttttccaaagtggctgaaccattttatattcccatcagtaatatatgagggttctggtttctccacattctcaccaacgtttgttatcgtctgtaaggcattaattttataaaggctatatctttattttgaatacttcttatcttatataccatttaaaagaccatactactcagtcaaatagatgagaagattttcaaagttcacgggttcaagaggaaaaagtaaatttgcttccttccatttgtaaaatagctttaacaggaaagaacatgtaactattggctttcatatccttttttttttttttaccawttattactaacatttattcttatttaccatttgttcataacgtttcttctttatattctcttgttttgagaaatcatttcaagaatcttggaagagactaagttatatgaccttaggtccataagacctgctgttgtactggtagcagtagtagtagtgattatgtatctctactatgtgctaggca

SEQ ID NO: 62049 - DNA, 1519 bp, Homo sapiens
ccatcacacatacattatgagcttcttacatgcagaaactgggtcttagtcatctttgtatccccaatgtcccaggctgagagcttgcttacagttgatactcagtaagcagttgtgcagagagaaaaatgcttatgtgtgtgctttaaaatactcccatgaaggccaggcacggtggctcatgcctgtaatcccagcactttgggaggccggggagggcggatcacgaggtcaggagatcaagaccatcctggccaacatggtgaaatcccgtctctactaaaaatacaaaaattagctgggcgtgcctgtaatcccagctactcaggaggctgagggargagaattgctcgaaccagggagttggaggttgcagtgagccaagatcacaccactgcactccagccgggtgacagaatgagactccatctcaaaagaaaaaaaaaataatactgtgtatctcaggtcatgagagctttattatcccagtgtttctgatgaggaaactgactgaagtgcattatgtcaaatgacttcccctctgtcactgatggcagtgaacgatgaaatccaggtgtcctgtctcttggccactgggggaagtgggaagatgaggatccagtcgctcttgcacaacattgccgtgtaattaacttcaagacagtgggatgatttaaattttatgtgactgacctgatatatatggaaaagatggtggaagactttctggaaatcaggagagcaatacatgaagaaccttagagattgagtgagaaagctgaggcccagagagggaaagtgatttcatttcaagtcagcataattgaataaatatatttgaatatgcattatgtgccaggtgattgcctaagtccatccaggtagaacaaatggagagatcactggaaaagtgcctagcagagcactggaacagagcagggttcaataaatgtcaataccccaccccctaaccttttttctttctttaagggcagagccaggatgagaacccagatttccggattccaagtccaacatcttttcaaccatctcatggtcatccagaagtgcaaccaggaaaaagtctgtagggagatcatgcctgtaatactcttgctggttaaaaagagtattatggattttctgacagctcttttgctgtgtcacatcagccccctgtctgattttatgcttacatggccattactctctattagcatactaataaatgtttatgagattatgctgtataaactataaacttttacatattattaattaacctcatacattgtattgggagctcctgaacatttactgacttgtaaaacaggatagtggcatacagggagccgtgtctgcaaaactggtcttatttgctctatctggaggaagggttgcattttcatttttgcgactcttaagtgcaagccacagatagtatagtatttgaaaacagaagacctgggcttgcctcttcccagctgtgaccttaggtaaattttgtaagctctcaaag

SEQ ID NO: 62050 - DNA, 628 bp, Homo sapiens
gtcctccatgctcccctgagaaggacaagactgggctcagctccagcttttcacaaaacactgagatgggtgtaccattccmcagcccgaattcttttaaacaagcctggcacaatcacagagtttccatgaatgaatggcagcagccagggatgactttgtggtccaagctcaacccctagtggacacatgattacatgacaaaaccactcagaggggacctgggcacagcaaccatgtggtggctcattctggtcacttcagcgaggaaggcccattgatttctcaacccaggcttatgtggcaagtatcaaagaggcatctttcaaacttttatcttatggcatctgagcctttaaaagttgggagaaactttttctatggactcctatcaattctttgaagacaacatttgtcatctttcgtataactgcttaacatatcagatagcattcactatctctcaatgccatttatatctaagaatctatataatacagttctagttgcattacattttagaaaaacaaacaaacaaacaaaacaacaaaaaccaaaccaaaccaaaacattacctccaaaagttgtatgccttctactgtcggaattttttttttcttattacata

SEQ ID NO: 62051 - DNA, 628 bp, Homo sapiens
gtcctccatgctcccctgagaaggacaagactgggctcagctccagcttttcacaaaacactgagatgggtgtaccattccccagcccgaattcttttaaacaagcctggcacaatcacagagtttccatgaatgaatggcagcagccagggatgactttgtggtccaagctcaacccctagtggacacatgattacatgacaaaaccactcagaggggacctgggcacagcaaccatgtggtggctcattctggtcacttcagcgaggaaggcccattgatttctcaacccaggcttatgtggcaagtatcaaagaggcatctttcaaacttttatcttayggcatctgagcctttaaaagttgggagaaactttttctatggactcctatcaattctttgaagacaacatttgtcatctttcgtataactgcttaacatatcagatagcattcactatctctcaatgccatttatatctaagaatctatataatacagttctagttgcattacattttagaaaaacaaacaaacaaacaaaacaacaaaaaccaaaccaaaccaaaacattacctccaaaagttgtatgccttctactgtcggaattttttttttcttattacata

SEQ ID NO: 62052 - DNA, 1962 bp, Homo sapiens
tggtcctaagtgagtccccgatatcctggaccataccttggggtttccgccaccttctttggctgcatacaacatctgcaaggcagatctctgcgagagtcttggtctggtccagcaccgtcatctgctgctgatgatcaagaatcttggaggccacaccaactgcggctaagatcaagggctcaaaatagcttgccagttgtgtcacctttcaaaaaaaaaaaaaaaagccagagatgtatcatgtaaatacacgtgtctccttcaggggctccacagtcaggcgcgggaggggaacaggactgggctgactcacagggagaggcagatctgctgcaatttactgctgaaagtgcttgctaattaatggactctttcttggtttttactttctccagggagttcttcatctctctaaatatggcagaggtgctaagaaacccattccaagatccagagttagatatgrgaattgaattcaattttacaaactgtcaatttctataaattaacaacttttaaaagaactaaagacatcttacaaactcaggaggaaggaggagtggaaaagggtaaggtagcaggggagcagaaaaaagcaggagatgaaagaaaccttcaaaagctttgtaggaagccaatcccaactgccttttgcccagagcattttgaccaagccttgatttggaaaaacagcacaaatgatttcacatcagcctagatgctctgtttatgattcgcccaacttgggagaacaaaaaaagcttatcccgacaggaaccactgcctccgcacaggcctctttccaggagggcactgccatgcatatccatccacgctcactaaagctcgcctaccagctgggcgctgtgggccatgtgttgcaaacatctagcgggcgcaccccctatgccaggctctctgctgaaagtttaacttccatttcctcactgagcctccacaactttaagaggcagatacacatgaagataccgaggctttgaggggttgagacgcatgctccatctcatgcagctaagaggtggagacagcggcatcccaccccacagccctggctctcagctgccacagtctgtggtctctttcactttcattgggatgccagtcctgctgctgtgggagcaccgcacttttagaagtttatcatttggtgtttggatgaccctctacctggcatcagaatatgagatcttaacattttgctatattcacttcagacaccagaatctatcccctctcagaatctatcctcactcagataaaatacaatggcatgaatcacacttttctgttcaatgcctcattctgtgcggtaatgactaatggctaaattacaccctttaagagaacttaagatcaaacctttagccagcacctcccttaacgcttcttcccatcacatgttagaagaatgagtgttgtggggatgtggacaggaagaccactcacatgagcagtcactgggccagcaggagagggtggaggatgatggggtgggggtggctagggcaaggtgagggaacgtgtccaaaaaataaaacttaattaacgctaatagtgagacatgattattggccaacaataaaacttatttttacattgttatttcctctatggttatcttacagagaggtttcaaacctggtgaatagggctgttcccggcccttagggagcctttgaatgaattttaaaggggtcctttgggcagacatgagcgacgccagggcagagcatgggctgaattttcgtccctacttcccacttcagccaaatgcctttgtggagggcacagcctatacaaccacaggcagcagctccacacacttgcatttgatttcatcctcatccccaggaagggcactggtgtcaccaccaaagggaacggagcactgaagggtcatcgggacagagggcttagggtggtcctttatgtcctaaa

SEQ ID NO: 62053 - DNA, 1962 bp, Homo sapiens
tggtcctaagtgagtccccgatatcctggaccataccttggggtttccgccaccttctttggctgcatacaacatctgcaaggcagatctctgcgagagtcttggtctggtccagcaccgtcatctgctgctgatgatcaagaatcttggaggccacaccaactgcggctaagatcaagggctcaaaatagcttgccagttgtgtcacctttcaaaaaaaaaaaaaaaagccagagatgtatcatgtaaatacacgtgtctccttcaggggctccacagtcaggcgcgggaggggaacaggactgggctgactcacagggagaggcagatctgctgcaatttactgctgaaagtgcttgctaattaatggactctttcttggtttttactttctccagggagttcttcatctctctaaatatggcagaggtgctaagaaacccattccaagatccagagttagatatgagaattgaattcaattttacaaactgtcaatttctataaattaacaacttttaaaagaactaaagacatcttacaaactcaggaggaaggaggagtggaaaagggtaaggtagcaggggagcagaaaaaagcaggagatgaaagaaaccttcaaaagctttgtaggaagccaatcccaactgccttttgcccagagcattttgaccaagccttgatttggaaaaacagcacaaatgatttcacatcagcctagatgctctgtttatgattcgcccaacttgggagaacaaaaaaagcttatcccgacaggaaccactgcctccgcacaggcctctttccaggagggcactgccatgcatatccatccacgctcactaaagctcgcctaccagctgggcgctgtgggccatgtgttgcaaacatctagcgggcgcaccccctatgccaggctctctgctgaaagtttaacttccatttcctcactgagcctccacaactttaagaggcagatacacatgaagataccgaggctttgaggggttgagacgcatgctccatctcatgcagctaagaggtggagacagcggcatcccaccccacagccctggctctcagctgccacagtctgtggtctctttcactttcattgggatgccagtcctgctgctgtgggagcaccgcacttttagaagtttatcatttggtgtttggatgaccctctacctggcatcagaatatgagatcttaacattttgctatattcacttcagacaccagaatctatcccctctcagaatctatcctcactcagataaaatacaatggcatgaatcacacttttctgttcaatgcctcattctgtgcggtaatgactaatggctaaattacaccctttaagagaacttaagatcaaacctttagccagcacctcccttaacgcttcttcccatcacatgttagaagaatgagtgttgtggggatgtggacaggaagaccactcacatgagcagtcactgggccagcaggagagggtggaggatgatggggtgggggtggctagggcaaggtgagggaacgtgtccaaaaaataaaacttaattaacgctaatagtgagacatgattattggccaacaataaaacttatttttacattgttatttcctctatggttatcttacagagaggtttcaaacctggtgaatagggctgttcccggcccttagggagcctttgratgaattttaaaggggtcctttgggcagacatgagcgacgccagggcagagcatgggctgaattttcgtccctacttcccacttcagccaaatgcctttgtggagggcacagcctatacaaccacaggcagcagctccacacacttgcatttgatttcatcctcatccccaggaagggcactggtgtcaccaccaaagggaacggagcactgaagggtcatcgggacagagggcttagggtggtcctttatgtcctaaa

SEQ ID NO: 62054 - DNA, 1962 bp, Homo sapiens
tggtcctaagtgagtccccgatatcctggaccataccttggggtttccgccaccttctttggctgcatacaacatctgcaaggcagatctctgcgagagtcttggtctggtccagcaccgtcatctgctgctgatgatcaagaatcttggaggccacaccaactgcggctaagatcaagggctcaaaatagcttgccagttgtgtcacctttcaaaaaaaaaaaaaaaagccagagatgtatcatgtaaatacacgtgtctccttcaggggctccacagtcaggcgcgggaggggaacaggactgggctgactcacagggagaggcagatctgctgcaatttactgctgaaagtgcttgctaattaatggactctttcttggtttttactttctccagggagttcttcatctctctaaatatggcagaggtgctaagaaacccattccaagatccagagttagatatgagaattgaattcaattttacaaactgtcaatttctataaattaacaacttttaaaagaactaaagacatcttacaaactcaggaggaaggaggagtggaaaagggtaaggtagcaggggagcagaaaaaagcaggagatgaaagaaaccttcaaaagctttgtaggaagccaatcccaactgccttttgcccagagcattttgaccaagccttgatttggaaaaacagcacaaatgatttcacatcagcctagatgctctgtttatgattcgcccaacttgggagaacaaaaaaagcttatcccgacaggaaccactgcctccgcacaggcctctttccaggagggcactgccatgcatatccatccacgctcactaaagctcgcctaccagctgggcgctgtgggccatgtgttgcaaacatctagcgggcgcaccccctatgccaggctctctgctgaaagtttaacttccatttcctcactgagcctccacaactttaagaggcagatacacatgaagataccgaggctttgaggggttgagacgcatgctccatctcatgcagctaagaggtggagacagcggcatcccaccccacagccctggctctcagctgccacagtctgtggtctctttcactttcattgggatgccagtcctgctgctgtgggagcaccgcacttttagaagtttatcatttggtgtttggatgaccctctacctggcatcagaatatgagatcttaacattttgctatattcacttcagacaccagaatctatcccctctcagaatctatcctcactcagataaaatacaatggcatgaatcacacttttctgttcaatgcctcattctgtgcggtaatgactaatggctaaattacaccctttaagagaacttaagatcaaacctttagccagcacctcccttaacgcttcttcccatcacatgttagaagaatgagtgttgtggggatgtggacaggaagaccactcacatgagcagtcactgggccagcaggagagggtggaggatgatggggtgggggtggctagggcaaggtgagggaacgtgtccaaaaaataaaacttaattaacgctaatagtgagacatgattattggccaacaataaaacttatttttacattgttatttcctctatggttatcttacagagaggtttcaaacctggtgaatagggctgttcccggcccttagggagcctttgartgaattttaaaggggtcctttgggcagacatgagcgacgccagggcagagcatgggctgaattttcgtccctacttcccacttcagccaaatgcctttgtggagggcacagcctatacaaccacaggcagcagctccacacacttgcatttgatttcatcctcatccccaggaagggcactggtgtcaccaccaaagggaacggagcactgaagggtcatcgggacagagggcttagggtggtcctttatgtcctaaa

SEQ ID NO: 62055 - DNA, 1896 bp, Homo sapiens
ctgtatctcctcccttcccccaaaatgaacaagacaacagcaaaagcacgagagagaaaaaataaggagaaatggagcatagggggagagctcccatttaggaggcagaggccactgctgctgcagcccaccgttagcaagtaccacccaccagccagaaatggcaccttcccagtggcagattttatttatttatttatttatttatttatttatttatttatttattgagatggagtcttgctttgtcacccaagctggagtgcagtggtgtgatcttgactcactgcaacctccacctcctgggttcaagcaattctcctgcctcagcctcctgagtagctaggattacaggcacccaccaccatgcctggctaatttttgtatttttaatagaggtggagtttcacagtgttggccaggctagtcttgaactgctgacctcaagtgatctaccagcctcagcctcccaaagtgctgggattcaggcatgagccaccgcactcggcagatattaataaggcattcagcaaatgttagcttggccacaaagccctaggtttccagacatgctcatttcatccttaataaactgcctgtttaacgtctgaggaaactgcaycccagataacacagtggccatgtagctacttaggtggcagaaccaggatttgaacttgaggcttctaaatctactgattgcaccctattgtccaatttttagttataacaaggttctatatgactcagaatatactgttccataatgaaaaagaggtctttggaaagccttgctggtgttactgtctttaacctccatttcctgctaggcacacttacagactgaacactttaactatttcccaacctgtctagctagaggctcttgcctgtgaatgctgactggctaagatgtctttccttggcctacatatgatacactgatctctatttacaagggttcagactttgggagctcaatgttagtgaccccagactggctactttcccaaaaaatgcacttcagaattgaccacagttacctggataaagaataaaaataatgatcccttaaatgacctaaaatgtttagcatcagaagataatttatttctaagaaggaggcagtgaaatgcccagagctgggaatagtaagaattgagatttggatccagctctgttgctgaacagatgggtgacttcaaccaagggacaagctttctgggtctcagatcaatctgttggccataagcctcatggctgcgcaaggacagaatgagaaaacttgagaatgcccagcaaatgaagggcttggcactcctcctctagctatgtgaattatgtatctaaaggtggcctgttggatctcttttgttaggtttggtaagagcaagggtagtgatggaggagagacatcatcaacgctcttctgggggtgtccctgactatggaggcctgccctagaccttacatggttctaaacatggctcctgaactcagcagagacagatacacactgtacctacttcttggtgctccgtggtttggtccttagggtttgtagcgagtcacgcctccttaggaactgcacaaactgaggctcccacgtgggcagcccaccagccatgactatctacacccctgcctggtgtcttctgcttatgccttcctaacccagctccacactaggcacactaggctgggggagtcattctcgatgggatctaagccattcattcgaggatggaagttgtgaagggctggtgggtcacttgcagcactggcagcctccctcacttgccacggaggctggcatggctctgtcagaagccttccatgtccttgcaggatgtactgggggtttcctaacaagacctcctgatactttttcaggtt

SEQ ID NO: 62056 - DNA, 665 bp, Homo sapiens
aatgcaaaaaattccacatgcacaaaaacatccaggcaagattcatgatcagcgcttacagctggagacgtactgacctagggtcagctttgcctctctttagcagcttaaggggtcctgaaagcccctctctgctcacaggctaattaagcccaggctctcacccctgggcctgaccatgctgcagtcagtgaggtctctgtgaccagggccctctagctcctgggaaacttcagatagctagctccccagtaccctagaggcaccataactcatctcatattatacaaaagtcgagatacacaaaccagcacacatgcttaacacagcatcttgagcttttttcttgtacttacgacctgctaacttgagtcattcatgattacatcatttctgaagggatacccattcacagagtcaccagataaaatgcacccagttaaatttgaatttcagataatcaatgaaaaaaaatttttagcaagtatgggacatcctattttttattttttacaactagcaaccctaccccttccttctacagcttccctctggaaagaaactgaggggcttgcagaaatacataaaactacaaatayactgctaatcaggacaaacacaaatcacacattgggataaaaggtaaaagctgagggcaaagacca

SEQ ID NO: 62057 - DNA, 664 bp, Homo sapiens
tgcattacatggaggcttcattctcccaatagtgctttccatccaaagctgccattaataggattatcagtttaaagacaggctcatcaataaggctaagggtactcaaaagtctctgaatttttcagaagtgaaaacaaaaatagtggaatcaaggacacagcattcaatgaaycttttaacttgttgcaggaagtcagggaccccggagagccggctgaagccatggcagaaaaacataaattgtgaagatttcatggacatttattagttccccaaattaatacttttataatttcttacacctgtctttaccgcaatctctgaacataaattgtgaagatttcatggacacgtatcacttccccaatcaatacccttgtgatttcctatgcctgtctttactttaatctcttaatcccatcatcttcgtaaactgaggaggatgtatgtcacctcaggaccctgtgatgattgtgttaactgctcaaattatttgtagagcatgtgtgtttgacaatatgaaatctgggcaccttgaaaaaagaaaaggataacagcaatgttcagggaacaagagagataaccttaaactttgactgctggtgagccgggtggaaaagagccatatttctcttctttcaaaaggaaatgggagaaatat

SEQ ID NO: 62058 - DNA, 664 bp, Homo sapiens
tgcattacatggaggcttcattctcccaatagtgctttccatccaaagctgccattaataggattatcagtttaaagacaggctcatcaataaggctaagggtactcaaaagtctctgaatttttcagaagtgaaaacaaaaatagtggaatcaaggacacagcattcaatgaatcttttaacttgttgcaggaagtcagggaccccggagagccggctgaagccatggcagaaaaacataaattgtgaagatttcatggacatttattagttccccaaattaatacttttataatttcttacacctgtctttaccgcaatctctgaacataaattgtgaagatttcatggacacktatcacttccccaatcaatacccttgtgatttcctatgcctgtctttactttaatctcttaatcccatcatcttcgtaaactgaggaggatgtatgtcacctcaggaccctgtgatgattgtgttaactgctcaaattatttgtagagcatgtgtgtttgacaatatgaaatctgggcaccttgaaaaaagaaaaggataacagcaatgttcagggaacaagagagataaccttaaactttgactgctggtgagccgggtggaaaagagccatatttctcttctttcaaaaggaaatgggagaaatat

SEQ ID NO: 62059 - DNA, 609 bp, Homo sapiens
tggatgagaagcycaggtagcaaattctgaatgcagcaaatccttctagaataaaaacagaaaacagtctctatggcaatagctttggggagttgcctttaacctcacctaatgagccaacaaaatgttttaagtgtacacttaaatgtacaattcaagaagttaaattgactagacccacattttaagacctgctgaaacactagctgcaaactttacagattgactctccaaggaaaattaggtatttgctatacacgcatcagaggcaaaaagttcaaaggaaattgtgtataaattacacatatataaggatgagaattaacaattctgttagttctgtctatgtacttcctccatgtgtaatcttttcctcttctggtcgtttatctataaacctttttttggtctctagctactgcccaccacacacagtcatattaaattttcaatggaaaaagataaaacacatttcctcaaaggtctaaagtcatcaggaaggagtgggcaggtgtgtcttcaaatcattacattcatacatttgggaaagcatagaggggagaaggaagaggaaaatcatgtaaaaaaaaaaaaaaaactgctctaaag

SEQ ID NO: 62060 - DNA, 609 bp, Homo sapiens
tggatgagaagctcaggtagcaaattctgaatgcagcaaatccttctagaataaaaacagaaaacagtctctatggcaatagctttggggagttgcctttaacctcacctaatgagccaacaaaatgttttaagtgtacacttaaatgtacaattcaagaagttaaattgactagacccacattttaagacctgctgaaacactagctgcaaactttacagattgactctccaaggaaaattaggtatttgctatacacgcatcagaggcaaaaagttcaaaggaaattgtgtataaattacacatatataaggatgagaattaacaattctgttagttctgtctatgtacttcctccatgtgtaatcttttcctcttctggtcgtttatctrtaaacctttttttggtctctagctactgcccaccacacacagtcatattaaattttcaatggaaaaagataaaacacatttcctcaaaggtctaaagtcatcaggaaggagtgggcaggtgtgtcttcaaatcattacattcatacatttgggaaagcatagaggggagaaggaagaggaaaatcatgtaaaaaaaaaaaaaaaactgctctaaag

SEQ ID NO: 62061 - DNA, 400 bp, Homo sapiens
caactaagccttgtaggtagacgacaacgcacacacacacacacacacacacacacacacacacacacagccctcagtcaggtaccagctacctccattcactgaatgtgttatgagctgcactcattcctgcttggtcttgtaacattttgtgcaatgccagataaccctccttctaccacttcactgtaattcacaagctgcaaccctttggatgaaarcaaagttcaggtcttcttcaaggtcaattgctatatttattatagtatttatgtgtttcttgaccatataacaagtaaaaagctgcactactggcttttattaaggtcttattttattttttttgtgttaccttagttatctgcccttcaccttgtttccccataagcctcatagtttc

SEQ ID NO: 62062 - DNA, 1304 bp, Homo sapiens
ttgttgttgttgttgttgttttggtttggtttggttttttaaagcataagactgacgctttgttacaaagcattcctttgggagcatgcctgggacgttattagaattaacattcattatatgtattggtaggtaattaatgcagtaagaactcttccctctgtatttattagatgcaaagaagaatamatttattaaaatttggtatctacaagtgaactgcagtatacaagtcatcctagccaaagcctatgagattgagtaaaaatggtattgttagcagaacaggtgtgatgagtcagcagtgtcaaagagcatgatttctggaccaaaatatgaggggccattacaacagagtatacactagtaccccttatccactatatgtgcagaaagacatacttgacacgtttttctctgctgtcacaccacagcaacaatcatcaacaaagaaggcttctgtgaccaaatgtgtggagagtttttccccaccaacaaacaagcaatcattcctgctgatgacacaattcaattctcacaccctatctacagataacatcagatttaatttaatttataaattaaactttgtcatagatatgtatgtatagggaaaaacagcttgtgattcagtactattcatggtttcatgcatgcactgggggtcttggaatgtatctcccacagttaaggtgtagttactgcacttattttgttataacgcaacacagtctctctagctcttcagttcaaactgtttagtttagaataaaacatgctatcaccagaaactaacaaaacataggaatcagaccagaaacaggaatccttgcaaagactttccagccaccagtggagaagatctcaagagagatcagtgtgttactctggctaatactcttctgggtaaggtgctgggtggtttccttagttgtagctatttgctctggcctacgtataacaaggcccaaattcacctgccattttacctcccacagaaagaaccactggaaagatcactcctttaagagcttatccacattcagagagaagctgaataaacactggggaggtatggcaggctgccgggcaatattatctgatgtgaaaaaatatatagaaagaaaattatcaatgcccttttactaccagaatgttctaatgcttgcccatctccctagtagcagaaaaaatttttttcacctcgcataaagcaaaactcccttgtcatctctcatgacagaatctagttttaggtgagtcatgtcatcataatacaggctgttgtcaacctcatccctcaa

SEQ ID NO: 62063 - DNA, 1304 bp, Homo sapiens
ttgttgttgttgttgttgttttggtttggtttggttttttaaagcataagactgacgctttgttacaaagcattcctttgggagcatgcctgggacgttattagaattaacattcattatatgtattggtaggtaattaatgcagtaagaactcttccctctgtatttattagatgcaaagaagaataaatttattaaaatttggtatctacaagtgaactgcagtatacaagtcatcctagccaaascctatgagattgagtaaaaatggtattgttagcagaacaggtgtgatgagtcagcagtgtcaaagagcatgatttctggaccaaaatatgaggggccattacaacagagtatacactagtaccccttatccactatatgtgcagaaagacatacttgacacgtttttctctgctgtcacaccacagcaacaatcatcaacaaagaaggcttctgtgaccaaatgtgtggagagtttttccccaccaacaaacaagcaatcattcctgctgatgacacaattcaattctcacaccctatctacagataacatcagatttaatttaatttataaattaaactttgtcatagatatgtatgtatagggaaaaacagcttgtgattcagtactattcatggtttcatgcatgcactgggggtcttggaatgtatctcccacagttaaggtgtagttactgcacttattttgttataacgcaacacagtctctctagctcttcagttcaaactgtttagtttagaataaaacatgctatcaccagaaactaacaaaacataggaatcagaccagaaacaggaatccttgcaaagactttccagccaccagtggagaagatctcaagagagatcagtgtgttactctggctaatactcttctgggtaaggtgctgggtggtttccttagttgtagctatttgctctggcctacgtataacaaggcccaaattcacctgccattttacctcccacagaaagaaccactggaaagatcactcctttaagagcttatccacattcagagagaagctgaataaacactggggaggtatggcaggctgccgggcaatattatctgatgtgaaaaaatatatagaaagaaaattatcaatgcccttttactaccagaatgttctaatgcttgcccatctccctagtagcagaaaaaatttttttcacctcgcataaagcaaaactcccttgtcatctctcatgacagaatctagttttaggtgagtcatgtcatcataatacaggctgttgtcaacctcatccctcaa

SEQ ID NO: 62064 - DNA, 1304 bp, Homo sapiens
ttgttgttgttgttgttgttttggtttggtttggttttttaaagcataagactgacgctttgttacaaagcattcctttgggagcatgcctgggacgttattagaattaacattcattatatgtattggtaggtaattaatgcagtaagaactcttccctctgtatttattagatgcaaagaagaataaatttattaaaatttggtatctacaagtgaactgcagtatacaagtcatcctagccaaagcctatgagattgagtaaaaatggtattgttagcagaacaggtgtgatgagtcarcagtgtcaaagagcatgatttctggaccaaaatatgaggggccattacaacagagtatacactagtaccccttatccactatatgtgcagaaagacatacttgacacgtttttctctgctgtcacaccacagcaacaatcatcaacaaagaaggcttctgtgaccaaatgtgtggagagtttttccccaccaacaaacaagcaatcattcctgctgatgacacaattcaattctcacaccctatctacagataacatcagatttaatttaatttataaattaaactttgtcatagatatgtatgtatagggaaaaacagcttgtgattcagtactattcatggtttcatgcatgcactgggggtcttggaatgtatctcccacagttaaggtgtagttactgcacttattttgttataacgcaacacagtctctctagctcttcagttcaaactgtttagtttagaataaaacatgctatcaccagaaactaacaaaacataggaatcagaccagaaacaggaatccttgcaaagactttccagccaccagtggagaagatctcaagagagatcagtgtgttactctggctaatactcttctgggtaaggtgctgggtggtttccttagttgtagctatttgctctggcctacgtataacaaggcccaaattcacctgccattttacctcccacagaaagaaccactggaaagatcactcctttaagagcttatccacattcagagagaagctgaataaacactggggaggtatggcaggctgccgggcaatattatctgatgtgaaaaaatatatagaaagaaaattatcaatgcccttttactaccagaatgttctaatgcttgcccatctccctagtagcagaaaaaatttttttcacctcgcataaagcaaaactcccttgtcatctctcatgacagaatctagttttaggtgagtcatgtcatcataatacaggctgttgtcaacctcatccctcaa

SEQ ID NO: 62065 - DNA, 1304 bp, Homo sapiens
ttgttgttgttgttgttgttttggtttggtttggttttttaaagcataagactgacgctttgttacaaagcattcctttgggagcatgcctgggacgttattagaattaacattcattatatgtattggtaggtaattaatgcagtaagaactcttccctctgtatttattagatgcaaagaagaataaatttattaaaatttggtatctacaagtgaactgcagtatacaagtcatcctagccaaagcctatgagattgagtaaaaatggtattgttagcagaacaggtgtgatgagtcagcagtgtcaaagagcatgatttctggaccaaaatatgaggggccattacaacagagtatacactagtaccccttatccactatatgtgcagaaagacatacttgacacgtttttctctgctgtcacaccacagcaacaatcatcaacaaagaaggcttctgtgaccaaatgtgtggagagtttttccccaccaacaaacaagcaatcattcctgctgatgacacaattcaattctcacaccytatctacagataacatcagatttaatttaatttataaattaaactttgtcatagatatgtatgtatagggaaaaacagcttgtgattcagtactattcatggtttcatgcatgcactgggggtcttggaatgtatctcccacagttaaggtgtagttactgcacttattttgttataacgcaacacagtctctctagctcttcagttcaaactgtttagtttagaataaaacatgctatcaccagaaactaacaaaacataggaatcagaccagaaacaggaatccttgcaaagactttccagccaccagtggagaagatctcaagagagatcagtgtgttactctggctaatactcttctgggtaaggtgctgggtggtttccttagttgtagctatttgctctggcctacgtataacaaggcccaaattcacctgccattttacctcccacagaaagaaccactggaaagatcactcctttaagagcttatccacattcagagagaagctgaataaacactggggaggtatggcaggctgccgggcaatattatctgatgtgaaaaaatatatagaaagaaaattatcaatgcccttttactaccagaatgttctaatgcttgcccatctccctagtagcagaaaaaatttttttcacctcgcataaagcaaaactcccttgtcatctctcatgacagaatctagttttaggtgagtcatgtcatcataatacaggctgttgtcaacctcatccctcaa

SEQ ID NO: 62066 - DNA, 550 bp, Homo sapiens
agatttagcaggaaaattccatgaggtttaaatgagatgactaataataaaccatctacctttgactctattccaattaaaaatgggttaggaaagtgctttgaaaatcaagtgtgttcatcagggaatcatttacctaagtcttcttaacactgcttagtgaatattaagcctgatatagtaaatacacgctaaccactaaattgaaggggaaagagggagaacaaagagacrtgtaaagtacacttactttttctagtaggaaaaagccaattaaaactatcacctattagttttattggaatcagtcttacaggaggtcaaacttcctactgtcgctacctattctcaatatttttcttatttcttcctaaacttctagagccgtgctgtccaataaatatgtgagccacatatgtaattttaaatgtactagtaagccccattaaaaggtgaaattaattttaaatatacttaactcagtatgtcccaaatagtaatcacagtaataattttaacatgtaatcaatataaaaaattatcaagcaga

SEQ ID NO: 62067 - DNA, 550 bp, Homo sapiens
agatttagcaggaaaattccatgaggtttaaatgagatgactaataataaaccatctacctttgactctattccaattaaaaatgggttaggaaagtgctttgaaaatcaagtgtgttcatcagggaatcatttacctaagtcttcttaacactgcttagtgaatattaagcctgatatagtaaatacacgctaaccactaaattgaaggggaaagagggagaacaaagagacgygtaaagtacacttactttttctagtaggaaaaagccaattaaaactatcacctattagttttattggaatcagtcttacaggaggtcaaacttcctactgtcgctacctattctcaatatttttcttatttcttcctaaacttctagagccgtgctgtccaataaatatgtgagccacatatgtaattttaaatgtactagtaagccccattaaaaggtgaaattaattttaaatatacttaactcagtatgtcccaaatagtaatcacagtaataattttaacatgtaatcaatataaaaaattatcaagcaga

SEQ ID NO: 62068 - DNA, 550 bp, Homo sapiens
agatttagcaggaaaattccatgaggtttaaatgagatgactaataataaaccatctacctttgactctattccaattaaaaatgggttaggaaagtgctttgaaaatcaagtgtgttcatcagggaatcatttacctaagtcttcttaacactgcttagtgaatattaagcctgatatagtaaatacacgctaaccactaaattgaaggggaaagagggagaacaaagagacgtgtaaagtacacttactttttctagtaggaaaaagccaattaaaactatcacctattagttttattggaatcagtcttacaggaggtcaaacttcctactgtcgctacctattctcaatatttttcttatttcttcctaaacttctagagccgtgctgtccaataaatatgtgagccacatatgtaattttaaatgtactastaagccccattaaaaggtgaaattaattttaaatatacttaactcagtatgtcccaaatagtaatcacagtaataattttaacatgtaatcaatataaaaaattatcaagcaga

SEQ ID NO: 62069 - DNA, 550 bp, Homo sapiens
agatttagcaggaaaattccatgaggtttaaatgagatgactaataataaaccatctacctttgactctattccaattaaaaatgggttaggaaagtgctttgaaaatcaagtgtgttcatcagggaatcatttacctaagtcttcttaacactgcttagtgaatattaagcctgatatagtaaatacacgctaaccactaaattgaaggggaaagagggagaacaaagagacgtgtaaagtacacttactttttctagtaggaaaaagccaattaaaactatcacctattagttttattggaatcagtcttacaggaggtcaaacttcctactgtcgctacctattctcaatatttttcttatttcttcctaaacttctagagccgtgctgtccaataaatatgtgagccacatatgtaattttaaatgtactagtaarccccattaaaaggtgaaattaattttaaatatacttaactcagtatgtcccaaatagtaatcacagtaataattttaacatgtaatcaatataaaaaattatcaagcaga

SEQ ID NO: 62070 - DNA, 550 bp, Homo sapiens
agatttagcaggaaaattccatgaggtttaaatgagatgactaataataaaccatctacctttgactctattccaattaaaaatgggttaggaaagtgctttgaaaatcaagtgtgttcatcagggaatcatttacctaagtcttcttaacactgcttagtgaatattaagcctgatatagtaaatacacgctaaccactaaattgaaggggaaagagggagaacaaagagacgtgtaaagtacacttactttttctagtaggaaaaagccaattaaaactatcacctattagttttattggaatcagtcttacaggaggtcaaacttcctactgtcgctacctattctcaatatttttcttatttcttcctaaacttctagagccgtgctgtccaataaatatgtgagccacatatgtaattttaaatgtactagtaagccccattaaaaggtgaaattaattttaaatatacttaactcagtatgtcccaaatagtaatcayagtaataattttaacatgtaatcaatataaaaaattatcaagcaga

SEQ ID NO: 62071 - DNA, 519 bp, Homo sapiens
ttcacaaatggcaaagcaccaagcccttaatgccatcctcctgayagtgagtgagttctcatgagatctagtagtttaaaaggctgtggaacctctttcctctgtcttgttccaacttctgccatatgaaacatgtcattgccgcttggatttccagtgtggttaggaggggcctgatcagtgtgggcctggtcagtggacctaggtctgtgaggactatttagtgggatcgtggtcagcaggggtctgcttagagagggtctcattagtggggtctagtagtgggggttttggtgagtggggacctattggctgccagttgtttggtgtctggtcagtgcaaacctgggctgtggggcttgatcagtggagacctggtcagctggggcttagtgctggcctggtcagcatgggctgcggcaccggtgacaaggtcaaggggtgctattcagtggaggactgggcacatgggacctagtcagcagaccctggtgggcgtgtcctcatcagtgaggccct

SEQ ID NO: 62072 - DNA, 519 bp, Homo sapiens
ttcacaaatggcaaagcaccaagcccttaatgccatcctcctgatagtgagtgagttctcatgagatctagtagtttaaaaggctgtggaacctctttcctctgtcttgttccaacttctgccatatgaaacatgtcattgccgcttggatttccrgtgtggttaggaggggcctgatcagtgtgggcctggtcagtggacctaggtctgtgaggactatttagtgggatcgtggtcagcaggggtctgcttagagagggtctcattagtggggtctagtagtgggggttttggtgagtggggacctattggctgccagttgtttggtgtctggtcagtgcaaacctgggctgtggggcttgatcagtggagacctggtcagctggggcttagtgctggcctggtcagcatgggctgcggcaccggtgacaaggtcaaggggtgctattcagtggaggactgggcacatgggacctagtcagcagaccctggtgggcgtgtcctcatcagtgaggccct

SEQ ID NO: 62073 - DNA, 692 bp, Homo sapiens
gttcagcttgtttccctcatttaaatcagatgttgatttcccagtcctggctgtcagcccctctcgcgttgtgtgactcctgcatgactcgatgctttccatttcttggtttgtgtaattgtcagatgtgccggcttcctgtcttgttatatgtttcatatccgtggagaatgaagctgagtttaatagactgatgaaaacatcgtgggatctcactctaaggcgaacgtttgtgagaggctgcttactgtctcacgctggtggctctgtatggattgctgagccccacagggcaggctgctccactcaagggaagggcatcttgccgggagaccatgcggagggcaggaagctgcccagtgaggatggtgctgagttctcctgtaggatgttaagggaagaatcacaaaatgagggttttgtgctttcaaataagtttgggaagtatttgttacgcaaggctaaataccttcttggtgcaaagcacccagtcccgcactcyggtgtttaatagctagtgtgcctcaggcatcatgcagtggggagtctcgatgccttaggcggctggggttcatctggatggcctcatctgcccactggccttgcacccccatttgcaaggtaatatctacagagttgtgggccagcctgagtttctttcctgggaatgtggagctgggcctgaagaatct

SEQ ID NO: 62074 - DNA, 908 bp, Homo sapiens
tgcatcatctttaaatatgccctcagaattctctgcatctatttaaaggagattccttttttctctcctgtgaacacacggcacctgatgcctaaaccctgcctcattctcagaactgactgaagcccattcagctgaggtaatttaagtacacccccagggtcactgatggagcaggtacaagagagtgaagaatgaaagtataatgtttctgtaactcttcatacctcattaaatcaaagaaagatgtagttcaccatttctatctacaaatagcttaacattaacatcacaatgtattcatttcctttgaattctttttctccttttacatccaggctgaggccaaatcccacatatgagaaatctctacaactgccacaaaacaaaataccatcaacatttcattctccaaaagagatatgtaatttgaaatatatatatatgtcacagctaaaatggctgttcttgcttaatagtatttttatacaggtaattttctcactgagaactaataagtactataaattcgagatccattataattttatgacaaagtatatgagttttataagataacctttgaagactttgcatgcaaagccatcattgctttttgaattttaagagaatgttataatcaagtgcaaaattgaatgaaagtgaatatgcctgtgcaagctgtttgaaggtaacttacagccagtgtactaacagcctgtgacacagggttaagtcataggaactgagaatgccattctgcttactatgtggctacatttaggatgactttggctgcaagtaatagaaaacttaactttgatggatttcagaaawaaaaaaaatttttaactcacttagggaaaatgctgagaaaacacaggctttagaattagttgatccatgca

SEQ ID NO: 62075 - DNA, 618 bp, Homo sapiens
tagagacaggcttttaccatgttggccaggctggtaccgaactcttgatctcaggtgatccacttgcctcagcttcccaaagtgctaggattccaggcatgagcctccgtacccagcctcctcagacattttaagttcgtatgtcaaatttgccattccaatatacaatagtccccaaggacatagtctatatcaacattcttaaacaaaggcatcccgtcattcttttaaatgtatactttcaaatttaaataccacaacatcataattcatctaaatatacatctgaagctccttttccgctgtgtgacagctggaaggcacatggtcctcactgcttgacctctggcccaggcaatgggtctgactcaggggcctgggaagctggccgagaaggcactaaccatcagcgggaggctggcagggctgacctgacaggtcaggaaggagaggccccctgaggctgcaactaactgggcaggggcagaggtgacctaggcagatggcargcacagagcagcggtgggaggagggcagagctgcctggggcatgggtgagggatgctgcagtcggctcctggctgtgtgggacacagcagccacccagcagcagttccg

SEQ ID NO: 62076 - DNA, 867 bp, Homo sapiens
ttcatttggagacaccaacaatgcgcgtgtgtgtgtacaagaataagagtaacaaagggactaaaataggcaaatgcgaaagaggatggtggagaatactgtatcagacttgttgcccataaaatcctttctaataaaaagaaacatggcagagatttgaatgaaatgagtattcagaagagcagccacacatgttaagttcttgataaatactgtgcatgaaagaataataaatggatatgactactgttaaaggcaagactgcaagagcagtagctacagacaggtttgatcccaattttagaagaatacacataaaaggtttgtaattttatagtgagaggcaacagttaatcaaaagtatagtttataaaacttctgggtaaggagttacacatatttttggttgcagtgaggcaaaaataatacagaattgtgggaaattttatgggttttattgaaataattgttaagaatacgttgtatttattgagtgcctactgctgtgtacttgtgctagatgccttatacaaattctcaattaatttttattgcaacatttcaagtaaagaggtagtttctcagtttttccggaagtagagggttggaatggttgagtgacttgcaaatgtccatttggtttacaaatgtcagagccaactttggaacccaggtgtctccaactgcaatgcattactaagaaaagaaaatctatgtttttttttttttctaaacttagtgttttatcgtgaagaaacsaaaaagcttaaattgaaaaaatgtattggtaaaaaatctaaaatttagtgatatacatgaaacaacatggattaatttcaaaaatatacccaatgaatgacacataaa

SEQ ID NO: 62077 - DNA, 545 bp, Homo sapiens
cagcacagtcacttggtgactcagtcccaacacaacttcaaaaatagtttcatgcagtcttttcctgtgcttcttataggttccaatggctgagtcctcatctttgttcctgaacctgtgccagtttcttctaaagcctgccttgctttcccacttatccccacctcctagagttcagagacgtcctgctgaccctcagcctgcaatttcttattttacaagcttcttatataaattaaacaatgtcacagtcctcccacctgctggaacactcaccctttgcctcccacagaacctccctgatacccacggtccacccatctggaccaccacctgttgacaactgacggtacctcctatgtccctactgatgtcttgggstcagtgaatcacattctgttggtcctggcaccaaccacactctagttcagtagcagaaaggagagaggcattttgtagagttgttaaatcactggtaccaaagccaggcctggatgatatcccataaatagttcctccaggcatcaaagcataagacatttctt

SEQ ID NO: 62078 - DNA, 541 bp, Homo sapiens
aggcaacatggcaaaaacccatctctgcaaaaaataacaaaaattagccaggcgtggtggcatgcgcctgtagtcccagttactcaggaggctgaggtaggacagtcgtctaagcctggggaggtcaaggctgcagtgagccactgcactacctcctaagcaacagagtgagaccctgtctcaaaaaaaaaaaaraagaagaagaaggaaggaagagacagagagagagagaaaggaagaaaggaaagaaaaaagagaaagaaagcaagaaagctagcaagaaagaaagagacactaaagacaaaattaacagaccagtgactttctagaagatattttatcatttccaagactgacaataggttaatatctaaaatgtacaaagaattctgtaatacaaaaaaggcaaggacataggaaagcagtaaaataataataaagcaattttagagtaaagaaaatacagttagttaataactacataaagacatgtataacaccaccagtcccagagaaactcaaataaaacaatagataccac

SEQ ID NO: 62079 - DNA, 739 bp, Homo sapiens
tgttctaagacatcaagtaactgaccttttcatcccgccgaacaaacctcaaagtggagttgccaactatcccacaggaaattgagtcaccacaccaagcaacacacctaaatgtcgacagctagcaggacaaaaacagtgagccagtttaattttggcttttaccaagaacacatactgcattcattaataaaatacttcccctcaacccctgccagagtagtatacactgtggctctccttaaaaatacatgaaaactctttaactgcaccaaatcttgctaagtcaaggaactaaacagagaaaaacacccamgcaaaaactattggctaaactccctaaaggctgggagagggctatggaacagcaactgagaaataaattgagccttgaaggcccctgctacaacagcatcagttttcttcaaggcacctttgaactatgtaacacccgcattctgctgaggctcttctgtgaacaaacagtcctcaattcttgcgggccagcacttggcttctgtcacagtgatatgcttagaggttcccctgacacatggcctgaaactgtgccaggggctccaggagaagatgctgaagaagcagcttccttttgaaaaaggaaaaaagtaatcacctcagagccacagcagttagctagaggttgaggtcattttttgtgaaatgttcagtccattactcttacccacaactcacagtgatgttgaccattgaggtaaaa

SEQ ID NO: 62080 - DNA, 2302 bp, Homo sapiens
  misc_feature (1)...(2302): n = A,T,C or G
aagtgctttgtgattgatacttaaaaagtacataaatgtgttgtaatgtcaaagtcacaaggttaagccatactgttcaattttcagtacatttaagtaaatgtgcctaaagtttgcctatgcttacatggtgtgtctgttaacatttaaaatgaatcattgtttaaaacaatctaacaatctttacactgaagtctgttttgttttgttttgttttgtttgttttgagacatagtctcgccctgtcacccaggttggattgcagaatgcagtggcgcgatcttggctcactacaacctctgcctcctgggttcaagcaattctcctgcctcagcctcccaagtagctgggattacaggcacacaccaccacacctgactaattttttttatttttagtggagatggggtttcaccatgttgggcaggctggtttcaaactcctgacctcaagtgatctgcccgcctcagcctcmcaaagttctgggattacaggcttgagcctctatgcccggccacctaaggtctgtaatttttaaatgattgtgttcattgagtcatattttactccactttctaatattttagtatctttttttttttttcactccaggaactagaagatgtgaacaaatggggtcttcatgttttcagaatagcagagttgtctggtaaccggcccttgactgttatcatgcacaccatttttcaggtaaggtggttgagttgtattacatttattttatttaggaacttaatgtccagtctgtagcttatgcatacattttgtcttttttaatattccccaccttttgcttatttttatacttttatccttatttgctcctttgccaagggacaagtaaagatacagaaaggtggagtgtggataaaccacaaataacatcaattttgttattttttttgcatttaagaaaaagatgtgatatagccaaattgaagcaatttattaaaataataatttagacatcatcttagtcatctgaacctgactgcatagagaatggagtactaacttaaaaaaaatgaataaagcccctgctggctactaaccttagaatatagttttttcagtcactttcttgtgtcctgcttctttcttcatatccatttctctctcttattgaccctttgctccagcttagggtgggatttaaatgagaagttgaggctgctgtagatatctcgggaccgaaatgggaaacttcagccctagagaggacgttgatttttagttggtgtgatgcaggggttgagttaatagtgcttgactggagctgcctccatgataatgggacatagaaacttttagagttggcacctcattcctgacaccatacagctagggcgtagtattcttgggttccagcaggacaacccaactctggttttgtcccagagtccctggatcttctcagaggttcccattttcctcactagacatgtgagagtgcagttgccatttccaggttatccactggcaacactggtgtgtgattttcttttttaaacatactctatggagaaatttttcacataaagacaaaaatgttaagatgattgtttttcctacaggaacgggatttattaaacacatttaacattccagtagatactttaattacatatcttatgactctcgaagaccattaccatgctgatgtggctatcacaacatatccatgctgcagatgttgtcagtctactcatgtgctannnnnnnnnnnnnnnnnnnnnnnnnnnnnnnnnnnnnnnnnnnnnnnnnnnnnnnnnnnnnnnnnnnnnnnnnnnnnnnnnnnnnnnnnnnnnnnnnnnnatgtgtaaaagattatatatttctggaagcatgcctatttacactagttattattactttaggagacagatattctctttgtttaaattgtttccacaaagcataccacgaagtacagaggggacattagtaactattttatgatgattatggtattcatttaggccaatttaagtgaattggagatcctaattttctctataaggagacaatactttttcatacaagattatttttgtggaggcttcatttatgtgaagtttttgcacccatttattgtcatgattattcttcagtgaaacaaaagtctgtagtagatatgctgctgctgctggttttaggtaaattgactaaatagttatacaaaactctgtctctaccatatatgaattcaaactgtatcaacaattacagaatactatgctaacatctaataagagagttagcccatgtagaagagaaatat

SEQ ID NO: 62081 - DNA, 2302 bp, Homo sapiens
  misc_feature (1)...(2302): n = A,T,C or G
aagtgctttgtgattgatacttaaaaagtacataaatgtgttgtaatgtcaaagtcacaaggttaagccatactgttcaattttcagtacatttaagtaaatgtgcctaaagtttgcctatgcttacatggtgtgtctgttaacatttaaaatgaatcattgtttaaaacaatctaacaatctttacactgaagtctgttttgttttgttttgttttgtttgttttgagacatagtctcgccctgtcacccaggttggattgcagaatgcagtggcgcgatcttggctcactacaacctctgcctcctgggttcaagcaattctcctgcctcagcctcccaagtagctgggattacaggcacacaccaccacacctgactaattttttttatttttagtggagatggggtttcaccatgttgggcaggctggtttcaaactcctgacctcaagtgatctgcccgcctcagcctcccaaagttctgggattacaggcttgagcctcyatgcccggccacctaaggtctgtaatttttaaatgattgtgttcattgagtcatattttactccactttctaatattttagtatctttttttttttttcactccaggaactagaagatgtgaacaaatggggtcttcatgttttcagaatagcagagttgtctggtaaccggcccttgactgttatcatgcacaccatttttcaggtaaggtggttgagttgtattacatttattttatttaggaacttaatgtccagtctgtagcttatgcatacattttgtcttttttaatattccccaccttttgcttatttttatacttttatccttatttgctcctttgccaagggacaagtaaagatacagaaaggtggagtgtggataaaccacaaataacatcaattttgttattttttttgcatttaagaaaaagatgtgatatagccaaattgaagcaatttattaaaataataatttagacatcatcttagtcatctgaacctgactgcatagagaatggagtactaacttaaaaaaaatgaataaagcccctgctggctactaaccttagaatatagttttttcagtcactttcttgtgtcctgcttctttcttcatatccatttctctctcttattgaccctttgctccagcttagggtgggatttaaatgagaagttgaggctgctgtagatatctcgggaccgaaatgggaaacttcagccctagagaggacgttgatttttagttggtgtgatgcaggggttgagttaatagtgcttgactggagctgcctccatgataatgggacatagaaacttttagagttggcacctcattcctgacaccatacagctagggcgtagtattcttgggttccagcaggacaacccaactctggttttgtcccagagtccctggatcttctcagaggttcccattttcctcactagacatgtgagagtgcagttgccatttccaggttatccactggcaacactggtgtgtgattttcttttttaaacatactctatggagaaatttttcacataaagacaaaaatgttaagatgattgtttttcctacaggaacgggatttattaaacacatttaacattccagtagatactttaattacatatcttatgactctcgaagaccattaccatgctgatgtggctatcacaacatatccatgctgcagatgttgtcagtctactcatgtgctannnnnnnnnnnnnnnnnnnnnnnnnnnnnnnnnnnnnnnnnnnnnnnnnnnnnnnnnnnnnnnnnnnnnnnnnnnnnnnnnnnnnnnnnnnnnnnnnnnnatgtgtaaaagattatatatttctggaagcatgcctatttacactagttattattactttaggagacagatattctctttgtttaaattgtttccacaaagcataccacgaagtacagaggggacattagtaactattttatgatgattatggtattcatttaggccaatttaagtgaattggagatcctaattttctctataaggagacaatactttttcatacaagattatttttgtggaggcttcatttatgtgaagtttttgcacccatttattgtcatgattattcttcagtgaaacaaaagtctgtagtagatatgctgctgctgctggttttaggtaaattgactaaatagttatacaaaactctgtctctaccatatatgaattcaaactgtatcaacaattacagaatactatgctaacatctaataagagagttagcccatgtagaagagaaatat

SEQ ID NO: 62082 - DNA, 2302 bp, Homo sapiens
  misc_feature (1)...(2302): n = A,T,C or G
aagtgctttgtgattgatacttaaaaagtacataaatgtgttgtaatgtcaaagtcacaaggttaagccatactgttcaattttcagtacatttaagtaaatgtgcctaaagtttgcctatgcttacatggtgtgtctgttaacatttaaaatgaatcattgtttaaaacaatctaacaatctttacactgaagtctgttttgttttgttttgttttgtttgttttgagacatagtctcgccctgtcacccaggttggattgcagaatgcagtggcgcgatcttggctcactacaacctctgcctcctgggttcaagcaattctcctgcctcagcctcccaagtagctgggattacaggcacacaccaccacacctgactaattttttttatttttagtggagatggggtttcaccatgttgggcaggctggtttcaaactcctgacctcaagtgatctgcccgcctcagcctcccaaagttctgggattacaggcttgagcctctatgcccggccacctaaggtctgtaatttttaaatgattgtgttcattgagtcatattttactccactttctaatattttagtatctttttttttttttcactccaggaactagaagatgtgaacaaatggggtcttcatgttttcagaatagcagagttgtctggtaaccggcccttgactgttatcatgcacaccatttttcaggtaagrtggttgagttgtattacatttattttatttaggaacttaatgtccagtctgtagcttatgcatacattttgtcttttttaatattccccaccttttgcttatttttatacttttatccttatttgctcctttgccaagggacaagtaaagatacagaaaggtggagtgtggataaaccacaaataacatcaattttgttattttttttgcatttaagaaaaagatgtgatatagccaaattgaagcaatttattaaaataataatttagacatcatcttagtcatctgaacctgactgcatagagaatggagtactaacttaaaaaaaatgaataaagcccctgctggctactaaccttagaatatagttttttcagtcactttcttgtgtcctgcttctttcttcatatccatttctctctcttattgaccctttgctccagcttagggtgggatttaaatgagaagttgaggctgctgtagatatctcgggaccgaaatgggaaacttcagccctagagaggacgttgatttttagttggtgtgatgcaggggttgagttaatagtgcttgactggagctgcctccatgataatgggacatagaaacttttagagttggcacctcattcctgacaccatacagctagggcgtagtattcttgggttccagcaggacaacccaactctggttttgtcccagagtccctggatcttctcagaggttcccattttcctcactagacatgtgagagtgcagttgccatttccaggttatccactggcaacactggtgtgtgattttcttttttaaacatactctatggagaaatttttcacataaagacaaaaatgttaagatgattgtttttcctacaggaacgggatttattaaacacatttaacattccagtagatactttaattacatatcttatgactctcgaagaccattaccatgctgatgtggctatcacaacatatccatgctgcagatgttgtcagtctactcatgtgctannnnnnnnnnnnnnnnnnnnnnnnnnnnnnnnnnnnnnnnnnnnnnnnnnnnnnnnnnnnnnnnnnnnnnnnnnnnnnnnnnnnnnnnnnnnnnnnnnnnatgtgtaaaagattatatatttctggaagcatgcctatttacactagttattattactttaggagacagatattctctttgtttaaattgtttccacaaagcataccacgaagtacagaggggacattagtaactattttatgatgattatggtattcatttaggccaatttaagtgaattggagatcctaattttctctataaggagacaatactttttcatacaagattatttttgtggaggcttcatttatgtgaagtttttgcacccatttattgtcatgattattcttcagtgaaacaaaagtctgtagtagatatgctgctgctgctggttttaggtaaattgactaaatagttatacaaaactctgtctctaccatatatgaattcaaactgtatcaacaattacagaatactatgctaacatctaataagagagttagcccatgtagaagagaaatat

SEQ ID NO: 62083 - DNA, 566 bp, Homo sapiens
tgttacattttaatcttctctttacacgctagccaaaattatctttcataatgtaaatgtcagtatgtctttcccatgcttaaattatcatgttagtcctctgcttaaagtttgaatttcttatttattttattggatctttatagcaactgcttagctctctagcatcatttcaccacttcccatcttacctggtaagctccatttatctgagtacttgaaatttttagaacacagtcagcttcctagtaccaagactcctacaacatgctattctcatttttaaaatgctcccacgacacatatttctgtttcagatttcaggtgagcttttgctccacttagctctcacatttagtaagttttataggaaatcacacatagctttatgtacttttgctgtcttctttatgtaccttggctgtctcctacaatggtattttcatactctgtaaccagtctctgtaaacctcaatagactaagcatcacaagagcagtacctagaatacagtggctgcaaatacctatgagtgggaagaatkaacaacaaacgtattaatttttc

SEQ ID NO: 62084 - DNA, 1068 bp, Homo sapiens
tgcacctgatgcactgagctgtacccgtaaaaatggtgaagatgggaaattgtatgttatgcatattttaccacaatactttttttaatttgaaaagttgggaatttataaattaaatgtggggtcctgtgccccagaacacagttgaggagagctgcaggctccgtgacctcggacccggcccttccctccaggctgcctggggggactcgagggaggggaagctgctctgcgtgtggcctgcagcctgaggtcagctcagagggacggggccrggtgaggcctgggtgtgagcagatgagggaggcagggtgaggatgaaacgaaataatcatctcgtgccctgcaggcagtgtctagcccacaggagacggagccgtggttgttgatattcttgcattcaccatcatcacactgacccctagcccagtccatcgccctttgacccacgtgctggcttccatcccctccctgtcttgcacctccgtgttctctctcaccctctggcctattaatgagcttggatttagaccttcccgatcttcctgcaggggccctctgctcgacactggcggcttgcgtggcttctggctggagtctgggtggggtctgggtggggtctgggtgggtgtgttcatcctccgtgaacacacaagcacaccccaaagccggcgctctctttctggcactcagatttctcaccatcttttccagctatggaaaccactcccaacataaggaacacaccgccccagaggctgttaggtgatgcgtgggtgggatattaaatacgcctgtccgctccagagagcatcgccgccttccagttccttctcagtggtgtcaggagaaaggctcctgttgggggccgtgtgtcgctaacgcctctgcagcgcctgcagtttccctttgtcactagcatggaaggcaggcctcggactccagcctgctgcagtatccgcttataatttcataacttcccttctttgtatttatttttagagtttctttctatttttggcaagtggaactggttttttgtttaccatagtgtataatgtttacttt

SEQ ID NO: 62085 - DNA, 1022 bp, Homo sapiens
catctccttaaaccatactttagctccaaataatgacaataacaaggttgtaattctacctaaatgtgatattactctcctgcatataaaagcacagcccctgggtatttgaatagtccttcctttgtggactgcttggttttttgtggtgaaaggtaggtcattgattaattttctgaatccagctctattatcatcattattgggaattcctcccagaatctgactacagcttttcctttgagcgtcatgttctgtggtattttgtgatcatgaacttttcggtagatttgtagctattttagggtgaggtagaataaagttgttaagcaggtgccttttttactccaaagagtaaacgttttagatgaccaaataaatgaataaaaaaaaatcttaggataatactttacctaatgcacacttctgataggatacactgaattcactggtatccagcaagaatagcaagtgactgtttttaagtcatgttagattatctgtgtatttcaaacaaacatactttatatgatactgtcttagtttactttgtgttgttataatagaataccacagactgggttatttataaagaaaataaattcatttctcacaattcttgaaggtgggaagtcccatatcacagtgacagcatctgataagggacattgaactgaatcatcccatggcagaaggtggaaggcaagagagtgttaaagcaagagaaaaagagagggctgaattctctttttacaacaaacctactctcaagataatgaatgtacccccataataatgacattaatctakttatgaaaagagagtccacatggcctaacctcctcttaaaggtcccacctttcaacaccattgcactgggggtacatttccaacacatgaactttggaagacacaatcaaaccatagcaggtattttatgtggaaatggaaacaccaagctgtatgtgtttgtatatgtgtgtttgtgtgtgtctgtgtgtacgcatgtgtgtctgtgcata

SEQ ID NO: 62086 - DNA, 1022 bp, Homo sapiens
catctccttaaaccatactttagctccaaataatgacaataacaaggttgtaattctacctaaatgtgatattactctcctgcatataaaagcacagcccctgggtatttgaatagtccttcctttgtggactgcttggttttttgtggtgaaaggtaggtcattgattaattttctgaatccagctctattatcatcattattgggaattcctcccagaatctgactacagcttttcctttgagcgtcatgttctgtggtattttgtgatcatgaacttttcggtagatttgtagctattttagggtgaggtagaataaagttgttaagcaggtgccttttttactccaaagagtaaacgttttagatgaccaaataaatgaataaaaaaaaatcttaggataatactttacctaatgcacacttctgataggatacactgaattcactggtatccagcaagaatagcaagtgactgtttttaagtcatgttagattatctgtgtatttcaaacaaacatactttatatgatactgtcttagtttactttgtgttgttataatagaataccacagactgggttatttataaagaaaataaattcatttctcacaattcttgaaggtgggaagtcccatatcacagtgacagcatctgataagggacattgaactgaatcatcccatggcagaaggtggaaggcaagagagtgttaaagcaagagaaaaagagagggctgaattctctttttacaacaaacctactctcaagataatgaatgtacccccataataatgacattaatctagttatgaaaagagagtccacatggcctaacctcctcttaaaggtcccacctttcaacaccattgcactgggggtacatttccaacacatgaactttggaagacacaatcaaaccatagcaggtattttatgtggaaatggaaacaccaagctgtatgtgtttgwatatgtgtgtttgtgtgtgtctgtgtgtacgcatgtgtgtctgtgcata

SEQ ID NO: 62087 - DNA, 949 bp, Homo sapiens
tcaaaagattttttttttttttttgagatggagtctcactctgtcaccaggctggagtgcagtggtgcaatctcagctctctgcaacctctgccccccaggtttaagtgattctcctgcctcagcctcccgagtagctgcgattacaggtgcatgccaccacacccagctaatttttacatttttagtagagacggggtttcaccatgttggccagtatggtctcaatctcctgacctcatcatccacccacgtcggcctcccaaagtactgggattacaggcatgagccaccacgcctggcttcaaaaggttattaagacaatattttggtgtcgcttttgcttacaataaacattcaataaatatatgctaaatagatgaccccaaagtgctagcttaaagttcatttttccagctaccaatgaaaaccaaagtatttgggctcagagaagctgacatattaacactatgatatagtctagttcatttaaattagatgacccactaaattgtgttggaaaggccctggatatcaagtccaggctaagaaatctggaggttactgagaagagaaatttgttataaggagctcttcaatcagggtaggcaaaaagcagcattatggtgaagagcaagtttaaaaaaaagaaccaagagcaaggccaagcttcttccagataatctggcctatagtcagattcaaaccataaaacattctcatggtgagtgacttagttacaaacattacagttcaagggaaaatgcagatcctgtgcccgaccacaaggcttctttgtgtttttttattctatcctgctggagaactctgctatataatttattccattcctccagagagttaatatggcrgctaccttctttagactgcgttaaaattaccttaaagtatactttatcgttatagaccttagaaactcccattgtttc

SEQ ID NO: 62088 - DNA, 1018 bp, Homo sapiens
tgcatccatatttatctggtatatttgagtcagttcagatttgaagcaatattttggaattttacgtaaaatttacttctggttttctcttgaaatcctgcctcttatctctgtttttggattctctaatctcctaatctctgcagattttcatttctgctcttgcagagtgggtttacttgtgtagttgtgcctgtaaataaagaatctctctctctcwcacacacacacacacacacagaaacacacaatctcagttccgatgaatttaaaaagcaagactaaaaatggcttcacaatcatatgctatggtctggaatataataatttaaatcactgatcacaaaataaataaagtgcgtgtatattggaggctaagaaaatgagagacagctgccttaaatcttactggaataggcagggtaagtataaacaaacaaacaaacaaacagcaaacatgacaatgatgaaagtagcccaggtcttcagggtggtgcagcagactctttgattcctttatgcgctcatttttcattctgaaaaataaatgtagccatctccttgtaattcactcttcccagtggaaaatataatcaatggtaactgtatttatttatgcagaattttataacccattgacatcctcaaaatgagttttccaacatccagaaagaaaactctccaatacatgtcaaggactttgaagtaccttcctactgacttgtattgtacgctgaaaccaacagtgtcaaagaaaaaacacttacgttccttcactgatgtgtcgtgcatgcccattcgtttttctaatattgagtcttggcattgattcctctttcctgaaatcaaagagaagagagctccagattttagattaagaaagaaagctcatagatgtgtggattttagtgacaaggaagaaaaagtctcaagatctcaaactggaagcctgctgactaattgtattttctagctcattacgttggtaactataattcattgcatggacaagtacaac

SEQ ID NO: 62089 - DNA, 1018 bp, Homo sapiens
tgcatccatatttatctggtatatttgagtcagttcagatttgaagcaatattttggaattttacgtaaaatttacttctggttttctcttgaaatcctgcctcttatctctgtttttggattctctaatctcctaatctctgcagattttcatttctgctcttgcagagtgggtttacttgtgtagttgtgcctgtaaataaagaatctctctctctctcacacacacacacacacacagaaacacacaatctcagttccgatgaatttaaaaagcaagactaaaaatggcttcacaatcatatgctatggtctggaatataataatttaaatcactgatcacaaaataaataaagtgcgtgtatattggaggctaagaaaatgagagacagctgccttaaatcttactggaataggcagggtaagtataaacaaacaaacaaacaaacagcaaacatgacaatgatgaaagtagcccaggtcttcagggtggtgcagcagactctttgattcctttatgcgctcatttttcattctgaaaaataaatgtagccatctccttgtaattcactcttcccagtggaaaatataatcaatggtaactgtatttatttatgcagaattttatamcccattgacatcctcaaaatgagttttccaacatccagaaagaaaactctccaatacatgtcaaggactttgaagtaccttcctactgacttgtattgtacgctgaaaccaacagtgtcaaagaaaaaacacttacgttccttcactgatgtgtcgtgcatgcccattcgtttttctaatattgagtcttggcattgattcctctttcctgaaatcaaagagaagagagctccagattttagattaagaaagaaagctcatagatgtgtggattttagtgacaaggaagaaaaagtctcaagatctcaaactggaagcctgctgactaattgtattttctagctcattacgttggtaactataattcattgcatggacaagtacaac

SEQ ID NO: 62090 - DNA, 531 bp, Homo sapiens
tggtaaccatgctgtccaatccagaccaactgagattcaaccatgcttgcactatataacaaattttcatatacattttatgagggacataaagatattttttaaaacacatatgcaaagtcttgccccaggtaagaaatttagcagggaggagttgagttcaacaagaaaacaaataaatgcaaacaagaaaacaaagcaaggtagaaataaaaacrtatctttttttttagaaaaagatatgtaaaaggtacgtaaagttataagtcagatatttcctgctaggccctgctcccacattcatcatgtatttattgaacacatgtcacatttcatcttgcattagagtaattttttttagattacttattcctttacaatgtcataagctacttgggagtaatgagtagattgttcatgtctttcaattctccttaacattcagtgcaatagcttgcacattgtaaatatctaatgtttgttgagtgaatgaaagattggatgaatgtggccacccactgtagttatcta

SEQ ID NO: 62091 - DNA, 638 bp, Homo sapiens
taagtgtaaagctataatatgattgttatgtttgcatgcagtgtttatttttttcctgtagacactgggaagtcattgccgggttttaakcctatgagtatgttcttactttaagaaaaaacaatgtggtgacaataggtagaatgacttgaagagacagtgagacttgttaggaaggtgttacatttattgggtgtgtagagggcaatgtaatacaatcttgttttatattgtttctattagtttcccagggctattgtaacaaagtaccacaaactgggtggcttagaacaacagaaaattttgtcccttcaggccagaagtctgaagttaaggtgtttgcagggccatgctccctttgaatgcactaagaaaagatctgttcccgtctctccgctaccttctggtagatccttagtttgtggcagcaaaactctaatcctcacataacactctccctgtgtgcatgactgtctctccacttggctttctttttatatggatgtcagtcatattggattagggaccaccctatttcactaagtcctcatcttaattcaactagttacacccacagcaaccttatttccaaataggttgcattctgaagtactggggatcaagacttcaataggtga

SEQ ID NO: 62092 - DNA, 638 bp, Homo sapiens
taagtgtaaagctataatatgattgttatgtttgcatgcagtgtttatttttttcctgtagacactgggaagtcattgccgggttttaatcctatgagtatgttcttactttaagaaaaaacaatgtggtgacaataggtagaatgacttgaagagacagtgagacttgttaggaaggtgttacatttattgggtgtgtagagggcaatgtaatacaatcttgttttatattgtttctattagtttcccagggctattgtaacaaagtaccacaaactgggtggcttagaacaacagaaaattttgtcccttcaggccagaagtctgaagttaaggtgtttgcagggccatgctccctttgaatgcactaagaaaagatctgttcccgtctctccgctaccttctggtagatccttagtttgtggcagcaaaactctaatcctcacataacactctccctgtgtgcatgactgtctctccacttggctttctttttatatggatgtcagtcatattggattagggaccaccctatttcactaagtcctcatcttaattyaactagttacacccacagcaaccttatttccaaataggttgcattctgaagtactggggatcaagacttcaataggtga

SEQ ID NO: 62093 - DNA, 693 bp, Homo sapiens
tcttataatcagttagtttacttgtcatctcacttcaatcgatgattttcmtatggtaacatttaacttacctgatgctagtcattattaatgtatttctgtagattgtaaaacatctagttatcacactgtctatgttagcttgttccagctcatgatttattttcattttttctaggatatagacctgcagctaactggatttgatttataagagagaaatctgcagtcaatgcccactcttgccacactgctaatatggaaaacagaatgttcaataggatatggtctgataaatagtgatgattgaagatgctgctccaatacatgtgaaatcaatgggagatatctgctgtctgaagatctttcagagcttttctcgacaagctcccctgtaagaaatcggaggtatattctaccattatacagtctttctcaagtggatataaatacgtttgcctcactgtaaccagacaactagacaactaatgtgggaccatggcactgcccagatgcacgtggccaaattatgtttggagagcagtgatggcatgcttggtacaccggggattgggtgccccattgactctctgtatgttgggatgtttgcttcaggctggccatgtgctatcacaaaaattggatgatgtggacccactggtggctaccaactttggaaagataagagggatt

SEQ ID NO: 62094 - DNA, 693 bp, Homo sapiens
tcttataatcagttagtttacttgtcatctcacttcaatcgatgattttcctatggtaacatttaacttacctgatgctagtcattattaatgtayttctgtagattgtaaaacatctagttatcacactgtctatgttagcttgttccagctcatgatttattttcattttttctaggatatagacctgcagctaactggatttgatttataagagagaaatctgcagtcaatgcccactcttgccacactgctaatatggaaaacagaatgttcaataggatatggtctgataaatagtgatgattgaagatgctgctccaatacatgtgaaatcaatgggagatatctgctgtctgaagatctttcagagcttttctcgacaagctcccctgtaagaaatcggaggtatattctaccattatacagtctttctcaagtggatataaatacgtttgcctcactgtaaccagacaactagacaactaatgtgggaccatggcactgcccagatgcacgtggccaaattatgtttggagagcagtgatggcatgcttggtacaccggggattgggtgccccattgactctctgtatgttgggatgtttgcttcaggctggccatgtgctatcacaaaaattggatgatgtggacccactggtggctaccaactttggaaagataagagggatt

SEQ ID NO: 62095 - DNA, 693 bp, Homo sapiens
tcttataatcagttagtttacttgtcatctcacttcaatcgatgattttcctatggtaacatttaacttacctgatgctagtcattattaatgtatttctgtagattgtaaaacatctagttatcacactgtctatgttagcttgttccagctcatgatttattttcattttttctaggatatagacctgcagctaactggatttgatttataagagagaaatctgcagtcaatgcccactcttgccacactgctaatatggaaaacagaatgttcaataggatatggtctgataaatagtgatgattgaagatgctgctccaatacatgtgaaatcaatgggagatatctgctgtcygaagatctttcagagcttttctcgacaagctcccctgtaagaaatcggaggtatattctaccattatacagtctttctcaagtggatataaatacgtttgcctcactgtaaccagacaactagacaactaatgtgggaccatggcactgcccagatgcacgtggccaaattatgtttggagagcagtgatggcatgcttggtacaccggggattgggtgccccattgactctctgtatgttgggatgtttgcttcaggctggccatgtgctatcacaaaaattggatgatgtggacccactggtggctaccaactttggaaagataagagggatt

SEQ ID NO: 62096 - DNA, 1749 bp, Homo sapiens
tgcatcacgacttcttataaggcctccacatggatgctcaatagcctattcatttgagttgatggactgaaaaaaaaattgcaaaaagaaaaattttatgaaacaaactaaaaatcaggccaggtgcagcggctcacacctgtaatcctagcactttgggaggccgaggcaggcagatcacttgaggtcaagagttcgagactagcctgaccaacatggagaaaccccatctctactaaaaatacaaaattgaccaggtgtggtggtgcatgcctgtaatcccacctactcaggaggctgagacaggagaatcacttgaacccaggaagcagaggtcgcagtgagctgagatcacgcgattgcactccagcctggaaaacaagagcaaaactccatctcaaagaaaaaaaaatcaaaaaatgctaggatttcttttcagattttctattaacttggcaagcctggaaaaaatttttttttgaatctcaattttgtcaatataaaaataaatataacacactaactgacaagagaatttgctaatgattgcagagcatatggaagctttaaattaagctccaaaacatttattaagtcatgggtttcagttgcctgtttaattaccatttacaatgaactattctccatttattttaagaaactgtcaaatagatgtttgaattatactataatttgggcaactataatttagtgattgctacatttgaattttaagtatatttgaatatgtattaagtcagaaatctcacccaaaaaacacttatactttaataggctgagctttatttaaattttagtaagtcaaagaagaggggcagaaatgtatgtgacattagattttatgcttggttagtatttaggaaaacagcaacctagaaacaaagtcaacaataaatctgaaaggaaacaatttcagaataaaggccataacactttatacactaggggagacatgtatagcagcaaaatcagcaaaccttttttatccaaagagaatggaaaaacagaaatatttacaatgaaagtgaaaataaaagtatgcatgctctttaaaattgctataatggttctttatcctccctactacaaagggctccatcagtagacaaaattttgttaccctcccctcttgtggaaaagacatcacagactcaagagtctaaaataaacctttcttggccgggcacagtggctcatgcctgtaatcccagcactttgggaaaccgaggcgggtggatcacttgaagtcaggagtttgagaccagcctgaccaacatggtgaatccccatctctactaaaaatatgaaaattagccgggtgtggtagcgcgtgcctgcagtcccagctactactcaggaggctgaggcgagagaatcgcttgaacccgggaggtggaggttgcagtgagctgagatcatgccactgcactccagcctgggcaacagagtgagactccatctcaaaaataaataaatraatgaataaacaaataaataaataaataaaaataaatctttctcatttattaaggatggcattgcatgaagaaaatggagaaggaacttactaaccaatagttggagagctaccatatccattaaagcctcaaaattacaggtttccttttatccataagtagaagttaagactccttcagaaaattgccttttatttggctcttctggcagaagcaggtctccttacactaatacagtggaggaggggct

SEQ ID NO: 62097 - DNA, 1749 bp, Homo sapiens
tgcatcacgacttcttataaggcctccacatggatgctcaatagcctattcatttgagttgatggactgaaaaaaaaattgcaaaaagaaaaattttatgaaacaaactaaaaatcaggccaggtgcagcggctcacacctgtaatcctagcactttgggaggccgaggcaggcagatcacttgaggtcaagagttcgagactagcctgaccaacatggagaaaccccatctctactaaaaatacaaaattgaccaggtgtggtggtgcatgcctgtaatcccacctactcaggaggctgagacaggagaatcacttgaacccaggaagcagaggtcgcagtgagctgagatcacgcgattgcactccagcctggaaaacaagagcaaaactccatctcaaagaaaaaaaaatcaaaaaatgctaggatttcttttcagattttctattaacttggcaagcctggaaaaaatttttttttgaatctcaattttgtcaatataaaaataaatataacacactaactgacaagagaatttgctaatgattgcagagcatatggaagctttaaattaagctccaaaacatttattaagtcatgggtttcagttgcctgtttaattaccatttacaatgaactattctccatttattttaagaaactgtcaaatagatgtttgaattatactataatttgggcaactataatttagtgattgctacatttgaattttaagtatatttgaatatgtattaagtcagaaatctcacccaaaaaacacttatactttaataggctgagctttatttaaattttagtaagtcaaagaagaggggcagaaatgtatgtgacattagattttatgcttggttagtatttaggaaaacagcaacctagaaacaaagtcaacaataaatctgaaaggaaacaatttcagaataaaggccataacactttatacactaggggagacatgtatagcagcaaaatcagcaaaccttttttatccaaagagaatggaaaaacagaaatatttacaatgaaagtgaaaataaaagtatgcatgctctttaaaattgctataatggttctttatcctccctactacaaagggctccatcagtagacaaaattttgttaccctcccctcttgtggaaaagacatcacagactcaagagtctaaaataaacctttcttggccgggcacagtggctcatgcctgtaatcccagcactttgggaaaccgaggcgggtggatcacttgaagtcaggagtttgagaccagcctgaccaacatggtgaatccccatctctactaaaaatatgaaaattagccgggtgtggtagcgcgtgcctgcagtcccagctactactcaggaggctgaggcgagagaatcgcttgaacccgggaggtggaggttgcagtgagctgagatcatgccactgcactccagcctgggcaacagagtgagactccatctcaaaaataaataaatgaatraataaacaaataaataaataaataaaaataaatctttctcatttattaaggatggcattgcatgaagaaaatggagaaggaacttactaaccaatagttggagagctaccatatccattaaagcctcaaaattacaggtttccttttatccataagtagaagttaagactccttcagaaaattgccttttatttggctcttctggcagaagcaggtctccttacactaatacagtggaggaggggct

SEQ ID NO: 62098 - DNA, 674 bp, Homo sapiens
atacttaaccactcctgaagggccattacctgtcagaaattgggtggatgaggccaggggcttcaaccatacctgtgaagccttatttttaaaaaaagtcatctgaggtgaatatgggaaatgttaatagttgttgatccctggagattttcagtgtaaagcatatggtgagacagtttgactcttcaagcagaaactggtcccttagaaatgcacctcctccgccaatcaggcacatttgtaattaacaaaaaggaattatgtgaaatgactacaagtggatgcctcctgcatgcatttctatggtatgaatatcacttgagtcaggtaatggggaaaaaacaaatgtaaaagaaagggagcagggaaaggaaatgtacttcaaattgtgtccttcctaattttatyctgtctgacactcttctgaggggcagtagaggcagaattcataacctccaccatcatcttcataattgatatttactgagttctttataatgtgtctgtcattgccaagtactttacttcagatattagacagggtatagtttcatatgcctgaacagagacccaaagtaacagcagcttaaacaagatagaattttatttctcactcacatgacagtctggacatatgtagtccatgactgatatgatggttccacgtgggtcaa

SEQ ID NO: 62099 - DNA, 663 bp, Homo sapiens
tagctcacattttttcaatgtttattataagtgctttgggtctttatataaaaatgtggtgatgttttgtgaccagaaagttgctgcaggaacttacctctagyttgtatcgattagcctatagtaaaattgattttgttatatgttgtttcacttaaaattgcagtttccaagaaactatcaatgccattaagtgaggacttactgtgcagacaacttaaacttcatgcagatattgattaggagcttttcaaaatggttctaccaatttacactcctactgcaagtaagtgtcctagttactctatattcaccagtaattgctattgtgggacattaaacatttttcattgaagtttgtaaaataataatctcattttggttttcattttcataaaaatgatgagtaaattttgtcatcttttcataaaattactggccagtagggtttacttttctgtgagctgctgatacagcatctttttttgtaccattaaattggttttctaacctttttcttatgaatttaggaagaatttctatactcagaattctagtcagtttgtaattaggttttgtaaatacctccttactactttggctcctccactcccacttattaaatgatgtatttgtatggaaaaaaaattttaatattctttt

SEQ ID NO: 62100 - DNA, 1001 bp, Homo sapiens
gtattttcaattgcttggcactaaatgttttttgcttttggtggggcaaggcccattgattggagtgctcacatggacaaggggtaatgaatagcaagtttagcacagagataatgtacaatatcatctttctatttctggtgacagagttcagagaacaggaagtcaatttggcagcttcagcacagccttgcccacaataagcctcatgcagtaggacagttcctggataaaagcasgctaattctagggtccgaaaaagaaatctcaagaatcacctgataagaaagctgctctgacaaactactgaaataaattatgccctttgatgtatcatgccagctacactcagaagcagagatattttagttatgaaggaacagagtttgttgataaagattgtttaggttctcagagacatagcttgggtcctatggcacccaagaactgtgttgtctagattgtatgctacaccatgttgtggcagatatgtttagttttgagaggcatgttgctcatagatttcctactatcatgttctcattcttcaatcctgatgctgagattagcccagtttagttgatcagtttttcctttcctctatccccacttctttctttctctcttacttttccaataacctatactctctgtaataccttcttacagaaatactgcacagtcttataatgatgcattctctgacccattggaatgtaagaccataaaggcaaaggacacaccttatccatctctgtatcaccagtgtacacaattacttgatggtctactttaacaattatgactagaaatgaagtaaatcaatccttaatacacaaaggaaactacgtgctttgttctgtgatgataatctcagaaaagaataaatagaatgaaaaaaattaagtgattgaaattttaaacaaggactaaaaaacacattgtgataaataacaaaagcaaaatccctaaacattcattgtaggtgaccatgccagata

SEQ ID NO: 62101 - DNA, 1001 bp, Homo sapiens
gtattttcaattgcttggcactaaatgttttttgcttttggtggggcaaggcccattgattggagtgctcacatggacaaggggtaatgaatagcaagtttagcacagagataatgtacaatatcatctttctatttctggtgacagagttcagagaacaggaagtcaatttggcagcttcagcacagccttgcccacaataagcctcatgcagtaggacagttcctggataaaagcaggctaattctagggtccgaaaaagaaatctcaagaatcacctgataagaaagctgctctgacaaactactgaaataaattatgccctttgatgtatcatgccagctacactcagaagcagagatattttagttatgaaggaacagagtttgttgataaagattgtttaggttytcagagacatagcttgggtcctatggcacccaagaactgtgttgtctagattgtatgctacaccatgttgtggcagatatgtttagttttgagaggcatgttgctcatagatttcctactatcatgttctcattcttcaatcctgatgctgagattagcccagtttagttgatcagtttttcctttcctctatccccacttctttctttctctcttacttttccaataacctatactctctgtaataccttcttacagaaatactgcacagtcttataatgatgcattctctgacccattggaatgtaagaccataaaggcaaaggacacaccttatccatctctgtatcaccagtgtacacaattacttgatggtctactttaacaattatgactagaaatgaagtaaatcaatccttaatacacaaaggaaactacgtgctttgttctgtgatgataatctcagaaaagaataaatagaatgaaaaaaattaagtgattgaaattttaaacaaggactaaaaaacacattgtgataaataacaaaagcaaaatccctaaacattcattgtaggtgaccatgccagata

SEQ ID NO: 62102 - DNA, 856 bp, Homo sapiens
catgtcttggtgaatatacagcaggctggatttcagtccacaaaaacccctcagcaggtactttgtgcagtgcacagcctgcacaagtgtatagtggctataagcaaagttaggtatattatttccattttatggatgagaaaattgaggttcttctatgttacgtaacgcttcttaaaaatgcagagagttttaaaaaaatgcttgttcccatagttagtaacagagctagacacttacctgaaccaaaggtttgtgtacctytcatcttatctaaatgtttgcttatctgtgcttattattgtgcttgctctcttcctcccttctctctcttactctctctctctctctttgcaggtatatgtatacatctactctcaactccactctcattcctccaatggtccatggtagaggcacagtcagaaaacaccctagtctctctatttgcatggggctactcaagccaatggaaaatgccagcagatgttttgaaatatgcaggtacatatcaataaaaatataataggttacttctaataagcataaattgatgttgcttcttctatccttagtcctttcacaatttccatttgaaaacaggacagagatagggccaggaaagatagcacgtgtgtgcacacacacacgcacacacacaagccccttccaaaattatgagaaagcataccagcagagcaaagagcttcaagtatcagtttgcacagagttggagattttcagttctgccaaatgagtctaaattcaacggcaacataaggagctaaatctgttgggtgagttatactttacctggataaattagatgtgcttgggggaagtattcattctttca

SEQ ID NO: 62103 - DNA, 2741 bp, Homo sapiens
cttagttcctctgtccttggtttcctcattgagggtaattatagctactactttttgctttggtaacactatctaagcatcaatggaaaggaaggaagaaaggaagagcaggggcaaaaaagaggagggaggggaattatagaaagtcatggtgaacgtctagtcttattcttgtttttttatattgtttactccaacccacaatacaaacaagttttctatccctgtgcattgtgacgttaagtcagggccagacgagaattctttcttggtagtcaaaacatagtgtcctcagggtcatttcctttgctatagtggagaacaaatgctaatggagacgacacaatatttaaaacagtcaaatatccgacttataggcagtagaaaagaatgtgaagactttctaaagtatataaccttggcttaaataagtgaggattctttcatgttctgatttcactgcactcttccacatcagacatgaacatacatgacttttcattgattagtttcattaatgaactattataaatactttacgaaattttttaacacaacttttaagtctctgtgggtcatactttccatactagtccatgtgtgctacatgtgagcagctgaactctagaggcaccaaaactcaaacctccatagctggtgctataaaccttgcctaggcaaggcttcctctgcctttagcctgattcttgcgcttagcttgcttgggctctggctccaggctacgtctgattttctgggctctggtactcaccctggcccaaccttatgcccccattttcacccataaaacatggtgttttaatgttacattaaaacatataacaaagaaaggagataatgaggagaaaaaggaggagaaaaaaaacaatgaaatcagtaaaaagctggggtggaggaataacctacaattttttacattgtttcattttatacactatcaatcctgggaagctgtctgtgacaacagaatagacatgcatccctagaatgcatatttaagaataagtatatgtatctagaaatataatccatattgctaaaaatcaatgaaaacttcatactgaccttagggggtttaaacggatagtctggtgaaaaggtaatgtcaagaaagaacacccctccttcatagacagatcctgggggtcccaatatagttgacctccattcataaatgttgtctcctttgggtccagcactgaaataagacatacaaatgaaatgtgcttagaaattacataaaggctggaatttaacaaaatctatttatgataaccaattgagcaattccataaaaacacaaaaagttaatcagttaactctcatgttaagattcatattgccaatattgtcattatcctagaagtgaaatatgttggtatcacttcataaaagaacaccaagatcctcttttgccattcacaaccctacgcctatggaacaagagtccaagggactacaggccakaggtagaaacacaaatgtttaatgaaagcatgaaattatttgtgatgtcagagacaaaatttcaaagttagaaggacctctggggaatgactagtctgatccctttgctaacaactgagaacacaaaggaggttcaatgttcatcatccaaagtctctgctcaaatatcatatcccatctgaatcttcctttctttctccccacccaaaggacttcctgacccatacatcatgaccaatgaggtctgtagaggataagatgtatcattttgttttataactgtgttttgcaactaatgcttctttctaccctccctaaaagtgcttgaggacaggttgtaccttgtccttagtgcctcttaagtcagtatgttggatgatgatgaattaataacaaagcaagtgaagaagccacatggctactagcagtacacatgtctctgagtttcagagaattttgctgaaaacaatatggcccacatgagtcgagtgaattgtattagttctctcaggtgaaaagaagggcaaaatgagattaggatttagctaatcctaagaatgggctcaagccattcttgggtctcagcctctcaagtagctgggtttacaggcatgcatcactggaccacacctggcccctagaaaatgtatttttaaatgagttgcaataggtcttgtagggaagctatgaataaagtcataaaagatgtgtaagatctttatggagaaaattatataaaacttattgaaaagtactcataagagttaaataaatggagggagataccaagtttatgggtagggagacctgatatcaaatgtcagtttctccaaattgattcatcataattccaattaaaaagtccaactgctttttaaaaccaaaactcgacaagttgattttaaaattttttcggaagctcaaagaaattcctcaaacttttccacacatatatgaaaacctgatttatgtcaactgatgggactaggaaaagtttttatatttgaaaaacagagaaactggatttttaccctcagtaaataaacaaatgctgttgcagatggattaaatatttaaatgcaaaagtcaaaatattagagtttgactgaagagagtgacaaggcaagctgcaaacagaaaagatatttggatcatataaaagtgaccaaatactagtgttgagaatacacaagttcctaagaatcaactaaaaaaagactctattaaaaaagacatagacatttccaaaaaaa

SEQ ID NO: 62104 - DNA, 563 bp, Homo sapiens
ttgtgagacgaagtcttactctcttgcccaggctggagtgcaatcgtgtgatttcagctcactgcaacctccgcctcttggttcaagtgattctcctgcccaagcctcccaagtagggactacagacgtccaccaccacgcctggctatttttgtatttttaatagagacggggttttaccatgttgtccaggctggtctcgaacttctgacctcaggtgatctacctgcctcagtctcccaaagtgctgggattacaggcgagagccattgtgcccagcctgaatattgttttttttaatttttaaggaaatataatatcgtgacttgctrtttatgtgtaaaaataccttgtcacataactaaaataactgaatacaggttctagacctttcagctcttacaacgctgtgattttgttgtatgtgtatgctgacccacctctgcagaaaacctagggtagttcaacctctgtttaaattctgttagagatgctaatatgtctgtatcggctcaacatgaagctaagtgctgctgagtcctctgtgagctgaggctacacgg

SEQ ID NO: 62105 - DNA, 750 bp, Homo sapiens
ttcaattttagcagagccagctccttagggatgagggccttctttaccttgctcatcactgtgcctccaatacctacctgtaccttgaagggtgcttgacacatagaatatgctcaataatgatttttggtatgtttgttgaatgaatttgggatggtattaatgtggtaggtactttttttgcttgtcttcaaatgtgcacactcttactccctagttgtactattaacttytataagattaaggcaacagtgccctgtattacagatatctctctcactcctgtggtcatcagtctctgctctagaatcggatcactgatcccttgctttactatagttataaagtttctctagtaacattcaataaatattttcaactgttttgtttctaatttaataaacaaagggacaaacaaaagcaacaaattttactgatagtgccaaccactagaaaacggaaattctaaagatttttgttgcaatattttaacttgtttttcctacagggccatgtagtttttttgaaatctgtgcatttggatgttagaatctgaaagagggtaaagagaaacctttggcaagtgtttggtcttctttctgcaatcttggcaaatcttgatctgtctatgtgattatagctgacacaggccacagtctgattatatggagatttcttttttgacatcaactggcatattcaagctagaacctgcttttgatatggataagaaaaaggggcagggaaagc

SEQ ID NO: 62106 - DNA, 647 bp, Homo sapiens
acatcaattatgtgaataaatcaaagctagatgcagacgcagatacagagatacgtgaatgatttggagcagtgacaaatgcaaatggaaatgagggatattttatgatgtcttatgcaccacatctcatcactgtaagtttccagtaacaaatgaacatttcatttccctcacattattctttcttaaaagaaaacatgacaaataagaaacgtgtcacaaggatacaaagaaacagttgacaaaattcagaaccatcaggtacaaatgagaaatttttcagttaaatgttcagcaagcactttggcttttttttttctttttccggattaactactctaagagctgcaactcttaatgtacctataccaccctggggatgagattgaattagctcttacaactggcaaggagttcacttgctaaatcaccagcagtctcggggcacttgagtggacagaagttggggtcaatgagtcggccttgcctgcgatggagcttcagtgctggcacatctggatttcagttgagtgcaacttatttagcagagaaatcttcagaagaatctactctccaaatttccctcactttgcatagcacttgaagtggtcttcatgtttcaaggmgattctgaatactttagggaa

SEQ ID NO: 62107 - DNA, 1197 bp, Homo sapiens
tgcatgaaatgcgttcattggtgggagattctaaaccagaaatttcaaacttaaatactcccagggaccaggcaacataaaagtgtaaagttaacatcagaccataggtgctaagctcttgtactatgtccagcctcaacagtggcttagttacattgacctttcaaaccgattgccccttaaaatatgaaagctgtgtgccagccaaccacaatggccaaaccaaacacagtgcttacctaatgtagccgctgggctgatggccaacatcttggttgaaggcatccattactcctctagatttcagctgtgaatgctgcacttttaatgttgtttgtgtccttacaccccctatacacagacatacacacacacacacacacacacacaaacagtcactatgtgatggaattgatacattaattgatttgattgtggtaatcatttcacattgtattcttatgtcaaatcgttacactgtatatcttcaacatgtcgaattttaatttgtcaattatgcctcagtaaagttgaaaaaaatattttttagacacgcaacttctaccccagataattagtaatatcatatcatgagtgtccatcccactgtagaaatagtttacatcttctatacatctaaagggtcaatcataactaaaaatgtttttatgtgagggattattaaataatttaacttgcaaagaatttaaaatagacttgttatattaaaacaagcatggatatattataaagtagattataatttttataggaatttacatgaacaaatttaagcagactcgtttttttttttttttttttttttgagacagagtctcgctctgtcacccaggctggagtgcagtggtgcaatatcggctcactgaaagctccgcctcccgggctcacgccattctcctgcctcagcctcccgagtagctgggactacaggcgccccccaccacgcccggctaattttttgtatttttagtagagatggggtgtcaccgtgttagctgggatggtcccgatctcctgacctcgtgwtctgcccgcctcagcctcccaaagttctgggattacaggcatgaaccaccgtacccggcttaagcagactcttaaacctaattcctcattaaaaaaagtctgtacctcctttctcccaataaaacaaaacatccaatcaaactaaaagaa

SEQ ID NO: 62108 - DNA, 1114 bp, Homo sapiens
ctgcaatacttacaatgaatcactactcacaagtgcatgcaaagaaagagatayaatatgtataaatattgtataccattttgctcatttactttttatttaatgtttaaacacactggtggggtggatattatggggccgatgccagactttgatggtaaatctcagagtgcttcagtcaactttaacacagttctaaacccaaagtctcaattttattccaattgctttgaggctagtttacatgtaactaactttcccttctgcaagtggggagcttggtcccttcctttttctatatatcactccccttaagacttctttttcctaagacattgctctaaatctgcatttctaccagctagaacctggaaaatacattgcaggagagaaggaagtccccaactcttctatcttgaggggcctagcggagttgtgcatgcttagttcttatctttgccacctaggtagataattgtgagcatctttcttgtctggttagactctgtgatggataggactgtctcccccacttcttctgtgtctctcaacagctctgagaacaaagcagtgcacacaggagaccttcactaactcttcttgactaatgactgcatctttgtctgacaagtgcggtatccattgtgcactaaaaatgaatgagttgatttaaattaagaaaatgtcaggttgttcctggggtcatataagttgccacagtagcaaggtaaaaacaagagttagagttagttaacttttatgtgaatttaaaaatctttccagccttttttttctgttacagatggagagtcagcatgcatagcagttatgactgtgaactacagagccagacaaactgggtttattcaccactccacttatttattgcctataaaccttgaccaatagcatagttggggacctctggtttctcatctgtaaaatgggaataaaaatagcaccgacctcataagtgagctgtgagagcgacctaataagtaagctgtgagacagcatagtgactggcatacagtgagtgattaaaaagttaactcttttcacttattgttcatcaatatatatttagaaggccctataggttagacatcaagca

SEQ ID NO: 62109 - DNA, 660 bp, Homo sapiens
agatattagtcatcatccagcctgagggcagatccacatatgacagtcacagkttcaactctgaacttcatccatgtgtgagatttagaatctcactagtggactctgtccatgtatgaaggtgacaatcctaattgttggctacatgtgtctttgagagtcacaggctcacctgtttgctgggctgtgtaatgtgactctctctatacaccccaagggctttataaaatacatgtgagtgtcataatcttctgtgacctttttacaattagtagaccatggaccttagttgttgccctaagcctagctgttagagtcaaaatttctcctattggcttggtccatgtaagaaagtcatcatcatgacagttgcgtggtccaaggtaaaggtcacaacttcacctgtgagcagaaccaagaaggaaagtcacatcacctgaatgctgggccatggaaatgtcaatatccctctatgggcaggacccacacatagaggagaaagtcacatcacttttgtgctaggctcagtgatatgtcacaatgcccactgtatgcagaacccagtcaaaagagtcacatcacctaggtgctgggctgagcaatgtgtcacaatcccacccattctcagggcccagttatgaaaggacagtcatccaccta

SEQ ID NO: 62110 - DNA, 1386 bp, Homo sapiens
ccttaatgatggtataaacccatgatcctacatgttgccctaagttcaggtatgagagtcatcaatgtgcctgtgatctgggtccagaaatgagaaaccatctcatttgtggatggatccagatatgacagtcacaattccaactgtgaattgtttctgtgagtgagaaccaggacctcatgagtgggttctgttcacctttaatcctaacttgggctgtgtgcatacaaaagtcccaataaggattttgagctgggctctcttttaatactctctgtaccaccttagggcattatacaatatgcatgagtgttgtaattctttgagacgtctgtaaaagtaggaagccaaggatcttatctcttgcagtaggcctagatacaagagtcaacatgtcttctatttcctgggaccaggcatgagagacattgacatgcctatgagctgggtccagaaatgagtcaccttccaacatctgttatatgtgccagatacacatatgacagtcccaattctaactctggactgtttgcacatgtgagatttacaacctcaccagtgggctttgtccatgtgtgagactgacaatcccaatttttggatagtgtgcctatgagaggcaaaattttacttctgtaatggactctgataagtcccaagtattttacaaaatagtcataagtgttataatcatctgtaatttttataaaattaggagactgagaaccttactgattattctaaccttagctatgagagtgaaaatctccctactggctgggccatcatatgacagtcatcattattcctgtgtcctgaacctagttatatgtcacaattctacctgtgggcagaaccaggcagaagagtcacatcacctgaatactgagccagatatatattagtatccctcctgtgagttgagtgctggtaaaaatttcatgtcactatggtgctgggagcagtgatgtgtcacaatgtcttctgtgggcagaacccatgctgaatgaattacattgtgtgagggctgaactcagcaaaatgttacaatcccctttggcaatgggcccaggaggaaggacaattacatcacttaaatgagaccagagattatcacctggaaatgraccagagatatatcacaatgccatctgtgagaagggactatgcaggatgaccacattatcaaggttattgacttaggtctatgtcacaatcaaactatcaaactgtgggctttcttcgggcagtatattcaaatcagtcaagttctggctgggcacaattatatgtcagagtcacagctgttggcaaggtctgagacgggaattaacattcctgggcatgtcatggtccaggtattgaaagtatgaactaataaatttt

SEQ ID NO: 62111 - DNA, 1386 bp, Homo sapiens
ccttaatgatggtataaacccatgatcctacatgttgccctaagttcaggtatgagagtcatcaatgtgcctgtgatctgggtccagaaatgagaaaccatctcatttgtggatggatccagatatgacagtcacaattccaactgtgaattgtttctgtgagtgagaaccaggacctcatgagtgggttctgttcacctttaatcctaacttgggctgtgtgcatacaaaagtcccaataaggattttgagctgggctctcttttaatactctctgtaccaccttagggcattatacaatatgcatgagtgttgtaattctttgagacgtctgtaaaagtaggaagccaaggatcttatctcttgcagtaggcctagatacaagagtcaacatgtcttctatttcctgggaccaggcatgagagacattgacatgcctatgagctgggtccagaaatgagtcaccttccaacatctgttatatgtgccagatacacatatgacagtcccaattctaactctggactgtttgcacatgtgagatttacaacctcaccagtgggctttgtccatgtgtgagactgacaatcccaatttttggatagtgtgcctatgagaggcaaaattttacttctgtaatggactctgataagtcccaagtattttacaaaatagtcataagtgttataatcatctgtaatttttataaaattaggagactgagaaccttactgattattctaaccttagctatgagagtgaaaatctccctactggctgggccatcatatgacagtcatcattattcctgtgtcctgaacctagttatatgtcacaattctacctgtgggcagaaccaggcagaagagtcacatcacctgaatactgagccagatatatattagtatccctcctgtgagttgagtgctggtaaaaatttcatgtcactatggtgctgggagcagtgatgtgtcacaatgtcttctgtgggcagaacccatgctgaatgaattacattgtgtgagggctgaactcagcaaaatgttacaatcccctttggcaatgggcccaggaggaaggacaattacatcacttaaatgagaccagagattatcacctggaaatgcaccagagatatatcacaatgccatctgtgagaagggactatgcaggatgaccacattatcaaggttattgacttaggtctatgtcacaatcaaactatcaaactgtgggctttcttcgggcagtatattcaaatcagtcaagttctggctgggcacaattatatgtcagagtcacagctgttggcaaggtctgagacgggaattaacattcctgggcatgtcakggtccaggtattgaaagtatgaactaataaatttt

SEQ ID NO: 62112 - DNA, 759 bp, Homo sapiens
atttttgccaagaaagagatctaggttgctttgaggcttcttttgttcaacttttagatattggcctagcatttgaatacctgaagtagctgttgaaagctgagacatctcattatagtcatttattaactttatatttttttacttttatttgcagtactgaaatagcatcagaggaaaataagcattgttttggcaatacgtgagaaatatttacactaccctgtaccatctgatattttaggacatctatatagatcaaaataaatcagattgaaaggatttaatrtcatataatgataacagtaattactaactaagaaactatcctgtataattcaaggtctccagttttattttttaatacttttggacatgggatagctgcagaattacctccattttccacttcggttttaggagttagttgtgaaccccaccctcacgcaggtacacacataaaaccacccaaataaaccagtttcattaatggtaccatattcaaataaccaaaacggatactggaatgcaatcttcaaagataataaaccacaatgtaaatctggttgaataaaggcctagaaccaagccttccactcccttcataaggcacagaaacaaaagtgtagctcaactagtctcccactgaggatatagtctagctttctgccgagacaatcaaacaacccaaacctaatatttcaatgaacttgggaaatgatgacacactcctttctgtctctcctcaccagttctgaa

SEQ ID NO: 62113 - DNA, 1201 bp, Homo sapiens
gaagcatgaaacctccttacttcgcttagaatatgtttagctctaagcagaactcaaagtgaggaactaaaggcattattgatagatgctgtagataattataggtaactcactattctttggggaatgggagcatgaatcccaggaattttagaaagttgaaagtgtggaagtaggcaaggtaagaaatatcctcaatccacagacaccttccttttagatagtgtaaaaaaccgatggttcacaaccctagttgtcttacaggacaatgggtagacattaaaaagagcaactaccacgacaaacaaaacagctacctgggctccatccactgagttagagtatctgtccagggatccttagatctaaaatatgctacgggcaatggcaataggcagtcaaaggcgagaactactgttctaggttgtcaggaaatactaggaaaaaactatgcaagaaaataaagcttgaagtacacagatgatccatttatctttgcattttttagattttagataccaacttgcatccattgagcacagatacttgcccaaaatagaataaaaatgcttagtatttagactttttcccacacatacagcagtacagtttagtgtgtatgtatgtatacacacacacacacatacaaagacaccaaaaggctgtcaacagtgtgtatctgagcctctctgtgacctagaagttactgaattctaagttacttgaatgatctctaattgtaagtcaatgcagcatagaaatcataatcacttaaaacgtctggaaaggtttttatgatcacatgaaactctaggaagtcttccctgttgcctttgaatcctagcagctgggactccagtcatttcagtgaataagaaagagactttttaactacaaacaactgactaactgcataacaactctaactcaaaacatcgttttgccagaatgcaaccactgtttgagactgtaattatrgtaggaaaccagtgagcaggttaagaatgaaggggtatatgaataacattctgaaaggaaaattaatctttcaagtcttgaattcaaatacaaattcatgcagcaaaaacgggccccaaaattcagaacaattgtagctagagatggagataggcaaatcctggtatctgaggaaagggtagggacaataggaaatataactttggcttctttgcatgatggt

SEQ ID NO: 62114 - DNA, 1201 bp, Homo sapiens
gaagcatgaaacctccttacttcgcttagaatatgtttagctctaagcagaactcaaagtgaggaactaaaggcattattgatagatgctgtagataattataggtaactcactattctttggggaatgggagcatgaatcccaggaattttagaaagttgaaagtgtggaagtaggcaaggtaagaaatatcctcaatccacagacaccttccttttagatagtgtaaaaaaccgatggttcacaaccctagttgtcttacaggacaatgggtagacattaaaaagagcaactaccacgacaaacaaaacagctacctgggctccatccactgagttagagtatctgtccagggatccttagatctaaaatatgctacgggcaatggcaataggcagtcaaaggcgagaactactgttctaggttgtcaggaaatactaggaaaaaactatgcaagaaaataaagcttgaagtacacagatgatccatttatctttgcattttttagattttagataccaacttgcatccattgagcacagatacttgcccaaaatagaataaaaatgcttagtatttagactttttcccacacatacagcagtacagtttagtgtgtatgtatgtatacacacacacacacatacaaagacaccaaaaggctgtcaacagtgtgtatctgagcctctctgtgacctagaagttactgaattctaagttacttgaatgatctctaattgtaagtcaatgcagcatagaaatcataatcacttaaaacgtctggaaaggtttttatgatcacatgaaactctaggaagtcttccctgttgcctttgaatcctagcagctgggactccagtcatttcagtgaataagaaagagactttttaactacaaacaactgactaactgcataacaactctaactcaaaacatcgttttgccagaatgcaaccactgtttgagactgtaattatggtaggaaaccagtgagcaggttaagaatgaaggggtatatgaataacattctgaaaggaaaattaatctttcaagtcttgaattcaaatacaaattcatgcagcaaaaaygggccccaaaattcagaacaattgtagctagagatggagataggcaaatcctggtatctgaggaaagggtagggacaataggaaatataactttggcttctttgcatgatggt

SEQ ID NO: 62115 - DNA, 683 bp, Homo sapiens
gcaatccctaaagcagggctaacatgttaagtgctagctactggacacatcccagcagctggggaagcagctggttctcaaaggtcggtctgagcagagaaccaggaggccaccaatttgactttagctctttgtccctccatttgtgcattcgtaaaatggagataatatcatcaagttcaaaatgtatataatatctaacatgatggctagctcagtgtaagttctcaataaatgttaaatttgtgtccttttctagtctattcaggaagaaatacagatgcaattttaattcaggagcacttttagaaaagtgtcactttctttctctttttatccatttattcgtccaatatttactgagaacctagtaggtggtagaggttttccaacagctgaagaaagagtrctgcaagtttttgttcaaatagagcttacattttagtaattgggagaaacaaaataaacatataaataaataagtattaagatactgttgtgagtaatacatgttaacttgaagacaaagaaatgtgtctttaagatgttgtattattggattacattagtgggtcacaggaacccaaatcaaactaagctaaactaacaagttatggaactttattggcccgcatacaaaaactacagaaaaggtagagagggaaccagctacagggacccct

SEQ ID NO: 62116 - DNA, 912 bp, Homo sapiens
ttatttaacagaggtgaacttcttgaccagggtcccacttggctatgtggggctatcagaaacctgatagttaaggcaacattaagacgcatcagtaaccatgtttaagtgtaaatggaaactcttagcaagactgccaagatarcaggatccagagaggcaatctcagaacttctcagcacagaaagtgtccagaaagtgatctatcaggaaaatctttccctccttctgttcctctctttcttcttctttctccccacctctacacttacaaagcgtctaatatgccccagattgtgttctcagaggtaatgatgaaaataaaaatttaacttgaactctgctctcaaagatgtgttcatgagaccaatgtgtagagaattaatttcaactgagcatgaagcatgtaaacggagatagaaggagacagaggcaagattggtcaagcaaattgcatttgtgccgtatgtgcagctcattgtcctgagaacatttaaaaaggaggatttggttaatcgtgtcctcctcagggtacaggagccaagccctggtgtaactaagcatttgaatggtctctagcagtagatttgtgtgtcattggaaaataatcaatatctttataaaaacttcacagaccaccaagagaaggcagctgttaacatctcataggatagaacttttttaagactgaaatgaaaatactattctctcttctctactctctttatgtctttgacataaaataagtcatccaaatccataaatcagtatgagatgcagtgtgtagagataagtaccatcaagcagtctcggcacattacccaaggtgaccacacagcacatgttttatcatgatcttctgcagcaaaaatgtagtccctgtcattcaactacttaagccttctgttaaga

SEQ ID NO: 62117 - DNA, 912 bp, Homo sapiens
ttatttaacagaggtgaacttcttgaccagggtcccacttggctatgtggggctatcagaaacctgatagttaaggcaacattaagacgcatcagtaaccatgtttaagtgtaaatggaaactcttagcaagactgccaagatagcaggatccagagaggcaatctcagaacttctcagcacagaaagtgtccagaaagkgatctatcaggaaaatctttccctccttctgttcctctctttcttcttctttctccccacctctacacttacaaagcgtctaatatgccccagattgtgttctcagaggtaatgatgaaaataaaaatttaacttgaactctgctctcaaagatgtgttcatgagaccaatgtgtagagaattaatttcaactgagcatgaagcatgtaaacggagatagaaggagacagaggcaagattggtcaagcaaattgcatttgtgccgtatgtgcagctcattgtcctgagaacatttaaaaaggaggatttggttaatcgtgtcctcctcagggtacaggagccaagccctggtgtaactaagcatttgaatggtctctagcagtagatttgtgtgtcattggaaaataatcaatatctttataaaaacttcacagaccaccaagagaaggcagctgttaacatctcataggatagaacttttttaagactgaaatgaaaatactattctctcttctctactctctttatgtctttgacataaaataagtcatccaaatccataaatcagtatgagatgcagtgtgtagagataagtaccatcaagcagtctcggcacattacccaaggtgaccacacagcacatgttttatcatgatcttctgcagcaaaaatgtagtccctgtcattcaactacttaagccttctgttaaga

SEQ ID NO: 62118 - DNA, 896 bp, Homo sapiens
gggccatactgtaaaatgggtgattttttgaaattcttgtgattgttgagattcctttaatttcaatgaagggataaattttcattaacttatagaaacctgatggaaaacaataaggtgaaatgcctgacagtgtcccttctcattcaacattttttctctagggtttcgtagacccagatgtaacactgcaatgagtatattaggcatggtgactacactgaatgacagagtcaacacaacatcgtgaagttggaaggagagtaaaattagtcagaagacatgtaataggcacacgtgtagccctaatgtaggttaaaaacatcaattgcgtgagtataacaacacccatgatatgccttgatataggcagggtcttcttcgtctcattggtctccagagtcctggacattttttctagtcctaactgcttttcatgtgacaagcactttacattttctgatcagcttcgtatgggcacaactgaccatgccttgcctgtatcagacacctatttcttccttctgggagttggatatttgatkatctggttagcatctgtattagtctgtctgacactgctaataaagacatacctgggtaatttataaaggaaagaggtttaattgactcagttctacatggctgaggaggcctcacaatcatggcagaaggctaagaagagcaaagagacgtcttacatggcagcaggcaagagggcctgtgcaggggaactcccctttataaaaccatcagatcttctgagacttattcactatcatgagaacagcacaggaaagacccgcccacatgatccaattacctcccactgggtccctcccatgacatgtgggaattatgggaactaacaatttgagatttgggtggggacacag

SEQ ID NO: 62119 - DNA, 896 bp, Homo sapiens
gggccatactgtaaaatgggtgattttttgaaattcttgtgattgttgagattcctttaatttcaatgaagggataaattttcattaacttatagaaacctgatggaaaacaataaggtgaaatgcctgacagtgtcccttctcattcaacattttttctctagggtttcgtagacccagatgtaacactgcaatgagtatattaggcatggtgactacactgaatgacagagtcaacacaacatcgtgaagttggaaggagagtaaaattagtcagaagacatgtaataggcacacgtgtagccctaatgtaggttaaaaacatcaattgcgtgagtataacaacacccatgatatgccttgatataggcagggtcttcttcgtctcattggtctccagagtcctggacattttttctagtcctaactgcttttcatgtgacaagcactttacattttctgatcagcttcgtatgggcacaactgaccatgccttgcctgtatcagacacctatttcttccttctgggagttggatatttgattatctggttagcatctgtattagtctgtctgacactgctaataaagacatacctgggtaatttataaaggaaagaggtttaattgactcagttctacatggctgaggaggcctcacaatcatggcagaaggctaagaagagcaaagagacgtcttacatggcagcaggcaagagggcctgtgcaggggaactccyctttataaaaccatcagatcttctgagacttattcactatcatgagaacagcacaggaaagacccgcccacatgatccaattacctcccactgggtccctcccatgacatgtgggaattatgggaactaacaatttgagatttgggtggggacacag

SEQ ID NO: 62120 - DNA, 757 bp, Homo sapiens
tgttctgcctgcctcctgccctccgtctctacttatgtggaggaattaacagagctgatgacgtgtctgctctgtctccatttaagagaatcagtcccatcacacctagcaggtcagctgtgggatcactgcaggcagggaattcacacccacaggggtagctgattatatatttaagacccctgattattaaacttcctttttaacactgagctgatgctgcacctctccagtgaaaaggtaccatagtgattaagcacaagggtttggatgtcctactgacctgggttctgatcctagctccaccacttccttgataaccaggcctttgccaaactgctcaatatatccacacctcagttttctagtctttaaaatggaaatggtagcagtaagcattttacagggatgttgtgaatataaatgaggatgtctataaagcacttggcagcaccgtgactggcatatagagtttcttacatttttttgtcctagctgtgttgctgtttttattctgcttattcctcttaatctttctcattagaatcatgtaataagtccaaatcttccaaataacagcaktttattttcttgaagacaaccttcatataccaccaaaggatgagtttcttttatgatgaagatttctaatactttatccatttctgttgtgaaacagatttcaattccttctgtgtaatgtggaggatcatagcatgtgttatagactcagacaaggggagttcaaatataactt

SEQ ID NO: 62121 - DNA, 800 bp, Homo sapiens
acagaactctgttatcaatttttttcagagaggtagaaaatgtgagttttattaaaatgtgctatttactgtattatttcattctcacactgctataaagaactacctgagactgggtaatttataaaggaaagaggtttaattgactcacagttccacatggctggggaagcctcaggaaacttacaatcatggtggaaggcacctgttcacagagtggcagaagagcgaatgaatgagtgctgagcaaaaggggaagccccgtaaaaaagcatcagatctcatgagaactcactcactaccaagagaacagcamcatgggggtaactgcctccatgactcaattaactcccattgggtccatcccacgatatgtggagattacgggaactacaattcaacatgagattttggtggggatacagccaagtcatatcatttgcataacacaatttctggaatattcttgctaatgtcattaaatctatacaaagacctgattctgaaagaccaggaggttgtaagagatatcaataagcatttgtacaaaaagtttaatattagaagatgttttctctggaaagctgtgacaaacaggttagtgccaaaatggccatcaagaaacccttattaacaagaacataagttcctctagactaaccttactgctgtgtatatccctgaaatcccacaatagcagtaatgatagagtccagtcttcctttgccttcatccgctcctcacttagtcagtagtgagggtaaactctcaccttaatttctagccatttgtcaaagctt

SEQ ID NO: 62122 - DNA, 800 bp, Homo sapiens
acagaactctgttatcaatttttttcagagaggtagaaaatgtgagttttattaaaatgtgctatttactgtattatttcattctcacactgctataaagaactacctgagactgggtaatttataaaggaaagaggtttaattgactcacagttccacatggctggggaagcctcaggaaacttacaatcatggtggaaggcacctgttcacagagtggcagaagagcgaatgaatgagtgctgagcaaaaggggaagccccgtaaaaaagcatcagatctcatgagaactcactcactaccaagagaacagcaacatgggggtaactgcctccatgactcaattaactcccattgggtccatcccacgatatgtggagattacgggaactacaattcaacatgagattttggtggggatacagccaagtcatatcatttgcataacayaatttctggaatattcttgctaatgtcattaaatctatacaaagacctgattctgaaagaccaggaggttgtaagagatatcaataagcatttgtacaaaaagtttaatattagaagatgttttctctggaaagctgtgacaaacaggttagtgccaaaatggccatcaagaaacccttattaacaagaacataagttcctctagactaaccttactgctgtgtatatccctgaaatcccacaatagcagtaatgatagagtccagtcttcctttgccttcatccgctcctcacttagtcagtagtgagggtaaactctcaccttaatttctagccatttgtcaaagctt

SEQ ID NO: 62123 - DNA, 736 bp, Homo sapiens
tatgtctctttagtctatttcaatctgcaacaattccacagtctttccttgatttccctgactttaacaccttagatcacaaggcagttatgtggtaaagtttcacctcatttggrcttgtctgaatagtcaggtatcaatggcaagtcacagactcttccctgtattggtaggagctatatgccaagggcacatataataaaagggtctataaagatgttcaaaaataataataaaagcagtaaaaattggctttaaaaatcactataaaaaaggcttctcccagccagcaagtacactgatcccattgtcttgccctctttccctctatcctctcctccttcactggatacaccattggaggtaataaaccactttcattacaattcgattcaggatgctgtgctctttatgctgcgttctgtcaggtagaaggttaagacttctatctgtcccattgctcttgaagttaaataatcatttgactaaggtggtacctgtcagacttctccagtataaaagtaagtatcttttttttctttataattagtgttttgtggctagggattttagacaatgcaaatatgcctcactggacatttaaactttttattcatatatttctatgaggatgatctgttttatcggtgtgaatccaaggtttcttattttggtaaatgagttataatacatttgctatttattcgatgctttcaaatggcttgcctttggcatg

SEQ ID NO: 62124 - DNA, 1217 bp, Homo sapiens
tggctgggcrtggtggctcacacctgtaatcccagcactttgggaggccgaggcgggcagattgcctgaggtcaggagttcaagaccagtctggcccacatggtgaaaccccgtctctactaaaaatacaaacattagccaggtgtggtggtgggagcctgtaatcccagctacttgggaggctgagggaggagaattgcttgaatccgggaggtggagattgcagtgagctgagatcatgccactgcactccggctggggtaacagaacaagactctgtctcaaaaaaataaataaataaataaaataaataataataataataataatatggggcttttggagtttcagatagatacaggtttgaattcttgcctccaccatcataggttgaatgacttatggcaaattaattctcccaaaccttcaaatgtaattaagtaattagtaatacctctttcctagagtcgttaggagacaagtgagagtagtacctggttaggccaataattaaaacttattaataggctatctatcttcttccctcctgtgaaatagcatttcatgcatttaaaaatgattaactgggctgggcacactggctcatgcctgtaatcccagcactttagggagctgaggtgagtagattgcttgaggccaagagttcgagaccaatctgcgtaagatggcaaaatctcatctctaccaaaaacacaaaaaatagctgggcgtggtggtgggcgcctggagtccagctacttgggaggctgaggtgggaggactgcactccagcctgggtgacacagtgaggccctgtctcaaaaactaaaaaaaaactaacgaaaagcttaaaaataaaaatggttaactgaatacttactatctaatgattacaaatgttcaaacgcctactacttgccagactctgggatccatagatgggcatcaggagagagatcttggaagtaatccgaaatagtaaaacaaatttcctatgcataagcttttgtgtgtgcttggggtgggggccgggggaagtattagagaggtggaggggccatagcttacacgagattttcaaaaggcctgtgactcaaaataactgaattgactacagaatacctataatgaccttgtgctgtgccagctatacacgacagtgtttaacactacgtaaggatcgcgacgttaaaaagctgacaggcactgtgaataca

SEQ ID NO: 62125 - DNA, 1217 bp, Homo sapiens
tggctgggcatggtggctcacacctgtaatcccagcactttgggaggccgaggcgggcagattgcctgaggtcaggagttcaagaccagtctggcccacatggtgaaaccccgtctctactaaaaatacaaacattagccaggtgtggtggtgggagcctgtaatcccagctacttgggaggctgagggaggagaattgcttgaatccgggaggtggagattgcagtgagctgagatcatgccactgcactccggctggggtaacagaacaagactctgtctcaaaaaaataaataaataaataaaataaataataataataataataatatggggcttttggagtttcagatagatacaggtttgaattcttgcctccaccatcataggttgaaygacttatggcaaattaattctcccaaaccttcaaatgtaattaagtaattagtaatacctctttcctagagtcgttaggagacaagtgagagtagtacctggttaggccaataattaaaacttattaataggctatctatcttcttccctcctgtgaaatagcatttcatgcatttaaaaatgattaactgggctgggcacactggctcatgcctgtaatcccagcactttagggagctgaggtgagtagattgcttgaggccaagagttcgagaccaatctgcgtaagatggcaaaatctcatctctaccaaaaacacaaaaaatagctgggcgtggtggtgggcgcctggagtccagctacttgggaggctgaggtgggaggactgcactccagcctgggtgacacagtgaggccctgtctcaaaaactaaaaaaaaactaacgaaaagcttaaaaataaaaatggttaactgaatacttactatctaatgattacaaatgttcaaacgcctactacttgccagactctgggatccatagatgggcatcaggagagagatcttggaagtaatccgaaatagtaaaacaaatttcctatgcataagcttttgtgtgtgcttggggtgggggccgggggaagtattagagaggtggaggggccatagcttacacgagattttcaaaaggcctgtgactcaaaataactgaattgactacagaatacctataatgaccttgtgctgtgccagctatacacgacagtgtttaacactacgtaaggatcgcgacgttaaaaagctgacaggcactgtgaataca

SEQ ID NO: 62126 - DNA, 1217 bp, Homo sapiens
tggctgggcatggtggctcacacctgtaatcccagcactttgggaggccgaggcgggcagattgcctgaggtcaggagttcaagaccagtctggcccacatggtgaaaccccgtctctactaaaaatacaaacattagccaggtgtggtggtgggagcctgtaatcccagctacttgggaggctgagggaggagaattgcttgaatccgggaggtggagattgcagtgagctgagatcatgccactgcactccggctggggtaacagaacaagactctgtctcaaaaaaataaataaataaataaaataaataataataataataataatatggggcttttggagtttcagatagatacaggtttgaattcttgcctccaccatcataggttgaatgacttatggcaaattaattctcccaaaccttcaaatgtaattaagtaattagtaatacctctttcctagagtcgttaggagacaagtgagagtagtacctggttaggccaataattaaaacttattaataggctatctatcttcttccctcctgtgaaatagcatttcatgcatttaaaaatgattaactgggctgggcacactggctcatgcctgtaatcccagcactttrgggagctgaggtgagtagattgcttgaggccaagagttcgagaccaatctgcgtaagatggcaaaatctcatctctaccaaaaacacaaaaaatagctgggcgtggtggtgggcgcctggagtccagctacttgggaggctgaggtgggaggactgcactccagcctgggtgacacagtgaggccctgtctcaaaaactaaaaaaaaactaacgaaaagcttaaaaataaaaatggttaactgaatacttactatctaatgattacaaatgttcaaacgcctactacttgccagactctgggatccatagatgggcatcaggagagagatcttggaagtaatccgaaatagtaaaacaaatttcctatgcataagcttttgtgtgtgcttggggtgggggccgggggaagtattagagaggtggaggggccatagcttacacgagattttcaaaaggcctgtgactcaaaataactgaattgactacagaatacctataatgaccttgtgctgtgccagctatacacgacagtgtttaacactacgtaaggatcgcgacgttaaaaagctgacaggcactgtgaataca

SEQ ID NO: 62127 - DNA, 1217 bp, Homo sapiens
tggctgggcatggtggctcacacctgtaatcccagcactttgggaggccgaggcgggcagattgcctgaggtcaggagttcaagaccagtctggcccacatggtgaaaccccgtctctactaaaaatacaaacattagccaggtgtggtggtgggagcctgtaatcccagctacttgggaggctgagggaggagaattgcttgaatccgggaggtggagattgcagtgagctgagatcatgccactgcactccggctggggtaacagaacaagactctgtctcaaaaaaataaataaataaataaaataaataataataataataataatatggggcttttggagtttcagatagatacaggtttgaattcttgcctccaccatcataggttgaatgacttatggcaaattaattctcccaaaccttcaaatgtaattaagtaattagtaatacctctttcctagagtcgttaggagacaagtgagagtagtacctggttaggccaataattaaaacttattaataggctatctatcttcttccctcctgtgaaatagcatttcatgcatttaaaaatgattaactgggctgggcacactggctcatgcctgtaatcccagcactttagggagctgaggtgagtagattgcttgaggccaagagttcgagaccaatctgcgtaagatggcaaaatytcatctctaccaaaaacacaaaaaatagctgggcgtggtggtgggcgcctggagtccagctacttgggaggctgaggtgggaggactgcactccagcctgggtgacacagtgaggccctgtctcaaaaactaaaaaaaaactaacgaaaagcttaaaaataaaaatggttaactgaatacttactatctaatgattacaaatgttcaaacgcctactacttgccagactctgggatccatagatgggcatcaggagagagatcttggaagtaatccgaaatagtaaaacaaatttcctatgcataagcttttgtgtgtgcttggggtgggggccgggggaagtattagagaggtggaggggccatagcttacacgagattttcaaaaggcctgtgactcaaaataactgaattgactacagaatacctataatgaccttgtgctgtgccagctatacacgacagtgtttaacactacgtaaggatcgcgacgttaaaaagctgacaggcactgtgaataca

SEQ ID NO: 62128 - DNA, 1160 bp, Homo sapiens
  misc_feature (1)...(1160): n = A,T,C or G
tgtgcgtgtgtgtgtgtgtgtgtgtgtgtgtgtgtgtggtgttgatgcatgaatggatgcatttgtatttgtccttgcttattgattgttttttgggagaatagaccatagatatatacaccattgcagcaaatacaagagcaaggaaaaaagtatccaaataaaatgtattccaggctacaacctgtgacccgttggtggaagcagtgctcagtataacgaaatcctgtacagcaaagggactcacatggtactttgtgccagttgtgccaggattttgtgataccttatctccttaaatacagggctgctgagatgtaatgagagcgggaacacaggttttgtaatctcttcaggcaaataagaaaacgcttgtggaataggtgacaattcgcagcatgctttcaccataccatgttcattgagatgcttttcatcactttactttgagtcagaaagtgccgagannnnnnnnnnnnnnnnnnnnnnnnnnnnnnnnnnnnnnnnnnnnnnnnnnnnnnnnnnnnnnnnnnnnnnnnnnnnnnnnnnnnnnnnnnnnnnnnnnnnaatcacttatgatcactcatgatttctatgggtcaggaattcagacagcagagcagaatggccatccctgttccaccatgcctggggtcatgttcactggaagacttgaaggctggggctgaagtcctctgaaggcttgtccactctcttgtctggtggctgattctgactgttggctgagggctagctggggctgttgtctgaacacccacatgtgttttctccatgtgacttgggcttccttgtcatatgacaccttggttccaaaagctggcatctcaggagagtgagaggcaagtagaagtaacaaagcattacttccaccacgttctattttttagaagtaagtcactaagtctggctcattttcaaagggcagtaattagattctactttaaaaaatgtatatattacatatactgtctrtatatacacactatatatatataatgtgaacatattttcattattcagagtaaatttttatgtatagtgcattagcaaggtctctttcagaaagtgacagatactcagaaagggaatttattggtttacttaactgagaagttcaaggtgatcaatttgtcatgact

SEQ ID NO: 62129 - DNA, 730 bp, Homo sapiens
ggatccagtttcagctttctacctatggctagccagttttcccagcaccatttattaaataggaaatccyttccccatttcttgtttttgtcaggtttgtcaaagatcagatggttgtagatgtgtggtgctatttctgaggaggaggtcctctcttaaacctgacctgagcagcacaatctcctggctgccacaaaaaaaagtcacaaaaatgacaacctattatacatgtcattctataaagtattttcttaacttacagacttaagagagatgtttgtttttcaaatacgttcataagcgagatgttagtttttcaaatatttatgtgtaatcattatacacggctctttacacacttgtatgacttttttttcttttttgagatagggtcttgctctgttacccaggctgaagtacagtggtgcaatcatggcttactgtagcctcagcctcccaggctcaagcagtcctcctgccacagcctcccgagtagttgggactagaggcacgtgccatcacgcctggcttattttttgtgtttttagtagagatggggtttcaccatgttggccaggctggtcttgaactcctggcctcaagcaatccacccacctcagcctcccaaagtgctgggattacaggcatgagccactgtgcccagcccccagttaggatctgtcactgcctgccccactccagcaccgccagggcatcaaacctctggaag

SEQ ID NO: 62130 - DNA, 518 bp, Homo sapiens
ggggcagcttggcttgtaggcaggcagccctaaagagaaagcccagaggagctgagctatttcagtacttttctatatcaccartcagattagtctctccttatcttgtggtgtcttagcctgctcaggctgctataacaaaataccattaaattgggttgcttataaacaacggaaattcatttcacactgttctggaggctgggaagtccaagatcaaggcactagcagactcggtgtttggtaaaggcccgtttgctggtctacagatggtgacttctggctgagccatcacatggtggaaggggtgaaaaaaagaagtcccttgagcctattctaataagagcattaatctcattcatgtgggctttgccctcatgacctaatcaccttcccaaaggtcccatctcctaatatcattgccttagggtcaggactttaacagggtttagagttttagactcgtttggaccatagcatttgggaaaaaatgaagaaggggattataagaaagggca

SEQ ID NO: 62131 - DNA, 518 bp, Homo sapiens
ggggcagcttggcttgtaggcaggcagccctaaagagaaagcccagaggagctgagctatttcagtacttttctatatcaccaatcagattagtctctccttatcttgtggtgtcttagcctgctcaggctgctataacaaaataccattaaattgggttgcttataaacaacggaaattcatttcacactgttctggaggctgggaagtccaagatcaaggcactagcagaytcggtgtttggtaaaggcccgtttgctggtctacagatggtgacttctggctgagccatcacatggtggaaggggtgaaaaaaagaagtcccttgagcctattctaataagagcattaatctcattcatgtgggctttgccctcatgacctaatcaccttcccaaaggtcccatctcctaatatcattgccttagggtcaggactttaacagggtttagagttttagactcgtttggaccatagcatttgggaaaaaatgaagaaggggattataagaaagggca

SEQ ID NO: 62132 - DNA, 518 bp, Homo sapiens
ggggcagcttggcttgtaggcaggcagccctaaagagaaagcccagaggagctgagctatttcagtacttttctatatcaccaatcagattagtctctccttatcttgtggtgtcttagcctgctcaggctgctataacaaaataccattaaattgggttgcttataaacaacggaaattcatttcacactgttctggaggctgggaagtccaagatcaaggcactagcagactcggtgtttggtaaaggcccgtttgctggtctacagatggtgacttctggctgagccatcacatggtggaaggggtgaaaaaaagaagtcccttgagcctattctaataagagcattaatctcattcatgtgggctttgccctcatgacctaatcaccttcccaaaggtcccatctcctaatatcattgccttagggtcagractttaacagggtttagagttttagactcgtttggaccatagcatttgggaaaaaatgaagaaggggattataagaaagggca

SEQ ID NO: 62133 - DNA, 518 bp, Homo sapiens
ggggcagcttggcttgtaggcaggcagccctaaagagaaagcccagaggagctgagctatttcagtacttttctatatcaccaatcagattagtctctccttatcttgtggtgtcttagcctgctcaggctgctataacaaaataccattaaattgggttgcttataaacaacggaaattcatttcacactgttctggaggctgggaagtccaagatcaaggcactagcagactcggtgtttggtaaaggcccgtttgctggtctacagatggtgacttctggctgagccatcacatggtggaaggggtgaaaaaaagaagtcccttgagcctattctaataagagcattaatctcattcatgtgggctttgccctcatgacctaatcaccttcccaaaggtcccatctcctaatatcattgccttagggtcaggactttaacagggtttrgagttttagactcgtttggaccatagcatttgggaaaaaatgaagaaggggattataagaaagggca

SEQ ID NO: 62134 - DNA, 326 bp, Homo sapiens
tccccaaggggcgtcccccgccccctgatgccccgccctcctcacgactcaagttcctcccacttagctcggtgctaggggcgcatttccccggcatgcctctgctcctttgcgcacgcgcgccgcttcccagtggcargcgcgggcaggaccgcgttgcgtcatcggggcgcgcgcctcagagagagctgtggttgccggaagttgagcgtcggtaagtgagccgcggcgggcgagggtgtagtggggtcttgctgggccggttttggaggcctggagtcaaggggcgagctcgccagggagggcgagggtcacagcaagtctca

SEQ ID NO: 62135 - DNA, 763 bp, Homo sapiens
aatgggaggcgggtttgccctaagcagttcccaacttgacttttccctttaccttaagtgattttggggccccaagttattttcctttcacagcctactttcttccttccagaagtgactgtggacaattccacagggtttggacttgatcagggcagaaggtgaagctgcaaggtattagatgtgggaatggagaaaaatacaggctggagctgtgggtttgagtgttgtcctcataggaggtgatggctgaggggtaggtaagtgagaggatgagatccccgaggccgacagcacagagtgacaggagcatagggcaggactttgggtcacccaaggagacagtgatgcttttgaagaagtcagaggaggccccatcagcaatcagaggattgctctgattggcacctcagagctggaggacatcaaaaaataccgctgtaagaaagagacctggaaaagtctttagagattgtctatcccaccctacccatttgacacatgagaagatggaggccaagagatcactgagaaaataaatggtagagcttgggcaaaatcagtgctgcccaaaatggtgtttttccaacaaagacatttaaaaggttccttccacaaggatcaaacaccttggggttttgatttttatcttaaaaarttatataaatttagccttctacaggccaggcacggtggctcacacctataatcccagcactttgggaggctgaggtgggtggatcatgaggtcaggagatcaaaa

SEQ ID NO: 62136 - DNA, 544 bp, Homo sapiens
caaggctgatggctttgagggaagcccagagcacagaaagctgtgaagcaggctcaagctgcagttcaggyagccctgtcatttgtaccacatgatcatccagagcttatgttactgaaagtttctaggatggacaagatgccacatggaatttatcacgagcttcaaatggagacccacaatagagttttctagagtcctggagcaaggctgtgccaaccacagcatgaatttgtacactcctctaaaaagcatgttactaggtcttggtaaaaatggagcattgtgagatggtggaaaggaagacccagtagcaatttattgtgagatggaaatgtcacatccgggacagggcccaattatgctgcacaaccagttcactcaccttcatgtcatccatcagttgcaccagggcctctccctcagctcacactcagggctacataagacagaggtgatctttatggccaactgagaaaggcaaacggtgcttcttcaaaattaaaatgaactaatacatagaaagtgcttaacacagagatag

SEQ ID NO: 62137 - DNA, 544 bp, Homo sapiens
caaggctgatggctttgagggaagcccagagcacagaaagctgtgaagcaggctcaagctgcagttcaggtagccctgtcatttgtaccacatgatcatccagagcttatgttactgaaagtttctaggatggacaagatgccacatggaatttatcacgagcttcaaatggagamccacaatagagttttctagagtcctggagcaaggctgtgccaaccacagcatgaatttgtacactcctctaaaaagcatgttactaggtcttggtaaaaatggagcattgtgagatggtggaaaggaagacccagtagcaatttattgtgagatggaaatgtcacatccgggacagggcccaattatgctgcacaaccagttcactcaccttcatgtcatccatcagttgcaccagggcctctccctcagctcacactcagggctacataagacagaggtgatctttatggccaactgagaaaggcaaacggtgcttcttcaaaattaaaatgaactaatacatagaaagtgcttaacacagagatag

SEQ ID NO: 62138 - DNA, 561 bp, Homo sapiens
tttttttccataaaatgaataaaaaagtagcatactattttaattttttttttttcagtatatccttacagttctgctcataaaatggcagggccccagccaccattttgcatacgatgatgccaaggctccaaacgttgatggcagggcattggtacccatggcccaagaagagttctgggcctgcataagggagagtcccatcaaacgttcccttttcagtgttgtctctctttgcaaatgttgaactaaacccatagttggctattttgatgttacgttctttgtcaaagaagatattaagctttgttctgaccccaggagagctcttcccacctgtctttttttctgtttctctctggcagacttgctggcctccagtgtagcccgcacctcccaggctctccgtcgcctcccagttgcctttcagcacaacctccactgttctggagagtgtgcttagccttggacttctccgagctctgttgcacatgaagtcagttccttcgggagcaactcgcaccttytgttttctgtctgctgctttctcaggcaaactct

SEQ ID NO: 62139 - DNA, 1014 bp, Homo sapiens
aaataatgtgttaatgatacaagtggttatgtctttgaggttgtagtgggtacagtaaagcagttgaaagtttttctaatttgaattttctgaagtgatcattgatctgctataattaactttataggagggaaaaaagggacaagaaatctggtgatatgacttgtacttatgcaatatgtatctgaatggtaggtactatttyagagtaccttctttatagcaggtactatttcagggtaataatgataaataataattctagtagaaacaacaataggacaaaaaaaaacccctctgttttcaaagagtagaattacatatttagagtaatgaacacagcctggttagggcatactacaaggaaagattctgaaagaaggtagatcttaactaaatcccaaaggtaagtagatgttaaccagacaaagctgacctaaagtggtttgtggatgacatactaggaagagagaagcatgttaaaagtccaaaataaaattgcttgatagcgtttaaatacttgaatgttgcaagagaaatactattgctttgaaaacttgtgtgaatcttgaattaatgtgatggaaaattgtcttccaagcaatgtggtagccattccaaaaaactttctggcttttaaaccaagaacatcgggttctggccctaatgcctccaataactcactgggaactaccatattgtttctctgggttggaaagtcatcacatattaatggagaaaactagtctttcttgggtcagacaaatctcagatgtttatcttcctaattacaaaggatgggtttctcccaggctatggattgtcatttttgccatgggactagaaatagatagtgacaaggtatttttgctggatgagaaaatagtgaaaaatcatgtctcagcgattcctcctcatctcttctgcctgccatcattgcacttgataaatttgagagggtatgaaaagatctgaaggtgaagtgaactctttctttacttgcctatgtagaaa

SEQ ID NO: 62140 - DNA, 1014 bp, Homo sapiens
aaataatgtgttaatgatacaagtggttatgtctttgaggttgtagtgggtacagtaaagcagttgaaagtttttctaatttgaattttctgaagtgatcattgatctgctataattaactttataggagggaaaaaagggacaagaaatctggtgatatgacttgtacttatgcaatatgtatctgaatggtaggtactatttcagagtaccttctttatagcaggtactatttcagggtaataatgataaataataattctagtagaaacaacaataggacaaaaaaaaacccctctgttttcaaagagtagaattacatatttagagtaatgaacacagcctggttagggcatactacaaggaaagattctgaaagaaggtagatcttaactaaatcccaaaggtaagtagatgttaaccagacaaagctgacctaaagtggtttgtggatgacatactaggaagagagaagcatgttaaaagtccaaaataaaattgcttgatagcrtttaaatacttgaatgttgcaagagaaatactattgctttgaaaacttgtgtgaatcttgaattaatgtgatggaaaattgtcttccaagcaatgtggtagccattccaaaaaactttctggcttttaaaccaagaacatcgggttctggccctaatgcctccaataactcactgggaactaccatattgtttctctgggttggaaagtcatcacatattaatggagaaaactagtctttcttgggtcagacaaatctcagatgtttatcttcctaattacaaaggatgggtttctcccaggctatggattgtcatttttgccatgggactagaaatagatagtgacaaggtatttttgctggatgagaaaatagtgaaaaatcatgtctcagcgattcctcctcatctcttctgcctgccatcattgcacttgataaatttgagagggtatgaaaagatctgaaggtgaagtgaactctttctttacttgcctatgtagaaa

SEQ ID NO: 62141 - DNA, 2353 bp, Homo sapiens
tgtatgctttgttttctgcagaatctccacctccatacctacagtagcacctgactccaaaaaggtgctcaataaatagttgttaagtaactgaatgtgttaggtagactagaccaacatgtactagtcaaacatacctgcggtgctttccataaaccgaacactgtgcttacaaaggatgccctctctyctcgccgcaggtaatcattaataataacaataataataaaagcccagatcactggaagaaggaaatcacatgagatctgccaaccctacctctggaggtgatgagcattggtacctaaaggacaaatacgaaattccggctccatcagctgctccccaccactgctaaagggcctcacgatacctgaatgctggagatccctctgccatacctgacatcaagccattacattctctgaaagaagacctgattatgccgtaggcaacaacctacaatttctcatctgctaagtgagattccgtgggattttaattctcccgttcactttagaggctcccgtcccatctttgaagtatttcccctcctcctggctctgccacttctgtcaacactacaaggcaggagatgctatgacattatggttgccatggatgaatctaatggttatattgatttcttggttacatctgctccaaaagagccacggagaatcaggccccaagggtctggaaagataaaagaagagaaaaaaataaatggactttttttttccttcagggaaataattactataaacaaattaacgtgtgagcccatgtttagaagcgtttattacaagagaccatgaaatacaagcacggcagtacagggcacacactgtgcaacccgggaagggtcaaacaccaaaatcgcctaaaaagaacctcgaagttagcttcaaggcaggatgattaaaaagccagccagattgtacatgtcatgaaaaaaagatgtttactagctttatgaaattaaaatccctaagctgcaatttcctcagttgtaacatggaactaataatattaatacctaccttgcagaatgatcatgaaaaacaaatgaaacaacaagtgcgaaaataccaagcaaagtctctgccacacattacagtttcaattaatattatttttgcttcacagggaaaagaaaagtggatagtcagaaaatatgcatggctttaagcacgacaattaataagaaggagtaaaaactgggacaacctctgaacaacctcctataaatagaaacaaaaccaaaatgtcgataaaaaccacgcgcagttcctccatgacatgagcaggcaataaccaagagggtccctttcaggaggccatatgacatggaacccagacaatgactttccaaaccccaacatctgcacctctttccacagtcagaccagcaccagcacagaaggttctaccctggccagccttgggcagagaaaccttcccaccttgccactcccaagagacaaacaaatcaggcaattaaaaagggtgagagagaaagggaacagattaatttttagagccagtttgcacatcaaaaccagacctcagctaccaaagaaatcagacaaattcatgaaataagagtctgagggtcggttttagcgcaatgtcaccatccacaccgttaggctagtcgggcaaacattttgactccaaatccacatatctaagacattggccagtgggggacgtccccttattccctctttccttggttactaggcactaatctaagcactgtgatatcagaagatgatgagacagatactctgcagtatgtcctcaaatgtggcaactgttgagaagtcttggataacgctagggattgtccaagaaacacagatgaaatggtgcctcttgcattgttcagggaaccccccaacccccagacattttaaacttggtcaggctagaccacggagaaccttctggttctgaaggtggcaaaatctagatacactatttatttatttatttattttatttatttatttttgagacggagtctctctctgtcgcccaggctggagtgcagtggcgtgatctcagctcaccacaagctctgcctcctgggttcaccccattctcctgcttcagcctcccaaatagctgggactacaggcacccgccaccaggcccggctaatttttgtatttttagtagatgcagggtttcaccgtgttagccaggatggtctcgatctcctgacctcgtgatccgcccacctcggcctcccaaagtgctgggattacaggcatgagccactgcgcccggccaatacactgattaaaagtagccctcccacaactagggcctttagatgatatgc

SEQ ID NO: 62142 - DNA, 2353 bp, Homo sapiens
tgtatgctttgttttctgcagaatctccacctccatacctacagtagcacctgactccaaaaaggtgctcaataaatagttgttaagtaactgaatgtgttaggtagactagaccaacatgtactagtcaaacatacctgcggtgctttccataaaccgaacactgtgcttacaaaggatgccctctctcctcrccgcaggtaatcattaataataacaataataataaaagcccagatcactggaagaaggaaatcacatgagatctgccaaccctacctctggaggtgatgagcattggtacctaaaggacaaatacgaaattccggctccatcagctgctccccaccactgctaaagggcctcacgatacctgaatgctggagatccctctgccatacctgacatcaagccattacattctctgaaagaagacctgattatgccgtaggcaacaacctacaatttctcatctgctaagtgagattccgtgggattttaattctcccgttcactttagaggctcccgtcccatctttgaagtatttcccctcctcctggctctgccacttctgtcaacactacaaggcaggagatgctatgacattatggttgccatggatgaatctaatggttatattgatttcttggttacatctgctccaaaagagccacggagaatcaggccccaagggtctggaaagataaaagaagagaaaaaaataaatggactttttttttccttcagggaaataattactataaacaaattaacgtgtgagcccatgtttagaagcgtttattacaagagaccatgaaatacaagcacggcagtacagggcacacactgtgcaacccgggaagggtcaaacaccaaaatcgcctaaaaagaacctcgaagttagcttcaaggcaggatgattaaaaagccagccagattgtacatgtcatgaaaaaaagatgtttactagctttatgaaattaaaatccctaagctgcaatttcctcagttgtaacatggaactaataatattaatacctaccttgcagaatgatcatgaaaaacaaatgaaacaacaagtgcgaaaataccaagcaaagtctctgccacacattacagtttcaattaatattatttttgcttcacagggaaaagaaaagtggatagtcagaaaatatgcatggctttaagcacgacaattaataagaaggagtaaaaactgggacaacctctgaacaacctcctataaatagaaacaaaaccaaaatgtcgataaaaaccacgcgcagttcctccatgacatgagcaggcaataaccaagagggtccctttcaggaggccatatgacatggaacccagacaatgactttccaaaccccaacatctgcacctctttccacagtcagaccagcaccagcacagaaggttctaccctggccagccttgggcagagaaaccttcccaccttgccactcccaagagacaaacaaatcaggcaattaaaaagggtgagagagaaagggaacagattaatttttagagccagtttgcacatcaaaaccagacctcagctaccaaagaaatcagacaaattcatgaaataagagtctgagggtcggttttagcgcaatgtcaccatccacaccgttaggctagtcgggcaaacattttgactccaaatccacatatctaagacattggccagtgggggacgtccccttattccctctttccttggttactaggcactaatctaagcactgtgatatcagaagatgatgagacagatactctgcagtatgtcctcaaatgtggcaactgttgagaagtcttggataacgctagggattgtccaagaaacacagatgaaatggtgcctcttgcattgttcagggaaccccccaacccccagacattttaaacttggtcaggctagaccacggagaaccttctggttctgaaggtggcaaaatctagatacactatttatttatttatttattttatttatttatttttgagacggagtctctctctgtcgcccaggctggagtgcagtggcgtgatctcagctcaccacaagctctgcctcctgggttcaccccattctcctgcttcagcctcccaaatagctgggactacaggcacccgccaccaggcccggctaatttttgtatttttagtagatgcagggtttcaccgtgttagccaggatggtctcgatctcctgacctcgtgatccgcccacctcggcctcccaaagtgctgggattacaggcatgagccactgcgcccggccaatacactgattaaaagtagccctcccacaactagggcctttagatgatatgc

SEQ ID NO: 62143 - DNA, 2353 bp, Homo sapiens
tgtatgctttgttttctgcagaatctccacctccatacctacagtagcacctgactccaaaaaggtgctcaataaatagttgttaagtaactgaatgtgttaggtagactagaccaacatgtactagtcaaacatacctgcggtgctttccataaaccgaacactgtgcttacaaaggatgccctctctcctcgccgcaggtaatcattaataataacaataataataaaagcccagatcactggaagaaggaaatcacatgagatctgccaaccctacctctggaggtgatgagcattggtacctaaaggacaaatacgaaattccggctccatcagctgctccccaccactgctaaagggcctcacgatacctgaatgctggagatccctctgccatacctgacatcaagccattacattctctgaaagaagacctgattatgccgtaggcaacaacctacaatttctcatctgctaagtgagattccgtgggattttaattctcccgttcactttagaggctcccgtcccatctttgaagtatttcccctcctcctggctctgccacttctgtcaacactacaaggcaggagatgctatgacattatggttgccatggatgaatctaatggttatattgatttcttggttacatctgctccaaaagagccacggagaatcaggccccragggtctggaaagataaaagaagagaaaaaaataaatggactttttttttccttcagggaaataattactataaacaaattaacgtgtgagcccatgtttagaagcgtttattacaagagaccatgaaatacaagcacggcagtacagggcacacactgtgcaacccgggaagggtcaaacaccaaaatcgcctaaaaagaacctcgaagttagcttcaaggcaggatgattaaaaagccagccagattgtacatgtcatgaaaaaaagatgtttactagctttatgaaattaaaatccctaagctgcaatttcctcagttgtaacatggaactaataatattaatacctaccttgcagaatgatcatgaaaaacaaatgaaacaacaagtgcgaaaataccaagcaaagtctctgccacacattacagtttcaattaatattatttttgcttcacagggaaaagaaaagtggatagtcagaaaatatgcatggctttaagcacgacaattaataagaaggagtaaaaactgggacaacctctgaacaacctcctataaatagaaacaaaaccaaaatgtcgataaaaaccacgcgcagttcctccatgacatgagcaggcaataaccaagagggtccctttcaggaggccatatgacatggaacccagacaatgactttccaaaccccaacatctgcacctctttccacagtcagaccagcaccagcacagaaggttctaccctggccagccttgggcagagaaaccttcccaccttgccactcccaagagacaaacaaatcaggcaattaaaaagggtgagagagaaagggaacagattaatttttagagccagtttgcacatcaaaaccagacctcagctaccaaagaaatcagacaaattcatgaaataagagtctgagggtcggttttagcgcaatgtcaccatccacaccgttaggctagtcgggcaaacattttgactccaaatccacatatctaagacattggccagtgggggacgtccccttattccctctttccttggttactaggcactaatctaagcactgtgatatcagaagatgatgagacagatactctgcagtatgtcctcaaatgtggcaactgttgagaagtcttggataacgctagggattgtccaagaaacacagatgaaatggtgcctcttgcattgttcagggaaccccccaacccccagacattttaaacttggtcaggctagaccacggagaaccttctggttctgaaggtggcaaaatctagatacactatttatttatttatttattttatttatttatttttgagacggagtctctctctgtcgcccaggctggagtgcagtggcgtgatctcagctcaccacaagctctgcctcctgggttcaccccattctcctgcttcagcctcccaaatagctgggactacaggcacccgccaccaggcccggctaatttttgtatttttagtagatgcagggtttcaccgtgttagccaggatggtctcgatctcctgacctcgtgatccgcccacctcggcctcccaaagtgctgggattacaggcatgagccactgcgcccggccaatacactgattaaaagtagccctcccacaactagggcctttagatgatatgc

SEQ ID NO: 62144 - DNA, 2353 bp, Homo sapiens
tgtatgctttgttttctgcagaatctccacctccatacctacagtagcacctgactccaaaaaggtgctcaataaatagttgttaagtaactgaatgtgttaggtagactagaccaacatgtactagtcaaacatacctgcggtgctttccataaaccgaacactgtgcttacaaaggatgccctctctcctcgccgcaggtaatcattaataataacaataataataaaagcccagatcactggaagaaggaaatcacatgagatctgccaaccctacctctggaggtgatgagcattggtacctaaaggacaaatacgaaattccggctccatcagctgctccccaccactgctaaagggcctcacgatacctgaatgctggagatccctctgccatacctgacatcaagccattacattctctgaaagaagacctgattatgccgtaggcaacaacctacaatttctcatctgctaagtgagattccgtgggattttaattctcccgttcactttagaggctcccgtcccatctttgaagtatttcccctcctcctggctctgccacttctgtcaacactacaaggcaggagatgctatgacattatggttgccatggatgaatctaatggttatattgatttcttggttacatctgctccaaaagagccacggagaatcaggccccaagggtctggaaagataaaagaagagaaaaaaataaatggactttttttttccttcagggaaataattactataaacaaattaacgtgtgagcccatgtttagaagcgtttattacaagagaccatgaaatacaagcacggcagtacagggcacacactgtgcaacccgggaagggtcaaacaccaaaatcgcctaaaaagaacctcgaagttagcttcaaggcaggatgattaaaaagccagccagattgtacatgtcatgaaaaaaagatgtttactagctttatgaaattaaaatccctaagctgcaatttcctcagttgtaacatggaactaataatattaatacctaccttgcagaatgatcatgaaaaacaaatgaaacaacaagtgygaaaataccaagcaaagtctctgccacacattacagtttcaattaatattatttttgcttcacagggaaaagaaaagtggatagtcagaaaatatgcatggctttaagcacgacaattaataagaaggagtaaaaactgggacaacctctgaacaacctcctataaatagaaacaaaaccaaaatgtcgataaaaaccacgcgcagttcctccatgacatgagcaggcaataaccaagagggtccctttcaggaggccatatgacatggaacccagacaatgactttccaaaccccaacatctgcacctctttccacagtcagaccagcaccagcacagaaggttctaccctggccagccttgggcagagaaaccttcccaccttgccactcccaagagacaaacaaatcaggcaattaaaaagggtgagagagaaagggaacagattaatttttagagccagtttgcacatcaaaaccagacctcagctaccaaagaaatcagacaaattcatgaaataagagtctgagggtcggttttagcgcaatgtcaccatccacaccgttaggctagtcgggcaaacattttgactccaaatccacatatctaagacattggccagtgggggacgtccccttattccctctttccttggttactaggcactaatctaagcactgtgatatcagaagatgatgagacagatactctgcagtatgtcctcaaatgtggcaactgttgagaagtcttggataacgctagggattgtccaagaaacacagatgaaatggtgcctcttgcattgttcagggaaccccccaacccccagacattttaaacttggtcaggctagaccacggagaaccttctggttctgaaggtggcaaaatctagatacactatttatttatttatttattttatttatttatttttgagacggagtctctctctgtcgcccaggctggagtgcagtggcgtgatctcagctcaccacaagctctgcctcctgggttcaccccattctcctgcttcagcctcccaaatagctgggactacaggcacccgccaccaggcccggctaatttttgtatttttagtagatgcagggtttcaccgtgttagccaggatggtctcgatctcctgacctcgtgatccgcccacctcggcctcccaaagtgctgggattacaggcatgagccactgcgcccggccaatacactgattaaaagtagccctcccacaactagggcctttagatgatatgc

SEQ ID NO: 62145 - DNA, 2353 bp, Homo sapiens
tgtatgctttgttttctgcagaatctccacctccatacctacagtagcacctgactccaaaaaggtgctcaataaatagttgttaagtaactgaatgtgttaggtagactagaccaacatgtactagtcaaacatacctgcggtgctttccataaaccgaacactgtgcttacaaaggatgccctctctcctcgccgcaggtaatcattaataataacaataataataaaagcccagatcactggaagaaggaaatcacatgagatctgccaaccctacctctggaggtgatgagcattggtacctaaaggacaaatacgaaattccggctccatcagctgctccccaccactgctaaagggcctcacgatacctgaatgctggagatccctctgccatacctgacatcaagccattacattctctgaaagaagacctgattatgccgtaggcaacaacctacaatttctcatctgctaagtgagattccgtgggattttaattctcccgttcactttagaggctcccgtcccatctttgaagtatttcccctcctcctggctctgccacttctgtcaacactacaaggcaggagatgctatgacattatggttgccatggatgaatctaatggttatattgatttcttggttacatctgctccaaaagagccacggagaatcaggccccaagggtctggaaagataaaagaagagaaaaaaataaatggactttttttttccttcagggaaataattactataaacaaattaacgtgtgagcccatgtttagaagcgtttattacaagagaccatgaaatacaagcacggcagtacagggcacacactgtgcaacccgggaagggtcaaacaccaaaatcgcctaaaaagaacctcgaagttagcttcaaggcaggatgattaaaaagccagccagattgtacatgtcatgaaaaaaagatgtttactagctttatgaaattaaaatccctaagctgcaatttcctcagttgtaacatggaactaataatattaatacctaccttgcagaatgatcatgaaaaacaaatgaaacaacaagtgcgaaaataccaagcaaagtctctgccacacattacagtttcaattaatattatttttgcttcacagggaaaagaaaagtggatagtcagaaaatatgcatggctttaagcacgacaattaataagaaggagtaaaaactgggacaacctctgaacaacctcctataaatagaaacaaaaccaaaatgtcgataaaaaccacgcgcagttcctccatgacatgagcaggcaataaccaagagggtccctttcaggaggccatatgacatggaacccagacaatgactttccaaaccccaacatctgcacctctttccacagtcagaccagcaccagcacagaaggttctaccctggccagccttgggcagagaaaccttcccaccttgccactcccaagagacaaacaaatcaggcaattaaaaagggtgagagagaaagggaacagattaatttttagagccagtttgcacatcaaaascagacctcagctaccaaagaaatcagacaaattcatgaaataagagtctgagggtcggttttagcgcaatgtcaccatccacaccgttaggctagtcgggcaaacattttgactccaaatccacatatctaagacattggccagtgggggacgtccccttattccctctttccttggttactaggcactaatctaagcactgtgatatcagaagatgatgagacagatactctgcagtatgtcctcaaatgtggcaactgttgagaagtcttggataacgctagggattgtccaagaaacacagatgaaatggtgcctcttgcattgttcagggaaccccccaacccccagacattttaaacttggtcaggctagaccacggagaaccttctggttctgaaggtggcaaaatctagatacactatttatttatttatttattttatttatttatttttgagacggagtctctctctgtcgcccaggctggagtgcagtggcgtgatctcagctcaccacaagctctgcctcctgggttcaccccattctcctgcttcagcctcccaaatagctgggactacaggcacccgccaccaggcccggctaatttttgtatttttagtagatgcagggtttcaccgtgttagccaggatggtctcgatctcctgacctcgtgatccgcccacctcggcctcccaaagtgctgggattacaggcatgagccactgcgcccggccaatacactgattaaaagtagccctcccacaactagggcctttagatgatatgc

SEQ ID NO: 62146 - DNA, 595 bp, Homo sapiens
tgacttcaagtagcactttccacacagctgctcttcccagggagaggtctcagacacaggaaggaccctggagtccctactcagaggacttccttttattcgttatttttaaattttgtttatttatttttctgctgagacagagtctctgtcacccagactagagtgcagtggtgcaatctcagcttactgcaacctccacctcccaggttcaagcgattttcctgcctcagcctccccagtagctgagatttcaggtgcccaccactgtgcctggctaatttttatatctttagtagagacagggtttccccacgttggccaggctggtctcaaactcctggcctcaagtaatccatatgcctccgccttctaaagcgctggggttacaacatgagccaccgtgcctggcagaggcctttcttttaaataatgagatgttggtggaggctgtccttctcacaaactgggctttagtcaatggctctgagaaaggagagaactatactttttgccctggkagtcttctatcttttctttgaagaaaaattcctctccttcccagtcattccagcccttgccaaggatccttgga

SEQ ID NO: 62147 - DNA, 669 bp, Homo sapiens
atgccrctacaactggcttatttttttactttttgtacagatggggtcttgctttgttgcacaggctggtcttgaacacctggtctcaagctatccttccaccttggcctctcaaaatgttggaattacaggcatgagccaccacgcctggcttcatcttcgtagctctttggctctcgttttcctcctatacacacacgatcgatccatccacctaacagatgtgtacggtggccccggcatgtcgcctggccatgcagatacaatggggagccagtgggcatctcctgaccttagtctggtcctgagggtgagtctagctggggagccaacaaggaaagagacgatcttcaggccatgcgatgggagggaggatgggggaagcctaaggagctaaggcaggaaacacgtggaaggagcaccttacccagactcggggcaggatggagcctaacggggacctcggaggtgcctttatttcctcccagcctcacaagctttccaccaaaggcaccacaaataaacacactagcatgttatccctgcagcataccatctcaacgccacgtcctggccttctcttctgccagcgagctccgccagtccccttttctgtagggccacggtcaagggctctggaaaggtttcccaaaagaagggaatctaaga

SEQ ID NO: 62148 - DNA, 894 bp, Homo sapiens
gaatgacttaaggctgagcatatagagtattctgtatgcacataaccccacctccaggggaagttagttttgagtaacctatatttctgtttatatttactaaaatgacgaatttaagagattcatgaattatggatgttaggatagattaatggagagggatatagtagagtcacaaaaatatgcatataagactgattattttgagtcacaatggattgtaaagttccaaaagtgtgggaagcagcaactttgcctgttcagaatttgagagaagtaggtattactactgtttattcacaaacccaattgtcacttcattcaacaaatactttctgggttcctgcttgtgtaccaggcaccagggtaggaactggagatgcaatagtgaatccracaaaatctttaaccctcatagagcattctattttttgtgcgaaagcagagagtaaaccttgagtatgacaagtcttggataaatgctctggtatttggggaggatggatatcattagatggagtgatctaggaagcactcttcaagaagtacatgtgagtggagctctgaatgatgcaggaggaagctttgcagctctctagagagagagattccagtcagaagctaacagccaagactctgaggcaggagcgtgcttggaatatgtgagaaatagcaaggaggccagtatggctgaaccataatgaacaaggtgaacagtggttgtagagctttgaggtgtgttaagggtttgggattttgtttttggtatgatcattggccatggaaggatttcaagcaggaaagagtgacatgctatgtgggaaatagactgtagggaggcaagagtggaaggctgttgcagcaacccatatgagattttttggtggctttggc

SEQ ID NO: 62149 - DNA, 744 bp, Homo sapiens
tttaagagctaaaaccctaggaagagaatgggtagatatgaaaaaaataatttctatagaatgagataatcaaaagcacagaatgcattgacaggtaatatgaatgtttagtgctgtgtaataggatttgtattccgaaatgcttgacaaaggtgtttgatatttgaacagagcttgaagaaaggtttgcctgagggatcaagggagaagaagtactacagatacaggaaacattacaaataatctcgtgtgtatgtgtgtgtgtgtgtgtgtacagaaggtcctacatacctagacagagtgaaagagttaaaaaagasaacttttttttttaaaaagacattaatctcttgttaaatttaaaacctatcagtctcatggattcattataatgggcataatgtttccttgtgcaactatctccctatgaaacaaggttggtctctattttctcctatgatcaacacatattgagtgtctaagatgtcagatgtcttgtcaagtgtttggttacagagataagtaagacattgtcttcagtcattctgccatccagtggtgagaacaataaataattgatatagaagagtatatttttcaatattgttttacaattgcaagagagagaatttcagctcatattagccttagcaaaacaaaaacaaaaaacaaaacaaacaaacaaaaacacagaaagtgtaagtcacatgaaagggcagagtgagggtattttcagagaaaact

SEQ ID NO: 62150 - DNA, 744 bp, Homo sapiens
tttaagagctaaaaccctaggaagagaatgggtagatatgaaaaaaataatttctatagaatgagataatcaaaagcacagaatgcattgacaggtaatatgaatgtttagtgctgtgtaataggatttgtattccgaaatgcttgacaaaggtgtttgatatttgaacagagcttgaagaaaggtttgcctgagggatcaagggagaagaagtactacagatacaggaaacattacaaataatctcgtgtgtatgtgtgtgtgtgtgtgtgtacagaaggtcctacatacctagacagagtgaaagagttaaaaaagagaactttttttttwaaaaagacattaatctcttgttaaatttaaaacctatcagtctcatggattcattataatgggcataatgtttccttgtgcaactatctccctatgaaacaaggttggtctctattttctcctatgatcaacacatattgagtgtctaagatgtcagatgtcttgtcaagtgtttggttacagagataagtaagacattgtcttcagtcattctgccatccagtggtgagaacaataaataattgatatagaagagtatatttttcaatattgttttacaattgcaagagagagaatttcagctcatattagccttagcaaaacaaaaacaaaaaacaaaacaaacaaacaaaaacacagaaagtgtaagtcacatgaaagggcagagtgagggtattttcagagaaaact

SEQ ID NO: 62151 - DNA, 705 bp, Homo sapiens
ttttttttttttttttttttttttttgagagtcatcttaattctctctaactgccacggaacaagactataggaagaaaggctgatactttcatcaagctccagtttggaaagcccagggaatatctccgattagctgaatttgagtacatgcacagatcatatttatcaaccactgygtccaagggagatgctttctcctggatcaaaagcctaccacacagatgctggaagaagcttcagaatttttccatattaaagggattcaggcatagatccacttagaatcatggttagaaagagactggcttgggagaggcgaggttaagggaagtggctttgcaactcagcattaagattatgtaagacttaagcaagggaggtggggcaggatgatgagatttaggaggttagggcagtttgtacagaagtacctagaaatatacaccatagtagctccaataattgatcatagaccgggaataagatgaaaaaactgcacccttgaaaaaaatgagtaatactataataaagttagtagtgcactattaatgtgcctctcccaaatgcagactgaagctaagacagtattattaatgatatagtttattaataatcaacatttgaaatatgcatattctaaatactttacacaataaactcttcaagttttaattatatttaatggcaatgtattgattttaaa

SEQ ID NO: 62152 - DNA, 699 bp, Homo sapiens
ttttgggaaaatagtattatcatctttgttttaaagttaaactataatctaaattcttcctatagttagcttggcctgtgcccaggaatgagsaaggaaagcttgcaatgttagaagcaagatggagtcaactgtgttaaactcctctcactgtcataatttttgcaaagggttttgagactagcatttcctggacatgcaatcaacttatttatctctggatcttatgatataggacagaacctgaaatacatttatataataaatacatgtctacaaattcacaaatgaacaaatgaatcagttttgttctgatttatatgctttagagaaaaagatatttttcattgagataggttcttctccctttccctccactactaacacctccactctagctggtatacagaagggtcaggacagaaattatgagaaataatactatagttcctaatctagaagaataagttaaaatatctacattagaaggctttcctgagagctttgagttagtaaaatcatcagtgagtacccacagtttcctatgatggacaaacagaatgaagtaactgacaccttcatccaagcagagactgaattggtagaacttaatttgcggttttgtaaagctatgtctacctctagtctccctaaccctggagcatagcactttaggtctttcaactgaaaggattacta

SEQ ID NO: 62153 - DNA, 753 bp, Homo sapiens
tacagcactttttatttcttttcaacctgtattacaatttttcttcatgctcctcaatccttcactttatttttgtaatgagtttgtttcttacctttcatcgcaacgttaccacttttgtttcatctcatcctattgagaggtgacagcgtgctggcagccctcgcagcccttgctcactctcggtgcctccttggccttggcgtccactctggccacgcttgaggagcccttcagcctgctgctgccctgtgggagcccctctctgggctggccgagactggagccggctccctctgcttgcagggaggtgtggagggagaggcgcaggtgggaacccaggctgcgcatggcrctcacgggccagcatgaattccaggtgggtgtgggctcagcgggccacacactcagagtggccagccagctggtgccgccggccccaggcagtgaggggcttagcacctgggccagcagcggcagagggtgccccggtcccccagcagtgccagcccgctggcgctgcacttgaattctcgctgggccacagctgccccaccatggggcagggctcgggacctgcagcccaccatgccccagcctccgccccgccgtgggctcctgaacagccggaggctccccaacgagtgccgccccctgcttcatggtgcccaggcctgtcgaccacccaagggctgaggagtgcaggctcacggcgcgggactggtgggcagctccacctgcagccccggagcg

SEQ ID NO: 62154 - DNA, 1230 bp, Homo sapiens
tgcatcttaaagttaggttgaaaagaatccccatagaaaatatttcagaaatacactattccagaataacaaaacacaagaaaaaaaatctattgcagctgatagctctctaaaatgtatggatatagaaaattctaaaataaaattattttaaatgttatactaagcaaatcaaaatctgaactggtgtagtaggccaaagtgtgttcccaccctctacctgcaaatttgtaggtggaagccctaagcctccatatgactatattagagctatggttcttaagaaggtgattaaggttaaatgtcacaaaacgtggatcccttttaagaagacgaagagtaactaaggctatctatccaccatgtgaggacccagagagaaggcagccaactacaagccagcaattcagctctaactaaaaaacccagccatgctagtcaactgacccgacttcacatctagacttaggtcagactgatccaaaaactgatcttccagtctctagaactgtaagaaaattcatctctcttagtctataggtgttttgttatggcattacaarctgattaatatagatggcatatcagtttaggtcaaatcatgagaaaaaaattacatagtaatttgaaaaagagaagcttagtatcaaaattattaagtataatggaacattgggttaatgagtgattagaacataagaagaacgctaaagaatatagaatcaaagataaatggaacatccactaccagtaggattgagataaaacattcaaggaagagtctctgtaacccatggctgaggttcagatactgctgaagaaggcatggccatagctgactggatggtagagaagtaaatcactgtgttgctacactatgaaatgtgctgaaaatccactctctagggtaccagggaaggaccacggggtctttgctacagaagataataagatagatgctggaggaagacatgggctactcagtactgctgaccactgtgaaggatgaggggactagagaggccaggtgcaatacatgagccagggttgggaagaaatcaacacattctgtggaagcctgccaagtgagtaaaccgtttattcctacaatgtctcgttaggatactccacctaccaagattaacatagtgccaacagaaaagaaatatatgagggccatatatttattttcacaaagcagcaatacagatacatttgaagcagagaggc

SEQ ID NO: 62155 - DNA, 1230 bp, Homo sapiens
tgcatcttaaagttaggttgaaaagaatccccatagaaaatatttcagaaatacactattccagaataacaaaacacaagaaaaaaaatctattgcagctgatagctctctaaaatgtatggatatagaaaattctaaaataaaattattttaaatgttatactaagcaaatcaaaatctgaactggtgtagtaggccaaagtgtgttcccaccctctacctgcaaatttgtaggtggaagccctaagcctccatatgactatattagagctatggttcttaagaaggtgattaaggttaaatgtcacaaaacgtggatcccttttaagaagacgaagagtaactaaggctatctatccaccatgtgaggacccagagagaaggcagccaactacaagccagcaattcagctctaactaaaaaacccagccatgctagtcaactgacccgacttcacatctagacttaggtcagactgatccaaaaactgatcttccagtctctagaactgtaagaaaattcatctctcttagtctataggtgttttgttatggcattacaagctgaytaatatagatggcatatcagtttaggtcaaatcatgagaaaaaaattacatagtaatttgaaaaagagaagcttagtatcaaaattattaagtataatggaacattgggttaatgagtgattagaacataagaagaacgctaaagaatatagaatcaaagataaatggaacatccactaccagtaggattgagataaaacattcaaggaagagtctctgtaacccatggctgaggttcagatactgctgaagaaggcatggccatagctgactggatggtagagaagtaaatcactgtgttgctacactatgaaatgtgctgaaaatccactctctagggtaccagggaaggaccacggggtctttgctacagaagataataagatagatgctggaggaagacatgggctactcagtactgctgaccactgtgaaggatgaggggactagagaggccaggtgcaatacatgagccagggttgggaagaaatcaacacattctgtggaagcctgccaagtgagtaaaccgtttattcctacaatgtctcgttaggatactccacctaccaagattaacatagtgccaacagaaaagaaatatatgagggccatatatttattttcacaaagcagcaatacagatacatttgaagcagagaggc

SEQ ID NO: 62156 - DNA, 1159 bp, Homo sapiens
cctttccttacattascatgtgccctgtttcagatttaacatgtgaggtcattaagtaatacatgtcatacatcacttacacaaaaaagctagtttgcttataaaatatctccgtattaaactcttatacatagctgacactaatatttcccataggccatgttccataaatttataaattataagtttatttttatatatcccataaaaaatttgatgagaatgtttacaaggagttttgattatatcttttttctcttttttgtctcatttcactgacatcaccaagttaggaaggatggattatacgccgtctgctaacatcctgctaataaaatctgtcaaatattgttttaaagtagaaaaaataatccattcctctgtcttgcaaaatgcctattattttgtcatttagcagtaaaaatggaaatgtctcattacaaatcagtatttgtttattaaaaactgctaggggatgattttgaatggacttctctacaaatatacaggaaaataataaatactagtcattttctgtcaactgtatctcatatttgttttctgtacatattgttataaatatggatgaattattttttagatatttgtcaagaacagtgaagagtctgagactgcaccattcttacaggctgacaagttatcctgcctcagttacttgaatgctggcagacaacaaagagatgcttgggagaggaacaaaggatagcttcatactcactgcaatagcagtgaccggagtcagaaatcccaactttaagaaagccaaatatttgtgtggaaagaaacatgtctgccctttatttataaaggaaaaactctcattttcaagaatatttgctctactaacatccttggaaagacagttcagaacaaagactgttcacaagacaagcagaacagagagagacccattggttaatttttctcccaagaatattatggtgttctttgatttgtgtatgttaccacccttaaaaggacaatactataaacaagtttcaaagaaatagatctgcctatgtgtcaccataaaacaaatgatgtggcttcaattctaatgtctgctagcgtgaatttaagttatttcattatctcattattgtatttttttgcttcaatacagatttggcaggatgca

SEQ ID NO: 62157 - DNA, 909 bp, Homo sapiens
aaacagtattgtattttgatgttgcagttttgaatgcagtttatttcaaatattatatttaatgattattaagtttaaaattctacaataacaatttttcctgagtattaataaaaggatttaaaaaaagctatatgatgccataagtcactgctcaccaccttgccactatagggttgctccttaaaatacactttccaatgatttgtacaatgcaatttgaaatggttcatttgatgggttacacatttttctcctgggcaaccattgtataatrcgattctcaattgttctattgccaacaatattttattgagttgttgcttctggttttctgttgttgttgttatgtcacaattcaattatttttcaatgtgtgtaatttgttaaatatatatttcatattattggtctcttaatactatattaaaattttgtataatgttttatattttaatatatattttatacattaattccattagatctgaataaaagagttaaaatagcatcattgattgaacacttactgtaggtcaggcactattgaaagtacttcacaggtaataattcattaaattttaaaactctgtggggccaggcatggtggctcaagcctgtaatcccagcatttgggaggcctaggagggaggatcatgaggtcaggagttcgagaccagcctggccaatacgaggaaaccccgtctctactaaaaatacagaaattagccaggcatggtgccgcatgtctgtagttccagcgactcgggaggatgaggcagaagaatcacttgaacccgggaggcggaggttgcagtgggtggagatcgtgccactgactccaacctgggtgacagagtgagactccgtctcaaaaacaaacaaaaaacaaacaaacaaaactgtgtg

SEQ ID NO: 62158 - DNA, 909 bp, Homo sapiens
aaacagtattgtattttgatgttgcagttttgaatgcagtttatttcaaatattatatttaatgattattaagtttaaaattctacaataacaatttttcctgagtattaataaaaggatttaaaaaaagctatatgatgccataagtcactgctcaccaccttgccactatagggttgctccttaaaatacactttccaatgatttgtacaatgcaatttgaaatggttcatttgatgggttacacatttttctcctgggcaaccattgtataatgcgattctcaattgttctattgccaacaatattttattgagttgttgcttctggttttctgttgttgttgttatgtcacaattcaattatttttcaatgtgtgtaatttgttaaatatatatttcatattattggtctcttaatactatattaaaattttgtataatgttttatattttaatatatattttatacattaattccattagatctgaataaaagagttaaaatagcatcattgattgaacacttactgtaggtcaggcactattgaaagtacttcacaggtaataattcattaaattttaaaactctgtggggccaggcatggtggctcaagcctgtaatcccagcatttgggaggcctaggagggaggatcatgaggtcaggagttcgagaccagcctggccaatacgakgaaaccccgtctctactaaaaatacagaaattagccaggcatggtgccgcatgtctgtagttccagcgactcgggaggatgaggcagaagaatcacttgaacccgggaggcggaggttgcagtgggtggagatcgtgccactgactccaacctgggtgacagagtgagactccgtctcaaaaacaaacaaaaaacaaacaaacaaaactgtgtg

SEQ ID NO: 62159 - DNA, 290 bp, Homo sapiens
gcctcagcctcctgagtagctgggactacaggggtgcgcccccatgcccagctaatttttgtatttttagtagagacggggtttcaccatgttggccaggctggtctccaactcctggcctcaggtgatccacccayctcggcctcccaaagtgctgggattccaggcgtgagccaccgcgcccagcccctgcaatacgtcaacagtccctagattcaggcaacatggagttgcagccaaggaactttgaggtagtgaccaatgcagggaggtctgacagagaatcagca

SEQ ID NO: 62160 - DNA, 938 bp, Homo sapiens
tagatcacattttgttcattcatccattgatggatacttgggttgcttcccgattagctattgtgaataatgctgctatgaacatgggtgtacaaatatcgctttgatattctggtttcagttctttggggtatataccccgaagcacagttgtgggatcctatcttgtctcttgttttctctttgcttccatgttttttctcattgtttcrtgggaatactgatattatatattcaagtatttgttgattacatgcactgtacctgacttgtttaaagcctgatgtcttgagtactgtgcacccctgtgcctggctgagtagtggaggaactttgaaagggtctgttctggagagggggtgctgctctggagaggcggtgctgctttggagatggattaatcaggaacttgggtgctgattctaggaggtactgcatctagaaagatgggaggtggggagtgcaacttccccaattttgcctttaacttcagatccttggggtgggtgcattgcttctcctgggatggaggggtgccggggagcccctgaccaggacctggagcaggtccacacaggcactggatttgtcctttactttgggcccaggctgcactcttgattccacctcctcacactggcttcagctttctcaccctcagaatggaattcaaagcctctgcccctcccaggcagacaccaaggtatgattttcaagtggttggtgtcttgtgactggcagctgataaacgggtgatacagtgtttctatacaggagtctgcagtgccaggctgcaggggcggacgggagggggtcgtggtgggtagcctgtggagcctgagggtgggaacagagagacttcttttgctgtaggtggaagcctgtctggctcctttccctcaaaggtcagacagcttgagagatgtttccatcctccc

SEQ ID NO: 62161 - DNA, 555 bp, Homo sapiens
ttatttgcaaaattaaaaaattataaatgactaaaatgggccagacatggtgactcacacctgtaatcccagcactttgggaggctgaggtgggtggatcatttgaggtcaggaggtcaagaccagcctggccaacatggtgaaaccctgcctctactaaaaatacaaaaattatctgggtggtagtggcgcatgcctgtaatcccagctacttgggaggctgaggcaggagtatcacttgagcctgagaggcagaagttgaaatgagccgagtccgtgccactgcactccagccggggtgacagagcgagaccccgtctcaaaaaagaaaagaaaagaaaaggctcaaatgtttacttataaagaatggataccatgtgttatactgttacaatgccagggctggctaactgttcctatcaagggccggatagtaaatattgtaggttttggtagctgtttggtcttttgtctctgttgtaatgactcaaccttgccattgtgtcacaaagcagccacagacaatttgtaaatgaaaggcatwctatgtatgca

SEQ ID NO: 62162 - DNA, 899 bp, Homo sapiens
cccatgtagtctggctgggtcccttgcagcaggaccacagctgccaggaaggaaaaggattgtgttgccaggggagccctcccacatggactccaggagaaagcctgggcctgcaactgaagtccagaaagttccctcggcctgaccttggaaggaaaggaaagccaggcacctagctcagagggagggctgttcatctacacccccctgtccccacctacccaacatgtgcccatgttgtctcccaaacctggaatgtgtccccagaccctctgcctatacacatttagcaatcatctccttcagagaaaggcctcctcaaccatttcccaacatacacactagtgtaagctgaataatgcccccacccaaggatatctacagcctgaccctcaacctatgaatgtcaccttatatggcaaaagggacacatagaaggcagatgtgatcaaatcaaggattttaagatggaagattatcctggattagcccggtgggcctgatgtgatcataaggctcctcrtaagaggaatccggcaggagtcagagtcagacagaagtttgacaataaaagcagagggacagagagaagggaactggaagatgctacactgctggctttgaagatggaggaaggggccacaagccaaggatacaggcagcctgggaagctaggaagagcaaggaaacaaattctgccctggatcctgcagaaggaacccagccatgcaaacccagtctgacttcttacctccagaactttaagacaacaaatgtgtgttgatttaagccactaagattgcagaatttgttacagtggcaatagggaagtaatatactcctctgaactcgaaacaccctatcacttaaagcattggtcttggggcttgatatgtaca

SEQ ID NO: 62163 - DNA, 774 bp, Homo sapiens
tctgtgctgcaagtgatgagggcttcttactagctctctggtcagttccttattaagtgagtcaataaaaccccagaagcagcatattccgtgggagagcatcctgcactgaaaacagctttcacccaggtcctaatgagccagatctcctgacaagtcctacaggccagatgcttcccagaaggcaggaaaggctgggctctgagaggcttgtaggtgtaggagacaagaattgtcagcaggatcggtgtctagcatatggggtacaggctccaggtatcaggtacttccacatttctgcatgtacctaagtgtccacccatttctgcatccttgacctggcagtcaaggatcagctatatgcaaggtccccaccctgagcccagcctaatggatctcagtgctcacaggcacttaagagaactgtgaccgtgaagcactgtctacacagccaagagataacacctctgtgtgcagtgactggtagactcatagaggatgctaactgtattggatttagggcttcagaaatgggttactgtcagactagaaaccagatacttgtttatagtatatcctagactcagcatttcacctttccccatttgaaagtcatgaatgcagagtgtgggagatggggggaagagcagagcagaaggtaccatcaatgagctagaagcctatttcagaggatctggacaagctaatggcagataagctrgaatgccccgtgtgtatgtgtgtatgtgtgcatgtttgtgtgtgcgtgtgcac

SEQ ID NO: 62164 - DNA, 1082 bp, Homo sapiens
agagagagagagccttgtgatcgtgggtctcctggtcactacagggcttctctcgtcatccaagaagtttatagtccaatcctggtgacctcatactttctccctcttcctttctgcttacccatgacctgtgatcctttgaccgggaatctgtattttaccatattgttccagccagagaatgaatggccaaaggtcacatagtagcaggcccaaaaactgccctaaggaatcttgactcagtccttccgagtgtcatgtcataagccccaatccttcaggtcttcatatgtcccctgcagcttatgctgaagcaaagccatggcagccagggctgtgaccaatcctttgcttgtggccctgtctggtgtgtagtccattagggaggcagtgggcaggagagcatgaactctggagcctcagtgcctgagttcaagtccaggctctaccacttactacttctgtggcctcagtacctgcatgtataaaatgagggtagtaatagaayctaccttctggagttgttgcaaggggttaggcactttaatatatacagagcgctcagagcatttcagcagttggctgttatgctttgttttagccttaggagataggagcttagtttgcagacaggtagcctatgatcaatcagagagaaaacttctgtaagtagaaaagacatattagtttctgggtttgaagtgtgcttatgttgctatcctcttacagtgggatccccagagagggaccctcaaaaggtcccttttagagacaaatctccctaatggtgtgtgtgttggggtaggggtggggctgtgagtaatcttttgctttaagactgtgaactggctggctgtgaaatccatttgggagtggggccgtttccatttagcttccccagagaagctgactgaccccagatgtgatctgggaaaggtcttaggctgtaaatccctgcccctttgttccctgctgggatggtggtggtgggtgggtggggtgcctgactgcagtgcactttgaaggacatcagagtgccacagggctgggggttaagggctggggtggagcttgggttttta

SEQ ID NO: 62165 - DNA, 709 bp, Homo sapiens
tctgatgttgggtaacatgggcgcttctactgaaggctttcccacactcctgataatcaaatggtttctttccagtatgaaccctctgatgctggataagagatgaactctggctgaaggctttcccacagtctttacaggtgtagggtttctctccagtgtagacttttgtatgttttgtaagagtkgagctctggctgaaggcttcaccacattctttacacttgtagggtttttctccggtatgagttctgtcacataaatgtggcaaaactttcgtgtagttcagccctcattagacaccagagacttcacagtggagaatctccctgaatgtctggacaaatccactcagactcttcattttgttaaatgccaaagattatacttttataggttgttacagtggcgatgctttattatattttaagggatgaaaatccctcctctcctaccccggttattttctcttgcaacaaatccaagtgaagaaacactgaactgaaatctggactagcctaatagactctaaagctcaatttttatatgtatatgtgtgtatttttatctgtacctgaaatgactgctgtcaccatgcagtgattttaccccccttccctggcctcaggaataagccaagaaattctagttgtgcagaactgagcttgttgccccttcttgtactgatggaaatagtgccatgtccaaa

SEQ ID NO: 62166 - DNA, 605 bp, Homo sapiens
caattgctcttcctcgatctgatacctgcacgtcaccacctgcagctcttgacagtgagtgcctcaccccaggaaagaggctccccctactctgcatatcaggcagagattggacctggtgggttggcaggtggaacagagtggggaagaggtggcagtgtggaaagacactggactcccagtgcctgagatctagtctactagacccatggctgacttcctcccagcctctgcagacctctccttctctccttcccagctgccttacctgtatagcaagtgggtggggctacatcctctctggggcccttttcagggcaagggatctgacttggcctcttgttctcaggattctttatatgaatgtgcacacacacacacacacacacacacacacacacacacacacacasagagagagattcttgagtggggggatggtgaccagctagttcccatctctactgaagaagagaatgcatagattctggggtggaccaaagctggacatgagaagctacttggccaaccatgagagtcttgcagcccaaagctatgtaaccaagagaggtgtgcaggcaggagcatgggcagaaggatcttga

SEQ ID NO: 62167 - DNA, 605 bp, Homo sapiens
caattgctcttcctcgatctgatacctgcacgtcaccacctgcagctcttgacagtgagtgcctcaccccaggaaagaggctccccctactctgcatatcaggcagagattggacctggtgggttggcaggtggaacagagtggggaagaggtggcagtgtggaaagacactggactcccagtgcctgagatctagtctactagacccatggctgacttcctcccagcctctgcagacctctccttctctccttcccagctgccttacctgtatagcaagtgggtggggctacatcctctctggggcccttttcagggcaagggatctgacttggcctcttgttctcaggattctttatatgaatgtgcacacacacacacacacacacacacacacacacacacacacacagasagagagattcttgagtggggggatggtgaccagctagttcccatctctactgaagaagagaatgcatagattctggggtggaccaaagctggacatgagaagctacttggccaaccatgagagtcttgcagcccaaagctatgtaaccaagagaggtgtgcaggcaggagcatgggcagaaggatcttga

SEQ ID NO: 62168 - DNA, 1064 bp, Homo sapiens
gcatgcctggctcacagagcagcctttgggtgttcttttcccagaggagctctacggtgactttgaagacttggaaacaggggacatgcacaagggaaaatcgggccccgacactcaggtatgactttgtcgtagctggctgttcttggtcattgtgttctgagagaggcccacattgagaaatgcaaatcttacttgtgatgtgtgaagattgcagactggatggatagattccttcctaaagggtggggatgtggggaccaaagagaagctttcttgtttacttgttaagttttggacgacagttactactgtttcttgccatagtcatttgccaagactactgtgatttttcactcacagaagtcttagcttctcagacttacattcaaccattgccatcattctcctctttttaaatttaagtgtcatttaaaagaatgaagttcctgttctccctaatatttctttagaacagggtctgggagcatctgggtgagggacatgtctgttatttttattctagtttgtgttcccagccagcttaaggaatagcagctaattgtaatgcagatgtaacaatttcctgtagcagtaccatgttattcagagacaaagrttatgttgtgttttgttttgttttattgataacgataacagatttttgctaagatttttgtttaaatagaactttaaaaaatgtaatgtttaaagaaaagaccttcataaacatacacaaaattttttcttctggaaatttaagaatgaagatatagagaaacaaggaagaaattgaccccgacgaagaagaaagtgccaagaaaaagcatttggataagaagagaaaattgaaggagatgtttgatgcggaatatgatgaaggagaaagcacatattttgatgatcttaaaggagaaatgcagaaagaagcacaggtgagaaacctcagttcctctcagccccttgtcaagactatcacatagtgcaggaatccctgactgtctttgggtccctgcttcctatcctgcttctgtgcctttcatttggactcctgggtagatgca

SEQ ID NO: 62169 - DNA, 563 bp, Homo sapiens
gacctcgtgatcttcccgcctcggccccccaaagtgctgagattacaggcgtgagccaccgcacctggcccagattattttttaaaagtgtatttggcattagtttttgagctttgattcatgataaatttaatacaggtttttagtgatattgttaaaaacataagatgagagtaaaaggaaatctacttcatccattataaatattaatcttgaaatataacagtgataattttatatcattatcataatagtgatagtgaagtgacaatgaaataaaaaattatcatgtgatttttatcacattatcatagtgatgaagctctagcctgaagttgaagtattatatgtattacaaaattgtaggtagtcatatatgtcatagatgatgtatatagatgaatgtaaagtttttgtaactttaaaattttgtgagtcttagtctgtggacatttatcaacttattcagaatgtaaagtaaaatcmtattcagaaatattgggtaaattctgagtaggaacaaaatctctcaaattcaaagtttataaatataaaaattttaa

SEQ ID NO: 62170 - DNA, 999 bp, Homo sapiens
ttattctgagttcataaagtgaaacttttatagaaggctgtgttattgtggtttgtttttatttatttgacttaattgcttacacttgtaaatgaaagaatttgttgaaattttattattatgtgccttctaaagcacttggctttgtctagagtctgagaaaattatttaattcagtcacatttttctattgtagaatcaaaaattagaatgtgaaaagtaaaaagggaaggtaattttgatattttaactttaactatctgagygtgttgttaactaatatttgaaagagatgattataaatttacttccaagttgaaaggtaaatggagaacccgtctgccttgaaacatcctacacgcttgtcatttgtctttaatttccttattaatgatcataaaatctcaggctataagagatatcacaagttatcccattaagctatcttttaaaatgttgtatttacaacatctctatcaatagtagctcagtctaatctcacatcctcactaagaaaaacaaactacattttggagacggtaccctctttggacagttctgattttaaaaagttatttcttatattgagatgccatctttctatctttaacttagaccaattaatcttacgtcttccaaaattacaccagaaattttcaaatgtcaacaatttaaatacttgtatatgatgcccttggtataccctattcttgtctgtaggtcatacagaacttattccctaaagttcaaggtctgaactctcttcacacaaaagactttgaagtctctttacatccaggcttttctggatgtgttttaatttgtctagttacctatcagtacattctcactgttaaatctaagcagtctttaaaaaggtgagcctgtgtccatcttcattctagattctatttatttaattgactaatccccacaacccacatcagctttgggcacattcacatcatgttgttgatttctaaaaatatgactgtcatc

SEQ ID NO: 62171 - DNA, 788 bp, Homo sapiens
tttaacaagagctgacatagctgatcctagaagaatggcatgggaggagatggccctctaccacaccgaccctggcagagcatggtactctgtgggtaatcagttcacacagagcagttttcaactgtactgcaattgtttgtcttcactaccatacagttgtgctcattatttctcgatgtgcacatatctggagaagcccagaacttctggctcttacatggaggaccccagtgcagatgaaccattttcactgaagaaagacattaggattggtttggggaggcgaagtaatgtttttccttgttgctgtctctgtcatatggtacataggcatatggaargaagggtaaccactcctgacatcactgtgagcattgtgtgggcatgtgtgtttgtgcgtgtgtgtgtgtgtgtgtgtgtgcgtgcttgtgttcatgggtgcatgagggggtatgaagaggatgtggtggcttggtctgtaggatcaaagggcttgagcagcatgggtggacgttgcctgcacacacagggatagaaaaaggcatgtttttgtttctggtggttggggcagatggtgggctcattccagcctctgtgtgcttcgagaaatgagaaatcaggcagcacagggagctgagcgggcccggagctggtcctgctaggttatgagtgagtgaaggagtgggctgtgtgtgtgtttccagcttctactgtgggaacgacttccatacaggccttaaataggaaaactactagcaattctagctcagtatcctttttagata

SEQ ID NO: 62172 - DNA, 930 bp, Homo sapiens
gggatgggaagtgctgggattcatgacacaggtggacctggcaaaaagagtgaactagttctgaagtgggatgaggtggaaagaggggatgaggatttgcaaatgcctgagagaagactggggactggaaaatggagagcagtgctatggctttcagtgtttcaggattttagcaagacacttgacagtayctcttttgatatttgttttggaaggtgaggaaatgagaactcactgagagtgtattaagtggctttgaagctggctgtctcctagaagaaactttcagggatgtgccactacgttctgtcgaacttttaatcaaccagtggcaaagcacagaaagtacactcttcaaatctgaagatgacatgaagctgggagcaataactaattactggacagcagagtcaggattcaaaaagatactgactggctggactgatgggccaaatgaaacaagatgaaatttaataggtataaatgtaacttccggcacttaagtttttaaaaaaatcaaccttaccattagaggggaaattttaggaacctgaggccagtagctcaggcagctcagaattgtattacgcttatggctgcctggtttagccttaaatctgggttctataccaaaattattgacttattccttatgccaaattctttccttgtcacctacctctggtaacatttaaccaccttttgttcctgtgtctccacgtgtccacactcctgacctggtttttctgttcctaagtttttctggaatcagagttggcctttactcttgccattctttccagagcccacagtcttggcctgaactcaagtgcccacatctctctaggatttcagcccctggggatgcctgacctcccagatacctatcacatctcttcacgtcttagtgtgttatctgtctgtgatgca

SEQ ID NO: 62173 - DNA, 930 bp, Homo sapiens
gggatgggaagtgctgggattcatgacacaggtggacctggcaaaaagagtgaactagttctgaagtgggatgaggtggaaagaggggatgaggatttgcaaatgcctgagagaagactggggactggaaaatggagagcagtgctatggctttcagtgtttcaggattttagcaagacacttgacagtatctcttttgatatttgttttggaaggtgaggaaatgagaactcactgagagtgtattaagtggctttgaagctggctgtctcctagaagaaactttcagggatgtgccactacgttctgtcgaacttttaatcaaccagtggcaaagcacagaaagtacactcttcaaatctgaagatgacatgaagctgggagcaataactaattactggacagcagagtcaggattcaaaaagatactgactggctggactgatgggccaaatgaaacaagatgaaatttaataggtataaatgtaacttccggcacttaagtttttaaaaaaatcaaccttaccattagaggggaaattttaggaacctgaggccagtagctcaggcagctcagaattgtattasgcttatggctgcctggtttagccttaaatctgggttctataccaaaattattgacttattccttatgccaaattctttccttgtcacctacctctggtaacatttaaccaccttttgttcctgtgtctccacgtgtccacactcctgacctggtttttctgttcctaagtttttctggaatcagagttggcctttactcttgccattctttccagagcccacagtcttggcctgaactcaagtgcccacatctctctaggatttcagcccctggggatgcctgacctcccagatacctatcacatctcttcacgtcttagtgtgttatctgtctgtgatgca

SEQ ID NO: 62174 - DNA, 930 bp, Homo sapiens
gggatgggaagtgctgggattcatgacacaggtggacctggcaaaaagagtgaactagttctgaagtgggatgaggtggaaagaggggatgaggatttgcaaatgcctgagagaagactggggactggaaaatggagagcagtgctatggctttcagtgtttcaggattttagcaagacacttgacagtatctcttttgatatttgttttggaaggtgaggaaatgagaactcactgagagtgtattaagtggctttgaagctggctgtctcctagaagaaactttcagggatgtgccactacgttctgtcgaacttttaatcaaccagtggcaaagcacagaaagtacactcttcaaatctgaagatgacatgaagctgggagcaataactaattactggacagcagagtcaggattcaaaaagatactgactggctggactgatgggccaaatgaaacaagatgaaatttaataggtataaatgtaacttccggcacttaagtttttaaaaaaatcaaccttaccattagaggggaaattttaggaacctgaggccagtagctcaggcagctcagaattgtattacscttatggctgcctggtttagccttaaatctgggttctataccaaaattattgacttattccttatgccaaattctttccttgtcacctacctctggtaacatttaaccaccttttgttcctgtgtctccacgtgtccacactcctgacctggtttttctgttcctaagtttttctggaatcagagttggcctttactcttgccattctttccagagcccacagtcttggcctgaactcaagtgcccacatctctctaggatttcagcccctggggatgcctgacctcccagatacctatcacatctcttcacgtcttagtgtgttatctgtctgtgatgca

SEQ ID NO: 62175 - DNA, 930 bp, Homo sapiens
gggatgggaagtgctgggattcatgacacaggtggacctggcaaaaagagtgaactagttctgaagtgggatgaggtggaaagaggggatgaggatttgcaaatgcctgagagaagactggggactggaaaatggagagcagtgctatggctttcagtgtttcaggattttagcaagacacttgacagtatctcttttgatatttgttttggaaggtgaggaaatgagaactcactgagagtgtattaagtggctttgaagctggctgtctcctagaagaaactttcagggatgtgccactacgttctgtcgaacttttaatcaaccagtggcaaagcacagaaagtacactcttcaaatctgaagatgacatgaagctgggagcaataactaattactggacagcagagtcaggattcaaaaagatactgactggctggactgatgggccaaatgaaacaagatgaaatttaataggtataaatgtaacttccggcacttaagtttttaaaaaaatcaaccttaccattagaggggaaattttaggaacctgaggccagtagctcaggcagctcagaattgtattacgcttatggctgcctggtttagccttaaatctgggttctatamcaaaattattgacttattccttatgccaaattctttccttgtcacctacctctggtaacatttaaccaccttttgttcctgtgtctccacgtgtccacactcctgacctggtttttctgttcctaagtttttctggaatcagagttggcctttactcttgccattctttccagagcccacagtcttggcctgaactcaagtgcccacatctctctaggatttcagcccctggggatgcctgacctcccagatacctatcacatctcttcacgtcttagtgtgttatctgtctgtgatgca

SEQ ID NO: 62176 - DNA, 565 bp, Homo sapiens
aactgaggcagctgacagatctttgagatgaatacctgtgtacatttttatattttattttgctcagttaagctgagcacagtttttctttttttgcattcacctgtgtttctcatggataaaattgagcaaaagcaaatgcaaaatttacattatactaaagtgattttctagtatatcaattgcattaaaacaaattcatgttttcaaagcaagcattatagaagcactgactgtatgaaagaaaacctaaataaatattggttgtacaaagcaataagagatatgtgcataattaacatttatgacaatattggcacaaaagtttgcaagggggaaatgatgttaaattttttttatgatcrtaatatggtttgggaagtggaaatagtactaatttagtcctaataactcaaaaggcatgtagtaatttctagggatataaaaagtatacctaagaaactaacagaggacaataagtagaattataaaataaatacgggttaaatccaaagaaaagcaagaaatgagagaagggagggaaaacaggtggactaaataaaaa

SEQ ID NO: 62177 - DNA, 747 bp, Homo sapiens
cacacacacacacacacacagagagagaacaaaaaagccacttacatgaattccttaagatttatttatacccaagagatatactgaatttgagtccttgaaatattttctacctctcctcaaggtaaagcacaagctacatgaaattcttcacttttcttatgtcagctccctgaatgagaagactgctatcaattttctgataggcaagcaaactaaaatagcaatcagagaactttggtactggggtgatatagtttggctgtgwccccacccaaatctcatcttgaattgtagctcccataattcccgcgtgttgtgggagggacctggtgggagatacttgaatcatggcggggactgttttccccatactgttctcttggtagtgaataagtctcatgagatctgatgtttttataagggaaacccctttcacttggctctccttctctcttgtctgccattaagtaagatgtgacttttgcctcctgccatgattgtgaggcctccccagccatgtggaactgtgagtccattaaatttttttctttataaattacccagtcttgggtatgtctttatcagcagtatgaaaacggactaatacatggagttttgtttttgttttgccagtttatgcattagccaagtagcatattttcggattcagcttgcgtttattgaacctactatgtgccagtcacattttgtcatttaggacccacaagagcaagcttaggatcc

SEQ ID NO: 62178 - DNA, 1171 bp, Homo sapiens
caagaatatttcataaataccttgtgtacttctatttggggcatataatgttgattttgtctttctcttgtgattactgctaagatcatctgagcattttctcttttatcatcctctctttaaagaagtaaaatgttatagataccattaaagtcctatcccaccctctttccctccctagaggtaaatactattctgaactttgtatgttttgtgtccatacatgtttttacacctgggctttatatgcagatttttataaactagatttaaactgtgtttacagtaagatgcaatggttcactcttgtaatyccagcactttgggaggcctaggcaggaggatcccttgagcccaggagtttgagaccagcctgagtaacatggtgagactctgtctatacaaaaattaaaataaaaaaaattagccaggtgtggtgatgcatgcctgtagtctcagctacttggtaggctgaggtaggaggatcacttgagcctgggaggttgaggctgcagtgagccacgatcatgccatggcactccagctgggcaacagggccagaccctatctaaaaaaaaaagtatttttatgtttaaaaatttaacacatttgttgtcacattgcatgaaggcacttacagctttcttttgggtttgatctatgtcaatatataagaatataattcatcttttaaaactatagtttaatattgcattatatgaatgaatcccactttattttatcaatatctttacttttggacaagcatgtcagtttcactttttcctattataaatagcactgcaatgaatattcttgtgcctgagtccttgtgcatatggactcaagttactccagggtaggtacttaaaagggaaatttctgagttgcagtcatgtgctggagttaactcatgctgtctcatgggagcctattaaattgtcaaaattctgtaaggtggttattaaaaataaaaattattaaaaattaaattctataaacataattatgcaaattatattaagaacaaaagtaataaatacctaaaattcatcacttgctaattattttactccgatttactatgttcctattgtacatactacagttatctgtgctcttggggttacgtacatctattgtaaatctgtatggaggaaatactatgtaa

SEQ ID NO: 62179 - DNA, 749 bp, Homo sapiens
tgaaattaccatctagaactgggatgagggaaactgaattctggtcaaactgagagagtaagaattgtggttcacagtgaggctactagactaaaagagacctgaatttaaatcagaaataaggaaaagagttattgaaatttgacacataaaatagccattatatagagatgcttagggtcaatgcttcccctgttgctcagggagataatgtatatagtggtaataataatattaaaaataaagacatatgatagtagctaatatatattgatcaattatataataaaaatcataatcacttattggctgctttctaaatgccaggtactattctaagtgttttacttaaattaatttaacccccctmatctatggggtagatagtatgtattactcctatattgcagatgaggaaactgagacacaaagaatataatcaacttacctaaaatcaaatggacaacagttagcagaggtagaattcaaactcaggcattttggctccaaagtctgcttttaattagtttgttatgtgttacttcatttaatcttcacagcaaccctctaggttagttactatcattaatcacattttctaaatgaaggaattgaaacttagaaagcttaattttctcaacatcatacagcaggatgcataatccaaagaaaagtccttttgatgacaaagtccacactcttaactatgacagtgtggcaccttctatggcacatttcagggaggagtt

SEQ ID NO: 62180 - DNA, 456 bp, Homo sapiens
cagtggctagaaagtgcctggcccatgctggccactgcagacatacttgttatgtgggttgatgaaagaggggaggaagaaaataaatgtaagagtaatacaaagtcagaggaagaaataatctacaagaatgaagagaaatgcatttttgtttttattttttatttatttttttgagacagggtctagctctgtcacccaggctggagtgcagtggtgtgatgatggctcgtgtagcctcaacctccctggcctcaggtaatcctcccacgtcagcctcctgagtagctgaaactacagctgcacactgccacgcctggctaayttttgtatttgttgtagagacagggttttcttatgttgcctaagctggtttcgaactcctgggctcaagtggtccacccacctcagcctcccaggtgctgggattataggagtaagccactgtgcctggcc

SEQ ID NO: 62181 - DNA, 731 bp, Homo sapiens
atttctagctttcagctattactatgaatagtgctgctataaatattcttctgtaagtcttttagtgtaatttttaaagtgtataacttctttatgttgtgaatatatgtaggagtggatttgtagggttataagctaggcatgttttgctaagtagccataatatatagtttccccaaatggttatactagtttaactcctaccaacattatccttgccattactctgtaatgtccattcatttaatattaaccattctggtgaatatagaggggtatctcactgtggttttaaactgcattccctatggactaataatactaagcctacttttttttttttttagtagaattagactggtgaaaagatctcaccttgctaatttactcaaaaattatatactgaaatatgggaartgtgcagggctcctgaaagtgaagaggagagaaaaatatggtttcatccttcctgtcctctggcagttgattattggacggtctcctttttctgggaaccagcttgggccagtgctaagttaaccgatgtagttaacttgacccatgttctttattctttcatgcagatttgagttaccatctagtgcatcttgatttcagctggaagaattccccttagcatttgttgtaggcaggtctgctagctacaattctcacagttttggtttatgaggaatatcttctttctctttcatttctcaaggggagttttg

SEQ ID NO: 62182 - DNA, 1680 bp, Homo sapiens
attcttttcctcattgcttccattaggtgctttatctagcacattctatctgctgggctttgtgcaatcatctgggagcacaacaatgaccaggacaaaaacccatgaccttcaatggcacccaatctaatcagagaaatctggacaagaatggagcaagaaccacaagatttgagcaggagctgtggaattctccttattggagtggggccctttccagaagcagggacagtggagctggagcaaggtggtatagtccctgttctaatcccatggtgttgtgccactccttatcttcccattgttgaaatgggattggtaattttaataagttcctttaaagttttcctttagccttagttctgttcaatctaaatgttagtatgggttctgtgctgagccaaaagctggggatataaggtgagtaaaatagttcctggggctgggagtggtgactcaagcctttaatctcaacactttgggaggctgaggcaggcagatagcttgagtccaggatatcaagaccagcctgggcaacatggtgaaaaccccatatctacaaaaaattagctaggcatttagcaatatgaaatttatttttggttaaggtatgcatcccttttaaacaaatggataatacattttcccaacaatgtttagtaaacaatctgcaattcgggccattgatttgagatgtcaactttatcttacattgaatttttataaatacgtaaaatatatcctttaataaaatacatcctttctgttaaaaaaaaaattagctaggcatgatggtgtacacttgtagtcccagctacacaggaggctgaggcaggaggattgcttaagcccagaagttcgaggctgcagtgagccacaatcacgccaccgcactccagcctgggagacagagtgagaccctgtctcaaaacaaaaacaaaaagcttcctggcctcaggaacacagtctatttggggagagagacaagacaagagccaactgaaaatacgttaatgatagataaaaatcatgagggcttcaagagctcagagaagactaacgtggctgagggaaaaggtttattgggaaagtggtatatagttgagaagcccaattaacactgaaatacttccttcttacatttcaaaaaaagaaaaccaacatcttatggccatttcttgcctcaacattcatactgcttctgtattgtataactgaaatgtctatcactaaacaaactgattgactggataacatgaatatatatccattagtttttctaagttatattgtgagctcagaagatccctgttttattctctgctttcaccgtacagcaagggtacagtcacctgttgataggcaacaattaattttaaatggtagagaggtatagaatttgaagtgtgatgtatgaagagaaactggaagtttgctttgaaatatttgattttctttttattgttacactttastttttcataaaagggaaactaatactgtttatcagactatgaatatattggatttctatggtatttatttgcaaaattgtgaagaatacaaatttcatacatacatttaaaccagttattataaaccggtgatgaggtatttactgcagttcctgaggcaaacataggatccaagtctgcttccctcacagtattccttatatta

SEQ ID NO: 62183 - DNA, 544 bp, Homo sapiens
ttaggatccatggaaggggccaggcaagaacccgggggaagaacccaggggcctcaacgcagggcccgttctgtcctagggggtggggcccctgccttccaacgtggggcctcttctgtcctgggggtggggcccctgccttccaacggagggcctcttctgtcstagggggtgagggggtgagggggtggggcccctgccctggcactcgggctctggccttcctgaatcgccccttccttgcttctcttccgccggccaggcctctgctctccggggctacggcctcccacaggcacgttcctacacccctctgtgaaccgcccacaggcccccccacaggtgttcctctgtgagctggtcgggcggccggggccggggccgggcttcgctgctccgtgccttccacctccctggcggtgcggggcctcagggtgggcctgggaagctggaaacacctttggaaacagccgcctgaggcagctgtggacagaagaccctgcccagcagccaagggagctggcctctccgctcagcctcccca

SEQ ID NO: 62184 - DNA, 544 bp, Homo sapiens
ttaggatccatggaaggggccaggcaagaacccgggggaagaacccaggggcctcaacgcagggcccgttctgtcctagggggtggggcccctgccttccaacgtggggcctcttctgtcctgggggtggggcccctgccttccaacggagggcctcttctgtcctagggggtgagggggtgagggggtggggcccctgcccyggcactcgggctctggccttcctgaatcgccccttccttgcttctcttccgccggccaggcctctgctctccggggctacggcctcccacaggcacgttcctacacccctctgtgaaccgcccacaggcccccccacaggtgttcctctgtgagctggtcgggcggccggggccggggccgggcttcgctgctccgtgccttccacctccctggcggtgcggggcctcagggtgggcctgggaagctggaaacacctttggaaacagccgcctgaggcagctgtggacagaagaccctgcccagcagccaagggagctggcctctccgctcagcctcccca

SEQ ID NO: 62185 - DNA, 544 bp, Homo sapiens
ttaggatccatggaaggggccaggcaagaacccgggggaagaacccaggggcctcaacgcagggcccgttctgtcctagggggtggggcccctgccttccaacgtggggcctcttctgtcctgggggtggggcccctgccttccaacggagggcctcttctgtcctagggggtgagggggtgagggggtggggcccctgccctggcactcgggctctggccttcctgaatcgccccttccttgcttctcttccgccggccaggcctctgctctccggggctacggcctcccacaggcacgttcctacayccctctgtgaaccgcccacaggcccccccacaggtgttcctctgtgagctggtcgggcggccggggccggggccgggcttcgctgctccgtgccttccacctccctggcggtgcggggcctcagggtgggcctgggaagctggaaacacctttggaaacagccgcctgaggcagctgtggacagaagaccctgcccagcagccaagggagctggcctctccgctcagcctcccca

SEQ ID NO: 62186 - DNA, 758 bp, Homo sapiens
catgcctgatctgcctactgggtaattaagcactgaagaatagatatacaacaaatgttctgttaatgaaaaaataaattattttactaattcattagttataaggacaaagactcttgatggggaatcagaattcatttcatcaatacaagcttcaaacttccatttctctggcagtagctaatattaatctgaatcttataaaactgccttcattacagttcaaaaaagacacaaatattggcagttttatatagttcagtcttcaatgatgcttccaagccaccttcaaacacacaaagagaaattcggttaaagcacttgtaagaatgaagttctatccaaatgcttcataacgaggccctgcgaggagaagcagatacctacctctcagtgttgccagcrccctcaaccttattaatattcttaatcattcaacagggggtggagttgctgtgaagttgtctcagatcaattaaatcttgggagcttctgaagtgacattcagattcgtgggaaggtgaaagaaaatcaatttttccttttcagtttccaggtgtccacagatttcctggtgtgaatagtgaactctcatttccaacacaaaggcaaagatggcctctcctttcagggccatgggctgattgctgaggtgatgcagggaagaatgggagccccagggatcttgccttgccattactgacactgacacaaaaagaactatttatttcaggagttagaaaaaggagggacagaat

SEQ ID NO: 62187 - DNA, 585 bp, Homo sapiens
gccactgtgcctggccacatctttaaattatcttcatgcctcaagcacctagcagatgctcaatcaacatttgaatttaatctgaaaacatacattcccaaatcttgaatttttaatggtccaaataagaatagaactgcaaaaaatcaaaactaataaaatatctagagcttctgagatatgatttattttctgttactaaacttagaaaaaaaatcaccttatctttgttcttcattttgcctaaaccccaaatgggttctgttcaccttatgaagggtgagtgaagtaaaataatttgtactgtgtgactcagtagagtagatgctcaaatgaacagagcagctttgcctggatggaaaaattagttttatagttggcttgctgcagctttttctctgggaaatatgaactcagtcacaaaagattggattaatggggagagtttggcttagtgcaaccaatggcagcatcagaaaaacatctgcaaaaacatgaaatatagactgtagatgaacagactcatctatatatgtgagggatagctgtatttgytatgtagttaaatatccataaaataaattt

SEQ ID NO: 62188 - DNA, 638 bp, Homo sapiens
tttttttttgctatttgtaatatagttttaaagttttattttgttgacttttaatcatctgtttagattacactggaaatatgttgatatcatcaatacgtattggattctttacacatcattaatcccttctctatgcaacatctcagatattttatgaatagaaaattattggcatttggaagggggttctatgaaacaccattttaaaggagatgtatgagtttttcttttgggatttagcagaaaatgaaggataatgttytgatattatctcttactgctattgcatttttccttttttatattccatctgtttggggttttttttaatgtttgtttccagatctttggattttatttttatttttaatatgtatatttattttaatataatgtttaaattagattttaaagtcaatttattttgagtacattttaaaagagaatttaccagcttgtataaaccctaccataaactgatttattcccttaattatcggcagttttgccatgacttcacaatacatttttatgcaatgagcatgacagacaagtcatttatgtgccattctttaaatatgaaattacaaagcagagcttgcagatctttaagttggataagctatagattaata

SEQ ID NO: 62189 - DNA, 638 bp, Homo sapiens
tttttttttgctatttgtaatatagttttaaagttttattttgttgacttttaatcatctgtttagattacactggaaatatgttgatatcatcaatacgtattggattctttacacatcattaatcccttctctatgcaacatctcagatattttatgaatagaaaattattggcatttggaagggggttctatgaaacaccattttaaaggagatgtatgagtttttcttttgggatttagcagaaaatgaaggataatgtttygatattatctcttactgctattgcatttttccttttttatattccatctgtttggggttttttttaatgtttgtttccagatctttggattttatttttatttttaatatgtatatttattttaatataatgtttaaattagattttaaagtcaatttattttgagtacattttaaaagagaatttaccagcttgtataaaccctaccataaactgatttattcccttaattatcggcagttttgccatgacttcacaatacatttttatgcaatgagcatgacagacaagtcatttatgtgccattctttaaatatgaaattacaaagcagagcttgcagatctttaagttggataagctatagattaata

SEQ ID NO: 62190 - DNA, 638 bp, Homo sapiens
tttttttttgctatttgtaatatagttttaaagttttattttgttgacttttaatcatctgtttagattacactggaaatatgttgatatcatcaatacgtattggattctttacacatcattaatcccttctctatgcaacatctcagatattttatgaatagaaaattattggcatttggaagggggttctatgaaacaccattttaaaggagatgtatgagtttttcttttgggatttagcagaaaatgaaggataatgttttgatattatctcttactgctattgcatttttccttttttatattccatctstttggggttttttttaatgtttgtttccagatctttggattttatttttatttttaatatgtatatttattttaatataatgtttaaattagattttaaagtcaatttattttgagtacattttaaaagagaatttaccagcttgtataaaccctaccataaactgatttattcccttaattatcggcagttttgccatgacttcacaatacatttttatgcaatgagcatgacagacaagtcatttatgtgccattctttaaatatgaaattacaaagcagagcttgcagatctttaagttggataagctatagattaata

SEQ ID NO: 62191 - DNA, 1275 bp, Homo sapiens
gcatgccagagggtgcgtgtgtgcgtgcacgtgtgtgtgtgcatgcacacgcacacttagaaaaccataggaaaggccaggagcagtggctcacacctgtaatcccagcactttgggaggccgaggcaggcggatcacctgagttcaggagttcgagaccagcccggcctaaagggcgaaaccccgtctctastaaacatacaaaattagccaggtgtggtggcgcaggcctgtagtcccagctactagggaggctgaagtaggagaatcgcctgaacctgggaggcagaggtggcagtgagccaagattgcaccactgcactccagcctggggagacagagtgagactctgtctcaaaaaaaaaaaaaaaaaaaaaaagcaaaagcaaaagcaaaagcaaagcaaaccacaagaaagcatgaataggaaattgtcaggcctctgagcccaaactaagccatcatatctcctgtgctgcacgaatacatccagatggcctgaagcaactgaagatccacaaaagaagtgaaaatagccttaactgatgacattccaccactgtgatttgtttctgccccaccctaactgatcaatgtactttataatctcccccacccttaagaaggttctttgtaattctccccacccttgagaatgtactttgtgagatccaccccctgcctgcaaaacattgctcctaactccaccgcctatcccaaaacctaaaggaactagtggtaatcacgccaccctttgctgactctcttttcggactcagcccgcctgcacccaggtgaaataaacagccttgctgcacacacaaaccctgtttggtggtctcctcacacaacgcatgagacagaaatgtatcatatatcatatccattgctctggcaaccatcttaccttaggatggttgaatgaaggatgaagccacctccgcaaatggcagagaaagagaagaaaagattttgggtgcttgagaaatttagcggcttgagcactacatcaaccagccctgaagctgaaccgtgttgcaaacgtcctgttttgtgagctaatgagtctccttattgtctccgctagtctgagttagaccagctgctgaaatcgtgataactgatgtaaactctaataaaatgtaaggtaatttttgaccagcagagcataaacctcaacatctgactggtcccagcagatttaggcacccttatctccttttagctttaggaatttcatttgggattcaaatggctttatctgacaggaacata

SEQ ID NO: 62192 - DNA, 1275 bp, Homo sapiens
gcatgccagagggtgcgtgtgtgcgtgcacgtgtgtgtgtgcatgcacacgcacacttagaaaaccataggaaaggccaggagcagtggctcacacctgtaatcccagcactttgggaggccgaggcaggcggatcacctgagttcaggagttcgagaccagcccggcctaaagggcgaaaccccgtctctagtaaacatacaaaattagccaggtgtggtggcgcaggcctgtagtcccagctactagggaggctgaagtaggagaatcgcctgaacctgggaggcagaggtggcagtgagccaagattgcaccactgcactccagcctggggagacagagtgagactctgtctcaaaaaaaaaaaaaaaaaaaaaaagcaaaagcaaaagcaaaagcaaagcaaaccacaagaaagcatgaataggaaattgtcaggcctctgagcccaaactaagccatcatatcycctgtgctgcacgaatacatccagatggcctgaagcaactgaagatccacaaaagaagtgaaaatagccttaactgatgacattccaccactgtgatttgtttctgccccaccctaactgatcaatgtactttataatctcccccacccttaagaaggttctttgtaattctccccacccttgagaatgtactttgtgagatccaccccctgcctgcaaaacattgctcctaactccaccgcctatcccaaaacctaaaggaactagtggtaatcacgccaccctttgctgactctcttttcggactcagcccgcctgcacccaggtgaaataaacagccttgctgcacacacaaaccctgtttggtggtctcctcacacaacgcatgagacagaaatgtatcatatatcatatccattgctctggcaaccatcttaccttaggatggttgaatgaaggatgaagccacctccgcaaatggcagagaaagagaagaaaagattttgggtgcttgagaaatttagcggcttgagcactacatcaaccagccctgaagctgaaccgtgttgcaaacgtcctgttttgtgagctaatgagtctccttattgtctccgctagtctgagttagaccagctgctgaaatcgtgataactgatgtaaactctaataaaatgtaaggtaatttttgaccagcagagcataaacctcaacatctgactggtcccagcagatttaggcacccttatctccttttagctttaggaatttcatttgggattcaaatggctttatctgacaggaacata

SEQ ID NO: 62193 - DNA, 628 bp, Homo sapiens
tgtggaagctcagatgcctttcagaagcggagattaagtagttccgagacataaagtgcaagtcaagtaaaacatcatcttttagccaaagcgtctattcataattgtgcatcttttgtttacctgttagttctagggagttagacttacaagagggtatctgttatatgtcatctgctcttgtcayatttctttttaaggggatttatttaatgtcacctgttagagattgggagactcaaaatgatatcataaaaggaataaagtaactgggactgtttatttagcctagagaaaatatgatggctttataaaggctgtgtttaatgctctgcaattcattcagaaaatatcctgagcgtctgctatgcaccggaagttgttccaggtgttgtagatatggcaccaacgaagaccaacacatcgtgatctaaaggggctcctcatggcattaaaataaaaatcgaaactccttccttggacttgcagtgccccttgttctctggaccctgcccaccctcccgacctcttgtccttctcacacccctttctcactctgcttcagctacactggcccctttgctgtttcttttctttcttcttcttctttttttttttttttgagata

SEQ ID NO: 62194 - DNA, 838 bp, Homo sapiens
tggacacctcaggtgacatgctttatagttggcctgagccttgacccagtggttcaacctgagtttggtcttggtaccattcaggtgtttgtgagctgagactgatgagtaggaacaggtgttttatatctcgtcttttgtcaaaagtaaagactcattcctttggtaacccaaccaaatcaggatcagaaactttacaactgaataaatgaatggatataactgtatttgaagttatttatattaataccatgaaatatatttctccagttggccacaagcagtcaattgtcctcttgttctcaaatatctagttactaggctttctaaataattttttgttattgttgttttactttagctctcttcctgccttcttccctggcctcttggagaaggaaatggaaacatgggctgtgtttcatgagagttaaaaactttcaccccagttacctttttatcttggaaggctgatctctgcatctccctccttcctgtcgctcgggggattgaaacctcagtggacactgggcgcagtggctcttgcttcttatcccagcactttgggaggctgaggcaggcagattacttgaggtcaggagtttgagaccagcctggccaacatggtgaaaccctgtctttactgaaaatacaaaaattggctgggcctggtggcgcatgcctgtaatctcaggtacatgggaggctgaggcaggaggattgcttgaatccaggaaatggagtttgcaatgagctgagatcgtgccactgcaccccagcctgggtgacagagtgagactcygtctggaaaaaacaaaacaaaacaaaaaaaccctca

SEQ ID NO: 62195 - DNA, 1093 bp, Homo sapiens
gctgaaaacaatctaaaatggttttgcattcatgtttacacttcatgtctcccaatcaaattactgtatttcaaggtcctttaaagctgtccattgctrgattcacaattagatttacttctttaaacattttagattgctttaaaataattttgttttattgtgatatacaaagatttgcatactttgatattccacagtcaactctgcaaaggtaggtataatttgaaggtctcacttctgcttccttctcttctaaactgtttcactttccccctgtaaatactaatttgtagaattgttctggttcattcttgcttttaagaaacagacgcacacatatgtagatatctctatatatagatattagatgtttgtgtcaacccgcctcccaaattgggtaagcagtaatgtgttttaggctctattttttttctatctaatgaattctggagctcattctatagtagcttgctctctttctctttctctctctctcctctttctctggctgtacagcactccacagagtagatggagaggccacagtttattcaatcagtcttccaacccatctattgatgagctctttccagttctttgctataagaaatagtctgacatgaatagccttgtgcgtgtatcctctcacatttttttgcagcagaaggtgacacgtggtgtgcagtgtacactgctcactagtggatgtctgctagaaaaggcatcataagtacaaatgcaagtccatggccttgatttgataattagtcacatatacaaactcatattcattgtaattatcattttaaacagaaatatgcaagttcctatagaaagaggacaattttaatgatttaaattaataaaaccatgtttaaagaaaaattgacagcaattctacacatactcagaaaatagatgggggaatacttcacaagtaatgtgtgaagttataatattctgaggccaaaaccaggtacagacataacaaaaaaaaaatctatgtactaatatctctcataaatatagacacaaaaattcttaatggtagcaaatagaattcaaatatatatgtacgtgtgtatgtgtg

SEQ ID NO: 62196 - DNA, 1067 bp, Homo sapiens
tgcataatgcaattttactttccagaattaattagtagaaatttagtcctgaaaaatcatcttgctatagtgttcctttcacttacattatactcraggcatacaaatagttaatgctctgctgtgtctgttgccattgtttaaggctgaaacgccagctaggaacctcatggaggtcgaggcttctcaatgacgcaagctgcgctgttctctaattcttaactcagcaggaactgaactttttgccttatcaagtaacacatttctgagcacctaagtggtcatcctcacagaaggatactatcaggcttacaatctgcaccaaccagatgctcctggttgattcttgagttcaggttcactgtaaacttcaaaaataaaactaactccactgccgtttccaaaatgaataattgaaaatgaaggatgaaggtgctgatcaccagatgaagccagatgaacaaaataggaataaaaatttactattctagaatttctgtttttcaagtaataaaaatacacacatatttgtatttttaaataagcatatagactgatttttaataaaaactctatgtatttgtgtttgcctgtcaggaggaggatattcaagtaaccctcagctaactaggaaattctgaaacctggaaaatcccacgtctggccaattgctatagattcgtaaccccttttatcaacaggattgagaagcaaataaataggaaaaaaaaagtggagaaataattcagattactttcgtcacctacaacgttctaatcaaataccaaatagccaacatgtcaagaaaaaaatctgcatatctagattcattaaaagaaataatcttcatcaatacagttttgcataaattaattgctttattttcctgctacttctagaccacagtctggaagcaggatagcaaagtgagtagaaatatagactcttggaatagatcctgttttagatggaatctcagcaacatcaattatctgtgtgacttcctgtgagttgctagaagtacctgtttacctaattgtggataataatcgttcgcatctccttaa

SEQ ID NO: 62197 - DNA, 1067 bp, Homo sapiens
tgcataatgcaattttactttccagaattaattagtagaaatttagtcctgaaaaatcatcttgctatagtgttcctttcacttacattatactcgaggcatacaaatagttaatgctctgctgtgtctkttgccattgtttaaggctgaaacgccagctaggaacctcatggaggtcgaggcttctcaatgacgcaagctgcgctgttctctaattcttaactcagcaggaactgaactttttgccttatcaagtaacacatttctgagcacctaagtggtcatcctcacagaaggatactatcaggcttacaatctgcaccaaccagatgctcctggttgattcttgagttcaggttcactgtaaacttcaaaaataaaactaactccactgccgtttccaaaatgaataattgaaaatgaaggatgaaggtgctgatcaccagatgaagccagatgaacaaaataggaataaaaatttactattctagaatttctgtttttcaagtaataaaaatacacacatatttgtatttttaaataagcatatagactgatttttaataaaaactctatgtatttgtgtttgcctgtcaggaggaggatattcaagtaaccctcagctaactaggaaattctgaaacctggaaaatcccacgtctggccaattgctatagattcgtaaccccttttatcaacaggattgagaagcaaataaataggaaaaaaaaagtggagaaataattcagattactttcgtcacctacaacgttctaatcaaataccaaatagccaacatgtcaagaaaaaaatctgcatatctagattcattaaaagaaataatcttcatcaatacagttttgcataaattaattgctttattttcctgctacttctagaccacagtctggaagcaggatagcaaagtgagtagaaatatagactcttggaatagatcctgttttagatggaatctcagcaacatcaattatctgtgtgacttcctgtgagttgctagaagtacctgtttacctaattgtggataataatcgttcgcatctccttaa

SEQ ID NO: 62198 - DNA, 1067 bp, Homo sapiens
tgcataatgcaattttactttccagaattaattagtagaaatttagtcctgaaaaatcatcttgctatagtgttcctttcacttacattatactcgaggcatacaaatagttaatgctctgctgtgtctgttgccaytgtttaaggctgaaacgccagctaggaacctcatggaggtcgaggcttctcaatgacgcaagctgcgctgttctctaattcttaactcagcaggaactgaactttttgccttatcaagtaacacatttctgagcacctaagtggtcatcctcacagaaggatactatcaggcttacaatctgcaccaaccagatgctcctggttgattcttgagttcaggttcactgtaaacttcaaaaataaaactaactccactgccgtttccaaaatgaataattgaaaatgaaggatgaaggtgctgatcaccagatgaagccagatgaacaaaataggaataaaaatttactattctagaatttctgtttttcaagtaataaaaatacacacatatttgtatttttaaataagcatatagactgatttttaataaaaactctatgtatttgtgtttgcctgtcaggaggaggatattcaagtaaccctcagctaactaggaaattctgaaacctggaaaatcccacgtctggccaattgctatagattcgtaaccccttttatcaacaggattgagaagcaaataaataggaaaaaaaaagtggagaaataattcagattactttcgtcacctacaacgttctaatcaaataccaaatagccaacatgtcaagaaaaaaatctgcatatctagattcattaaaagaaataatcttcatcaatacagttttgcataaattaattgctttattttcctgctacttctagaccacagtctggaagcaggatagcaaagtgagtagaaatatagactcttggaatagatcctgttttagatggaatctcagcaacatcaattatctgtgtgacttcctgtgagttgctagaagtacctgtttacctaattgtggataataatcgttcgcatctccttaa

SEQ ID NO: 62199 - DNA, 1067 bp, Homo sapiens
tgcataatgcaattttactttccagaattaattagtagaaatttagtcctgaaaaatcatcttgctatagtgttcctttcacttacattatactcgaggcatacaaatagttaatgctctgctgtgtctgttgccattgtttaaggctgaaacgccagctaggaacctcatggaggtcgaggcttctcaatgacgcaagctgcgctgttctctaattcttaactcagcaggaactgaactttttgccttatcaagtwacacatttctgagcacctaagtggtcatcctcacagaaggatactatcaggcttacaatctgcaccaaccagatgctcctggttgattcttgagttcaggttcactgtaaacttcaaaaataaaactaactccactgccgtttccaaaatgaataattgaaaatgaaggatgaaggtgctgatcaccagatgaagccagatgaacaaaataggaataaaaatttactattctagaatttctgtttttcaagtaataaaaatacacacatatttgtatttttaaataagcatatagactgatttttaataaaaactctatgtatttgtgtttgcctgtcaggaggaggatattcaagtaaccctcagctaactaggaaattctgaaacctggaaaatcccacgtctggccaattgctatagattcgtaaccccttttatcaacaggattgagaagcaaataaataggaaaaaaaaagtggagaaataattcagattactttcgtcacctacaacgttctaatcaaataccaaatagccaacatgtcaagaaaaaaatctgcatatctagattcattaaaagaaataatcttcatcaatacagttttgcataaattaattgctttattttcctgctacttctagaccacagtctggaagcaggatagcaaagtgagtagaaatatagactcttggaatagatcctgttttagatggaatctcagcaacatcaattatctgtgtgacttcctgtgagttgctagaagtacctgtttacctaattgtggataataatcgttcgcatctccttaa

SEQ ID NO: 62200 - DNA, 1067 bp, Homo sapiens
tgcataatgcaattttactttccagaattaattagtagaaatttagtcctgaaaaatcatcttgctatagtgttcctttcacttacattatactcgaggcatacaaatagttaatgctctgctgtgtctgttgccattgtttaaggctgaaacgccagctaggaacctcatggaggtcgaggcttctcaatgacgcaagctgcgctgttctctaattcttaactcagcaggaactgaactttttgccttatcaagtaacacatttctgagcacctaagtggtcatcctcacagaaggatactatcaggcttacaatctgcaccaaccagatgctcctggttgattcttgagttcaggttcactgtaaacttcaaaaataaaactaactccactgccgtttccaaaatgaataattgaaaatgaaggatgaaggtgctgatcaccagatgaagccagatgaacaaaataggaataaaaatttactattctagaatttctgtttttcaagtaataaaaatacacacatatttgtatttttaaataagcatatagaytgatttttaataaaaactctatgtatttgtgtttgcctgtcaggaggaggatattcaagtaaccctcagctaactaggaaattctgaaacctggaaaatcccacgtctggccaattgctatagattcgtaaccccttttatcaacaggattgagaagcaaataaataggaaaaaaaaagtggagaaataattcagattactttcgtcacctacaacgttctaatcaaataccaaatagccaacatgtcaagaaaaaaatctgcatatctagattcattaaaagaaataatcttcatcaatacagttttgcataaattaattgctttattttcctgctacttctagaccacagtctggaagcaggatagcaaagtgagtagaaatatagactcttggaatagatcctgttttagatggaatctcagcaacatcaattatctgtgtgacttcctgtgagttgctagaagtacctgtttacctaattgtggataataatcgttcgcatctccttaa

SEQ ID NO: 62201 - DNA, 1067 bp, Homo sapiens
tgcataatgcaattttactttccagaattaattagtagaaatttagtcctgaaaaatcatcttgctatagtgttcctttcacttacattatactcgaggcatacaaatagttaatgctctgctgtgtctgttgccattgtttaaggctgaaacgccagctaggaacctcatggaggtcgaggcttctcaatgacgcaagctgcgctgttctctaattcttaactcagcaggaactgaactttttgccttatcaagtaacacatttctgagcacctaagtggtcatcctcacagaaggatactatcaggcttacaatctgcaccaaccagatgctcctggttgattcttgagttcaggttcactgtaaacttcaaaaataaaactaactccactgccgtttccaaaatgaataattgaaaatgaaggatgaaggtgctgatcaccagatgaagccagatgaacaaaataggaataaaaatttactattctagaatttctgtttttcaagtaataaaaatacacacatatttgtatttttaaataagcatatagactgatttttaataaaaactctatgtatttgtgtttgcctgtcaggaggaggatattcaagtaaccctcagctaactaggaaattctgaaacctggaaaatcccacgtctggccaattgctatagattcgtaaccccttttatcaacaggattgagaagcaaataaataggaaaaaaaaagtggagaaataattcagattactttcgtcacctacaacgttctaatcaaataccaaatagccaacatgtcaagaaaaaaatctgcatatctagattcattaaaagaaataatcttcatcaatacagttttgcataaattaattgctttattttcctgctacttctagaccacagtctggaagcaggatagcaaagtgagtagaaayatagactcttggaatagatcctgttttagatggaatctcagcaacatcaattatctgtgtgacttcctgtgagttgctagaagtacctgtttacctaattgtggataataatcgttcgcatctccttaa

SEQ ID NO: 62202 - DNA, 634 bp, Homo sapiens
ccacagcacaaagggaagaactaccctttaacacatacagagacatttcacaaggacaggaggaaagagcagtatttaaacacaaagaggttgaccaggagcagtggctcagacctgtaatcccagcactttgggaggtcraggcaggcagatcacttgagctcagcagttggagactaccctggccaacatggtgaaaccctaaaaacacaaaaattgggaaatgcatgttctagctttctgtgtgcttaggtgcccatgctactgagggtctaagtccaggcagccgaagagtgtggtgagcaagatgaacaaagatgcgcagatgagagaagccattaacatattaaagtaatttaaagtttgggtggtctggatatcatactgttttagcctagattttactctggatacttttcagaagtagctggcactttaaaccatatgttctattaaacgttctttccaagaaatatcttgagtgatcccaaggaaaactggacaagtggaatctctgtctttcaactttgggatagtgattatacctctgttagtgctcatccacctaacaaagcttggcaatccaagttagtatcccaggggagtttagtttggttggatggtggaagactga

SEQ ID NO: 62203 - DNA, 867 bp, Homo sapiens
tgcataatagacacaaaaatataagctcatamtcgagacacagctaaagtgacttgctgagtcagaggagagctcagttccatcccagggattcagaaacactctgcccatgagagagcattgaagaccccttgagaagcagacagggtttgcatgttcagaagtcataggaagacaggggcatttttctcagtaaggacagattggcaaaggcaaacagtaaagtgtagggtaactgtaaagaaaataactcattatggcaagaacatgaaatgaaaagtaataagctataacattggtaaaataatttgaggcattttcatagagaatttttaatgtaaggctccatgaattatttttaatagcagtaatcataggtattaaagatcagtaactaattctttttctttagtcataagcatgcgaatgccagattattcaaatccttgaatatgctacattcttaaacttcttaaaaaaattcttctttcagtgctaactgcgtccacactaccccaaccttttaatttgttcatttcttggtccctgtagctgagacaacagttatcaaatattatatgttatttcctgagtagaagtaaatatatgtctgtcaactgtggatttagctgggagaaattgaaagtaaagaaataagtatattaaaatcaaccatttgtgtatttgtgctcttagagtaaggaagatgacacaaagaataatcttttcagtagcattctgccagagatgtgcatttgtgttagcaaagtttcaagtgtagagtttcctaatcctttgttacgcagagagggaaagattgagagttatgatggtaaaactcggtagaactaccttgctatagcctgg

SEQ ID NO: 62204 - DNA, 867 bp, Homo sapiens
tgcataatagacacaaaaatataagctcatacycgagacacagctaaagtgacttgctgagtcagaggagagctcagttccatcccagggattcagaaacactctgcccatgagagagcattgaagaccccttgagaagcagacagggtttgcatgttcagaagtcataggaagacaggggcatttttctcagtaaggacagattggcaaaggcaaacagtaaagtgtagggtaactgtaaagaaaataactcattatggcaagaacatgaaatgaaaagtaataagctataacattggtaaaataatttgaggcattttcatagagaatttttaatgtaaggctccatgaattatttttaatagcagtaatcataggtattaaagatcagtaactaattctttttctttagtcataagcatgcgaatgccagattattcaaatccttgaatatgctacattcttaaacttcttaaaaaaattcttctttcagtgctaactgcgtccacactaccccaaccttttaatttgttcatttcttggtccctgtagctgagacaacagttatcaaatattatatgttatttcctgagtagaagtaaatatatgtctgtcaactgtggatttagctgggagaaattgaaagtaaagaaataagtatattaaaatcaaccatttgtgtatttgtgctcttagagtaaggaagatgacacaaagaataatcttttcagtagcattctgccagagatgtgcatttgtgttagcaaagtttcaagtgtagagtttcctaatcctttgttacgcagagagggaaagattgagagttatgatggtaaaactcggtagaactaccttgctatagcctgg

SEQ ID NO: 62205 - DNA, 867 bp, Homo sapiens
tgcataatagacacaaaaatataagctcatactcgagacacagctaaagtgacttgctgagtcagaggagagctcagttccatcccagggattcagaaacactctgcccatgagagagcattgaagaccccttgagaagcagacagggtttgcatgttcagaagtcataggaagacaggggcatttttctcagtaaggacagattggcaaaggcaaacagtaaagtgtagggtaactgtaaagaaaataactcattatggcaagaacatgaaatgaaaagtaataagctataacattggtaaaataatttgaggcattttcatagagaatttttaatgtaaggctccatgaattatttttaatagcagtaatcataggtattaaagatcagtaactaattctttttctttagtcataagcatgcraatgccagattattcaaatccttgaatatgctacattcttaaacttcttaaaaaaattcttctttcagtgctaactgcgtccacactaccccaaccttttaatttgttcatttcttggtccctgtagctgagacaacagttatcaaatattatatgttatttcctgagtagaagtaaatatatgtctgtcaactgtggatttagctgggagaaattgaaagtaaagaaataagtatattaaaatcaaccatttgtgtatttgtgctcttagagtaaggaagatgacacaaagaataatcttttcagtagcattctgccagagatgtgcatttgtgttagcaaagtttcaagtgtagagtttcctaatcctttgttacgcagagagggaaagattgagagttatgatggtaaaactcggtagaactaccttgctatagcctgg

SEQ ID NO: 62206 - DNA, 1758 bp, Homo sapiens
actgcagcaaacttagccgcataaaatctgttgctctcatgttagaattcttttttgagttggccttgatcagattttaaattgggtgaaatgtcctattttgtgcctttgtctttacttactgagaacaacatgttctttttgatgggcccataagactaaagacttggatttgaaaccacggtttgaaagaaaactatgaaaatgtgatcccttttgggatattcatttgaccatgagaaccccaacaacaactggtttggaacaacagtggtataaaaaatcagtacagggtaaagaaaaatactggtagtggataaaagaaccagataccttaccagacatttatagagctcaagtccaagattccaagataggagataatcaaataaatagctgcctcttctgtaattgcattttaaaatctcattctatccacacaaattttccccctactgtctgatgcatgcttgggttgatacttttttttattaagacagatttattggtcaaagwtttaattttaattcccaggtttgtttaaaagaaggcagtttcacaacccagttgttctggatatttatggaagacgaccaaagaagctgagatagccagaagaaaaaaaaaaacaaaaaacaaaaaactctgcagtttagcattcttgtccctgtaggatccttccttatattatggaaatttctgcagaccttaggccatgagtattgaacagatctcaccttccacagtttctcattgacctacagcacaatatagggttttttgaacataaaagaatcattgacaacctctctattactctaagaaattgtttacccatgtgataaagaagcctctcaaacttccttaattaaaagtatgttccatcgatgacccaccttcctggtggagaaactgaaatccacccagcctctttctcccctaccaattagatcactttctctgtttgcatcttctatcctattagctctggggtatcacaaagatgatttacttctgcattccatgctgccgagttaaagaacagattgcccggggtcttgaacatctctgggtaattgaagcttttgcctttggggttattactttgtaatcacactatttgaggagtttgggtgaggaaagcgctgaaggtttgtccgcctgatttgtctgtcctgctcatttcagcctactaagctgggtggtgactaatttcagaaaaaaaaaaaaaaggcagacctaagttacccctccttttatgatgctgtctggatagatgtgcccacaagatttcaatgttcttgcatctgataacattaatgtatttaagatggagagaagcaagaaaagaggtcaaaggaacaagaaaagaagaagacatcctgctgagtctgtccttacagtagtaatgatcattttgcagagatgtgtgggtttttcagaagagtcagccagagcagaactttgatactgctcaaaatttacatggttgctttaatttgaaaacaattaaaaaacaaaagagagaaagaaggcaagcaaggaagtagaagttctgtggataacactacgtttctagctactactactatccctgttgtttctcttttttaaaagggcattcaaaattcagtaaactacaatttaatgtattacagcttttaaagggaaatttctttacacatggcaacatataaggaacaaaaattgattgaattattgtatacgttaactaataaagttagttaacaagggtac

SEQ ID NO: 62207 - DNA, 943 bp, Homo sapiens
ttcaaaactcaggaagccagttcagctcttctctggatttcaacagaaagaattctaggccttggagcctcagaagtagaggaatgttttttatgtctggattgtctctgtgcctttcaaatcattccacctaggctgcctgccctgcccacttctgaaatcagatctgcttcccattccacaattcttgatgcaagaataagatggagatactttcttaaaagaactggaaaatagcaaaagaagactcaccttcccaggcagggacatctgcatgaagctgagtggggttcctccagatcagagtctctcracctcagcacaattgacttgttgggctggataagtctttattttgaggtgctgtcccgtgccttataggatgttaagcattgtaagtatggcacctatccccctttgtgggagaaacaaccagaaagtctctagaccttgccaaatgtgccctagggggtcaaagttaccctcaggcaagaagcacggctctagatgccccgcaggcaggcaggccgtagcctctctttgggccactaaaatacctttacctggcactggtgtatcattaatctgataacttccccataaagaagagcagaaatcagtcttatttctatctgtaactggctctatacataaccaaatgattttcttttcataacagagtgcttaagatgagactgtaacttgaagagaacctcaaggtgggctctacagggtgctcagtggctaccaacccatttttcagttctggcaaagctgaacctattccatcatgattaagcagactttattagagtccacgactccataaacaatgtcagatatgttgtgagccccatagctctcagcctaaaaacaaaacgcaataaaggaagtggtaacaaatagaatcataactttaggatattgcatctcaggatgatgc

SEQ ID NO: 62208 - DNA, 584 bp, Homo sapiens
ggatcctatttttattaaggtaacaccaaaatatccatatgtgtacctattcactcaacaatgcatctttttagtacataaggatgcatgggacatggaccctcaagagagttacagtttagtagctggcctaagcagacagtgccaggcataaacaacaaagtcttatgtcactataccggtaataacaggtatatgttcctggacgcctgctgggtgcctccctggttcgtcatgctttcctatgcagagaggtctctaggcaacaagctgcaggagttcagatgagggaaccatggcttttagccagtggaagacttgacggaaggctggcgaggcccgaggacggaggagaggatggacaaggccactgcagggtgggggcaaggggatttggaggcatttgtagatgagattatgacaccagaaaggagggattaggggaaagtttggccaaggtgactcaagtcaggttgcagccagcttgaaatgccagggaaaccaggagttcaagactagcctaggcratgtggtgaaaacccatctctacgaaaaattagccaggtgtggtggtgtgcacctgt

SEQ ID NO: 62209 - DNA, 711 bp, Homo sapiens
agacttcctgttacttatctcagcaacgtgcagtcacttcccattcaacaatcacgcattgagcttaggcacactgcaattcttcttccatcagaatctcttaccttctctattgctcacttgctctggactcattgtgttcatataggatagttctatacaaacattatgtatgtgtgtatgtgtgcatatcaggattgctttgaaactcacccactccacccattacacaatttcacctacgcgtgaatcaactcagagaccaaagtggtggctctcagttttcagggacaatttcagacwgggccttaacagacagtatgggacatcccacatttcctgcctcgtgcctcaccctgagatcaatcagatcattgcaagtctatttcacagaatgaaatacttgagctgcattgtggtagattttcattgccaggtacttcttttgaacttcaaaagttgtctctaacaccctggaatttatgtcttatctgcttaagaagataatcaggccacagtcacacactttgcagaaatacacattgaacatgcatctggggtatttgtaaaatatgcttgggagcctgcagacagatgaagttttgtcactgtcaggtattaaagggtcacagaatcaaatcaagtgcagaagcctgaacctgccatgcctgagacttccatctgcgattcactggagagatgagggatatg

SEQ ID NO: 62210 - DNA, 727 bp, Homo sapiens
aggagggtctctgacaacacgaccaaaatgcctctaatccaggctcctgccctgagaaataaaaacagaaccacagaagcagatgaatcccttgtccccagactctaacctctggccagttccctacaatttctcatctcctaactcaacttgggyaagcacagaagccaatggccttgggcttctgaggtgagaaggcacttctcacgtttagaggaacgcctctcccatttcactgcttcctcataatgttcgagtaggcagcatataaaaacagggaaataaagtcacactgagtttccatgacctcatttccattacccaagtagctggtcacataattatatcttaaacccaggtgtcctgtgtgcccccaaacccagaaaaccgtggcttcaggttttccatgtttgttacaaaaaaacaaggaacaagggtaactaactacatgtcctttgcagccaaattgccatcactctcctaagccagtagagaggtctgcgttactgttctgcaggtaactgcctgtcgaattctttctggtggctgctctatgagtatttgcctggaaggtaccatcttctgtcagttacctgtctgtcaaagctgctacttccttccccagggtgttttctgtacaagctgccacttctcctgaccagtaaaaagtatctactgggccaaatatcttctccccctcaccccaccaagagcatggaggacctgc

SEQ ID NO: 62211 - DNA, 727 bp, Homo sapiens
aggagggtctctgacaacacgaccaaaatgcctctaatccaggctcctgccctgagaaataaaaacagaaccacagaagcagatgaatcccttgtccccagactctaacctctggccagttccctacaatttctcatctcctaactcaacttgggtaagcacagaagccaayggccttgggcttctgaggtgagaaggcacttctcacgtttagaggaacgcctctcccatttcactgcttcctcataatgttcgagtaggcagcatataaaaacagggaaataaagtcacactgagtttccatgacctcatttccattacccaagtagctggtcacataattatatcttaaacccaggtgtcctgtgtgcccccaaacccagaaaaccgtggcttcaggttttccatgtttgttacaaaaaaacaaggaacaagggtaactaactacatgtcctttgcagccaaattgccatcactctcctaagccagtagagaggtctgcgttactgttctgcaggtaactgcctgtcgaattctttctggtggctgctctatgagtatttgcctggaaggtaccatcttctgtcagttacctgtctgtcaaagctgctacttccttccccagggtgttttctgtacaagctgccacttctcctgaccagtaaaaagtatctactgggccaaatatcttctccccctcaccccaccaagagcatggaggacctgc

SEQ ID NO: 62212 - DNA, 1327 bp, Homo sapiens
actgtgggaatgatttcagagccacagacggtaaaacaaatggcaaatggaattgaaaggtaaaaagctgaattcaggcatgtatttctaggattctcagctaaaatctcatgtagatgaaaatttttacaaaaacacacacttctccttttctccccgaaagccactcaataattggttttaggaacttaagacccagatttctgcgtttttgcacagttaatgctgataccaggttttaactttccaaaaagtattttaaaaaaaarctatgctgaacatgaaatgttgtgtctcaagcatacttaggcctaccattcactgaggaaaatgagttttagggaagaaaataatgaacaacacatacaaggagagataaaagaacactttggtactattggtcccatctctgcttttaagactttgcctgagattgcaactcctctctctctcaagaagtcctctccctctcccatctcccatctctctttcttttttttttttgagatagggtctcactctgtcacccaggctggagtgcagtggcaccatctcagctcactgcaacttcaacctcctgggctcaagggatcctcctgcctcagcctcccagggagctgggattacaggcgcatgccaccacgcctggctaatttttgtttgtttgtttgtttgtttgtagagacagagttttgccatgttgcccaggctggcctggaactcctgggttcaagcagtcttcccaccttggcctcccaaagtgttgcgattacaggcatgagccactctgccaggccaagaagtctttcttaacggacccattccaagcacttcaaccctagagtttgcatggcagtgctctgcgtttcccttcaggccagtaataggattctggatggcgcatgggctctggtattaattcctgccagcccacacctgatgccaggcacacagcaagcattgttgaaaggatgaaggcgccaacctccacctacttcaccaccttcatcttgtccaatactgtccaaactcactttggagaagaataaacattctttgctctactttccactgctcagcttcgggtaatttttcttcaaccctacccaccctacccatattatgcactttccttttgctaaccagcagaacgggttgagactttcctcaacattttctctggcaactgaattaggttaactgtgtctttctgctctgatttcctcttactgcccaataatcctgtcccaaacatcaaaggccttctttgaagagaaggccaaattcactattaggaaaagagaaattatttcctaactttatttca

SEQ ID NO: 62213 - DNA, 1327 bp, Homo sapiens
actgtgggaatgatttcagagccacagacggtaaaacaaatggcaaatggaattgaaaggtaaaaagctgaattcaggcatgtatttctaggattctcagctaaaatctcatgtagatgaaaatttttacaaaaacacacacttctccttttctccccgaaagccactcaataattggttttaggaacttaagacccagatttctgcgtttttgcacagttaatgctgataccaggttttaactttccaaaaagtattttaaaaaaaaactatgctgaacatgaaatgttgtgtctcaagcatacttaggcctaccattcactgaggaaaatgagttttagggaagaaaataatgaacaacacatacaaggagagataaaagaacactttggtactattggtcccatctctgcttttaagactttgcctgagattgcaactcctctctctctcaagaagtcctctccctctcccatctcccatctctctttcttttttttttttgagatagggtctcactctgtcacccaggctggagtgcagtggcacyatctcagctcactgcaacttcaacctcctgggctcaagggatcctcctgcctcagcctcccagggagctgggattacaggcgcatgccaccacgcctggctaatttttgtttgtttgtttgtttgtttgtagagacagagttttgccatgttgcccaggctggcctggaactcctgggttcaagcagtcttcccaccttggcctcccaaagtgttgcgattacaggcatgagccactctgccaggccaagaagtctttcttaacggacccattccaagcacttcaaccctagagtttgcatggcagtgctctgcgtttcccttcaggccagtaataggattctggatggcgcatgggctctggtattaattcctgccagcccacacctgatgccaggcacacagcaagcattgttgaaaggatgaaggcgccaacctccacctacttcaccaccttcatcttgtccaatactgtccaaactcactttggagaagaataaacattctttgctctactttccactgctcagcttcgggtaatttttcttcaaccctacccaccctacccatattatgcactttccttttgctaaccagcagaacgggttgagactttcctcaacattttctctggcaactgaattaggttaactgtgtctttctgctctgatttcctcttactgcccaataatcctgtcccaaacatcaaaggccttctttgaagagaaggccaaattcactattaggaaaagagaaattatttcctaactttatttca

SEQ ID NO: 62214 - DNA, 588 bp, Homo sapiens
tctcctttcttctccagtgtggcctaggaatgatgggaatgaacagtgaaactttcttatatttgacccctcctcaatgaatttgtgtaatattagcaaagccctacttatttagaagaaaaacaatgtgcttatctcaccatgtctgatgtttaaaaacaaaatagtcttaaacagcctgagtaacaacaggattatctagctgtctgagagagaaacttgggaatcattcttgacaccttctttctcttcattcttcacaggtaattgtcatcactacctcctrtagtgccacatcctagatctctccagaatccattacctgagctcagtctcttctgcaattgtcctagtccagaccttcatcatttcttacatggaatattacaaaagcctcttgattaatctccctgcctcccctctgcctccctcactggtccatttgcacattcctaatggagacatctttagaaatggcaactttgatcatgtcatatacttacccctaaaattattcattgatatcattgaccacttttagaatgaaatcaaactccttagcaaagtacactaaccctttcatactga

SEQ ID NO: 62215 - DNA, 2411 bp, Homo sapiens
gatcctggattgaatcctagaacagaagaagtatgttaataaaaaagctggtaaaatccaaagaaagtccatagtttagttaatagtattgtaatgataacaatttcttagttttgattattggatttggttgttaaagataataacaatagggaaactgggtgaagggcatatgggaactcactgtactatatttgcatcttttctgtctaaaattacttagaatacaaagtcaaaaaaataaatggggaccatgctgttaaaaaggggaagaaagaagaagggcaaaggcatgtatgacattttctgagagaggataaaatgcactataagaacagaggtcagaaaagctcaacataacagagaggtggaaaatgtttaaaaaaaaaaaaaaaaaaaaaaaaaaaagtacagaaaacccaagcagaaaagtcaccattgctcatttgaattcactcatttaaaaactggaggaccattcaagcagccatgggctagtgctgacctgcacacatgttaaggcccaacccagagctatgaacatcacacgcaggatttgctcaggatgtttcaaaagaagtgagtgcttggccagcttgggagtcgcctggacagtctggtggcctgtatgtcagaggcctcacagacatcctaaatagagaggtccagttccagagttgcctctataagcttggaaataacccagaagggttagtatttttggtctgactattgaatggcatctattattatggcgaaggtgtctatgtcactggatctgcaaggatcaagttgtcgggatgttcttccctatgcagagctcacgtgaattctaccacattttcttagacatattaagatatgcacatcttacaaggttgagagacattctacctctaaggtgacttggaatatctcttattgtctgttagagctaactatattttacttataggcaatcttgttttcagggttttgagagatactttaattacaaagcatttggacaagcatccccaacaagtgacagtctcaccatcattaactgtacagtcaaccatcagtgcatacatgatgccagttactccacccacctcattcgctgtcatggatatttgaaatgaacaaaatgttgatggcrctagcagtggagcccagctatagcatactgtgaagatgtgagggtgatatctgacatatcctcattcccattcacttccagagttcctttagcaattacggatcttgggatcagaagacctgagactggcttttgccccataatttctcactgtgtggctttaaacatgttatgaagcttacagtttgttttctcatctgtaaaatgaggataatgataacaaccagctcacaagattattttgagaatcaaaggtgttattacatgagaaagtgtttattaaagactaaaacacattataagtatgaattttaatttcactgccccaatacaatgaaacatatggcatttttaaatgtaaaaagaaccccacaatgcataaatttttagaaacaaataattttagtgaaaaaaaacccactttttaaaaaatctgaaacatcttttccagcactttgctgcatagtcagatgcttgaagcagaaattcttttctataatgtccttagcagtgtgagcccagtctggttgccaggcccataaaaacagaaagctgttgatcattagtctgtgtaaaacatagcacttgggcatctcacttggaacttgctttttaacttgtttcaagaggtggcgcttagaactgaagagagtattgtatggctgaatgagtgcaccaaaacaccaggccagactggggtgtggacacccacttatgtgtgcaactgcctttttaactaattaatcctctccctgcaagcctgaacgcggcctgtgaacttcacattccactggtaactggaaccctggatcctacaaaacctggaggctttcatgaaatgttatttgttcagggcgcttgaagcaatgatatctaatggagcagaagcaaggagaaaatgacctgagctttagtaaagaatggttgatttccatcacagatctggctctgtctctactctgcttagaaaccctggagggctcccttcctggacagactccaaactcttctcaaccaaccctgggctcatttttccacacactcataccactcacccccctttctctgccctccaatctctgtgcttgtgtttcctaatgtatagtttgcaacaaaataaactggtagtgcttgtttaaaatgtagatgccattgctgaacttcagggctaacgaatcagaaattctgggtgtagagacctcaggaatctgcttgtcaaaactagttcctccagcaaatcttgggagacaatgacctggccacacttaac

SEQ ID NO: 62216 - DNA, 2411 bp, Homo sapiens
gatcctggattgaatcctagaacagaagaagtatgttaataaaaaagctggtaaaatccaaagaaagtccatagtttagttaatagtattgtaatgataacaatttcttagttttgattattggatttggttgttaaagataataacaatagggaaactgggtgaagggcatatgggaactcactgtactatatttgcatcttttctgtctaaaattacttagaatacaaagtcaaaaaaataaatggggaccatgctgttaaaaaggggaagaaagaagaagggcaaaggcatgtatgacattttctgagagaggataaaatgcactataagaacagaggtcagaaaagctcaacataacagagaggtggaaaatgtttaaaaaaaaaaaaaaaaaaaaaaaaaaaagtacagaaaacccaagcagaaaagtcaccattgctcatttgaattcactcatttaaaaactggaggaccattcaagcagccatgggctagtgctgacctgcacacatgttaaggcccaacccagagctatgaacatcacacgcaggatttgctcaggatgtttcaaaagaagtgagtgcttggccagcttgggagtcgcctggacagtctggtggcctgtatgtcagaggcctcacagacatcctaaatagagaggtccagttccagagttgcctctataagcttggaaataacccagaagggttagtatttttggtctgactattgaatggcatctattattatggcgaaggtgtctatgtcactggatctgcaaggatcaagttgtcgggatgttcttccctatgcagagctcacgtgaattctaccacattttcttagacatattaagatatgcacatcttacaaggttgagagacattctacctctaaggtgacttggaatatctcttattgtctgttagagctaactatattttacttataggcaatcttgttttcagggttttgagagatactttaattacaaagcatttggacaagcatccccaacaagtgacagtctcaccatcattaactgtacagtcaaccatcagtgcatacatgatgccagttactccacccacctcattcgctgtcatggatatttgaaatgaacaaaatgttgatggcactagcagtggagcccagctatagcatactgtgaagatgtgagggtgatatctgacatatcctcattcccattcacttccagagttcctttagcaattacggatcttgggatcagaagacctgagactggcttttgccccataatttctcactgtgtggctttaaacatgttatgaagcttacagtttgttttctcatctgtaaaaygaggataatgataacaaccagctcacaagattattttgagaatcaaaggtgttattacatgagaaagtgtttattaaagactaaaacacattataagtatgaattttaatttcactgccccaatacaatgaaacatatggcatttttaaatgtaaaaagaaccccacaatgcataaatttttagaaacaaataattttagtgaaaaaaaacccactttttaaaaaatctgaaacatcttttccagcactttgctgcatagtcagatgcttgaagcagaaattcttttctataatgtccttagcagtgtgagcccagtctggttgccaggcccataaaaacagaaagctgttgatcattagtctgtgtaaaacatagcacttgggcatctcacttggaacttgctttttaacttgtttcaagaggtggcgcttagaactgaagagagtattgtatggctgaatgagtgcaccaaaacaccaggccagactggggtgtggacacccacttatgtgtgcaactgcctttttaactaattaatcctctccctgcaagcctgaacgcggcctgtgaacttcacattccactggtaactggaaccctggatcctacaaaacctggaggctttcatgaaatgttatttgttcagggcgcttgaagcaatgatatctaatggagcagaagcaaggagaaaatgacctgagctttagtaaagaatggttgatttccatcacagatctggctctgtctctactctgcttagaaaccctggagggctcccttcctggacagactccaaactcttctcaaccaaccctgggctcatttttccacacactcataccactcacccccctttctctgccctccaatctctgtgcttgtgtttcctaatgtatagtttgcaacaaaataaactggtagtgcttgtttaaaatgtagatgccattgctgaacttcagggctaacgaatcagaaattctgggtgtagagacctcaggaatctgcttgtcaaaactagttcctccagcaaatcttgggagacaatgacctggccacacttaac

SEQ ID NO: 62217 - DNA, 1246 bp, Homo sapiens
ttcacacactgtgaaacacacacccacacccacacactctacgggggtcacacaggcctctccagctgcgccctccctgcaccgtgcagacccccaggtctggcctcagaggggacacgcaagccccactggcagcagacctccggtgtcccgtcccctgtctgggctggcgaaagtgcaggtagctccttggtcgcctgacccagtgccttggatgctgcccgtgtgctgggccggaggacaccattccctcgcgcacaacaagccctgtgaggcatcacggaggggacgggagctcacacctcaacctagagaccccgtctactcacaaccacttytaaggaatgcagctaaacagggggctcagatccctgttcagggcccttctcacgatcccaccgtaacagcccagccctgcgggtgcctggctgcagtctccttctccccagcacttccagacctggcagcccggcccaataccagcggccgtggggcctgacctggactgaaccccggagcccggacaggctggtcactgcagggcggggcctgaattctgcagctgctcctgaggccaaaagctgttctgagggtggggtgggctgccaggctccaccgacgccctcccgcactgcaggcgcctctctggagcctcacatatgtccaccatcagattccatggtctgcggtctgtggagacggtggggaccgactctctcaacacctctgtgtgaactggatcccctgggggactggggggagtaacagaaaagctcacagagtgcccctgagcccagagctgtttctgatctctccttaaaagcgatctccgtggaaacagcccagatgaccatcagtggacgaatagatacacaactgtggtccatccacacaacagaatatcatccagtcacagaaagggaggaagcgctgatccatgctacaacatgggtgaaccccaaaaacatgataagagacgccggatacaaaaggccacgtagcatgtgattttacctccacggaatgcccagaagaggcaaaatctgcagagacagaaagcagaggagccagggggaggagctgagtgttcgggagaggggagtgagcagtgaccgatcacaggttcaggctttcctttggggcgatgacaatgttaggaagtcgagagaggtgtttacacaaccttgtgaagatattaagtgccactgaactgtgtgctttaaagtcgttcattttatgttacatg

SEQ ID NO: 62218 - DNA, 1246 bp, Homo sapiens
ttcacacactgtgaaacacacacccacacccacacactctacgggggtcacacaggcctctccagctgcgccctccctgcaccgtgcagacccccaggtctggcctcagaggggacacgcaagccccactggcagcagacctccggtgtcccgtcccctgtctgggctggcgaaagtgcaggtagctccttggtcgcctgacccagtgccttggatgctgcccgtgtgctgggccggaggacaccattccctcgcgcacaacaagccctgtgaggcatcacggaggggacgggagctcacacctcaacctagagaccccgtctactcacaaccacttttaaggaatgcagctaaacagggggctcagatccctgttcagggcccttctcacgatcccaccgtaacagcccagccctgcgggtgcctggctgcagtctccttctccccagcacttccagacctggcagcccggcccaataccagcggccgyggggcctgacctggactgaaccccggagcccggacaggctggtcactgcagggcggggcctgaattctgcagctgctcctgaggccaaaagctgttctgagggtggggtgggctgccaggctccaccgacgccctcccgcactgcaggcgcctctctggagcctcacatatgtccaccatcagattccatggtctgcggtctgtggagacggtggggaccgactctctcaacacctctgtgtgaactggatcccctgggggactggggggagtaacagaaaagctcacagagtgcccctgagcccagagctgtttctgatctctccttaaaagcgatctccgtggaaacagcccagatgaccatcagtggacgaatagatacacaactgtggtccatccacacaacagaatatcatccagtcacagaaagggaggaagcgctgatccatgctacaacatgggtgaaccccaaaaacatgataagagacgccggatacaaaaggccacgtagcatgtgattttacctccacggaatgcccagaagaggcaaaatctgcagagacagaaagcagaggagccagggggaggagctgagtgttcgggagaggggagtgagcagtgaccgatcacaggttcaggctttcctttggggcgatgacaatgttaggaagtcgagagaggtgtttacacaaccttgtgaagatattaagtgccactgaactgtgtgctttaaagtcgttcattttatgttacatg

SEQ ID NO: 62219 - DNA, 622 bp, Homo sapiens
tgtgtttgcctttctttctttctttttttctttctttttctttctttccttccttccttcgttccttccttcactagtgatgtgtttgcctttctccttccttcttccttcactagtgatgtgtttggctgtctttctttctttctccttctttctttccttccttccttccttctttctttcctcccttccttccttctttccttccttcactagtgatgtgtttgcctgtctttctttctttccttctttccttccttccttcactagtgatgtttgcctgtctttctttctccttgcttctttcctccctccctccctctctccctcccttctttcctttctttttttycccagctttctgacttaaggccttgatgcttctcctaaaactcactgtctgtatgtgagggagggtcagatttcagcttagtagagagagagagagagagagagagaggaagagagagagagagggagaggaagaccttggagcattttgcttggaagctctacagctgctccttgcactgctcactgttaaactcacccagctgcgcccaacccagccacatgtcacaatcccttcacattcgtaaacaagatcagtcatttctgggat

SEQ ID NO: 62220 - DNA, 1337 bp, Homo sapiens
tatgggtgctcagccagtcgggctgaatatatgaatgaataaaaataaaggacaatggaagaagtcacctggctctatgtttcctcttcctggcagaggaaacgtaactcacacaggactaggggaggtctgtggattctaagcactcctgctgcttctaagtggaagtctggagtccagggaagacatcaaaagtcactctaaggaagctgaaacacagggtatccagtccaggggcttggagacacggtgatggacagtgagaaaacaggcaggcttggttcagcgcctggagacaggcagaagcagggagctccacctcccatgggctggagggacatcgggaggagctatgtcacctgacttgggcccatccgagctagagccaagcacggccacctggacaggagcaggaaccctggaagacgcctgtcccatgaggaaaagctgcctccgcagagcagagagagaaggagagacaccggcttctccctgctcctggcctccagatttctgctgccagggcctcctttgtttgaccccacctagcagccagacagtgagggaggcaagaagggtggtttcctttcatgcccagcagggcccagagagtgtggagtggactcgagaatgaacaaaccgctccaattttgctggggaggatcccaaaaaacctttagaatgccctccacccccaccccctyacagatgggtggggttgtgggtgtgggcacagatggtgccagggagatggcatctgtctagagtacaggaagaaggtgccaagggctttcaggatttggggccactcctgttcttttgctaactttatctggatttctctctgaggaacctaaagttctttgcacgtatcccctcatttaatccatggaacagccaaatgatgcccattttacagactgagaaactgacaccagggacacccagctgggacttacatacacatggtgcagttgccaagccctctttccgcctgtctgggaggcccttgccagctcatccgatggtgccattgcatggctgaccccgcggagctctgggcagaggtatccaggggctctgctgctgctaatcacagcgtggactgtgcccgcaggccgcctgcacccactgtgagccatccgtgcacacagcagggcaagtagctcatctgcaaacacaggataggcaaaaacgcaaaggcaggagttagcaccaaggtatcgggggcaggtgagagccaggtgcgcacccccggcctgaggggtcgtctctgatgcaggcagccaggagcagacgaaggagccagccagctggcttcaactcttgttttgctt

SEQ ID NO: 62221 - DNA, 1337 bp, Homo sapiens
tatgggtgctcagccagtcgggctgaatatatgaatgaataaaaataaaggacaatggaagaagtcacctggctctatgtttcctcttcctggcagaggaaacgtaactcacacaggactaggggaggtctgtggattctaagcactcctgctgcttctaagtggaagtctggagtccagggaagacatcaaaagtcactctaaggaagctgaaacacagggtatccagtccaggggcttggagacacggtgatggacagtgagaaaacaggcaggcttggttcagcgcctggagacaggcagaagcagggagctccacctcccatgggctggagggacatcgggaggagctatgtcacctgacttgggcccatccgagctagagccaagcacggccacctggacaggagcaggaaccctggaagacgcctgtcccatgaggaaaagctgcctccgcagagcagagagagaaggagagacaccggcttctccctgctcctggcctccagatttctgctgccagggcctcctttgtttgaccccacctagcagccagacagtgagggaggcaagaagggtggtttcctttcatgcccagcagggcccagagagtgtggagtggactcgagaatgaacaaaccgctccaattttgctggggaggatcccaaaaaacctttagaatgccctccacccccaccccctcacagatgggtggggttgtgggtgtgggcacagatggtgccagggagatggcatctgtctagagtacaggaagaaggtgccaagggctttcaggatttggggccactcctgttcttttgctaactttatctggatttctctctgaggaacctaaagttctttgcacgtatcccctcatttaatccatggaacagccaaatgatgcccattttrcagactgagaaactgacaccagggacacccagctgggacttacatacacatggtgcagttgccaagccctctttccgcctgtctgggaggcccttgccagctcatccgatggtgccattgcatggctgaccccgcggagctctgggcagaggtatccaggggctctgctgctgctaatcacagcgtggactgtgcccgcaggccgcctgcacccactgtgagccatccgtgcacacagcagggcaagtagctcatctgcaaacacaggataggcaaaaacgcaaaggcaggagttagcaccaaggtatcgggggcaggtgagagccaggtgcgcacccccggcctgaggggtcgtctctgatgcaggcagccaggagcagacgaaggagccagccagctggcttcaactcttgttttgctt

SEQ ID NO: 62222 - DNA, 1337 bp, Homo sapiens
tatgggtgctcagccagtcgggctgaatatatgaatgaataaaaataaaggacaatggaagaagtcacctggctctatgtttcctcttcctggcagaggaaacgtaactcacacaggactaggggaggtctgtggattctaagcactcctgctgcttctaagtggaagtctggagtccagggaagacatcaaaagtcactctaaggaagctgaaacacagggtatccagtccaggggcttggagacacggtgatggacagtgagaaaacaggcaggcttggttcagcgcctggagacaggcagaagcagggagctccacctcccatgggctggagggacatcgggaggagctatgtcacctgacttgggcccatccgagctagagccaagcacggccacctggacaggagcaggaaccctggaagacgcctgtcccatgaggaaaagctgcctccgcagagcagagagagaaggagagacaccggcttctccctgctcctggcctccagatttctgctgccagggcctcctttgtttgaccccacctagcagccagacagtgagggaggcaagaagggtggtttcctttcatgcccagcagggcccagagagtgtggagtggactcgagaatgaacaaaccgctccaattttgctggggaggatcccaaaaaacctttagaatgccctccacccccaccccctcacagatgggtggggttgtgggtgtgggcacagatggtgccagggagatggcatctgtctagagtacaggaagaaggtgccaagggctttcaggatttggggccactcctgttcttttgctaactttatctggatttctctctgaggaacctaaagttctttgcacgtatcccctcatttaatccatggaacagccaaatgatgcccattttacagactgagaaactgasaccagggacacccagctgggacttacatacacatggtgcagttgccaagccctctttccgcctgtctgggaggcccttgccagctcatccgatggtgccattgcatggctgaccccgcggagctctgggcagaggtatccaggggctctgctgctgctaatcacagcgtggactgtgcccgcaggccgcctgcacccactgtgagccatccgtgcacacagcagggcaagtagctcatctgcaaacacaggataggcaaaaacgcaaaggcaggagttagcaccaaggtatcgggggcaggtgagagccaggtgcgcacccccggcctgaggggtcgtctctgatgcaggcagccaggagcagacgaaggagccagccagctggcttcaactcttgttttgctt

SEQ ID NO: 62223 - DNA, 1337 bp, Homo sapiens
tatgggtgctcagccagtcgggctgaatatatgaatgaataaaaataaaggacaatggaagaagtcacctggctctatgtttcctcttcctggcagaggaaacgtaactcacacaggactaggggaggtctgtggattctaagcactcctgctgcttctaagtggaagtctggagtccagggaagacatcaaaagtcactctaaggaagctgaaacacagggtatccagtccaggggcttggagacacggtgatggacagtgagaaaacaggcaggcttggttcagcgcctggagacaggcagaagcagggagctccacctcccatgggctggagggacatcgggaggagctatgtcacctgacttgggcccatccgagctagagccaagcacggccacctggacaggagcaggaaccctggaagacgcctgtcccatgaggaaaagctgcctccgcagagcagagagagaaggagagacaccggcttctccctgctcctggcctccagatttctgctgccagggcctcctttgtttgaccccacctagcagccagacagtgagggaggcaagaagggtggtttcctttcatgcccagcagggcccagagagtgtggagtggactcgagaatgaacaaaccgctccaattttgctggggaggatcccaaaaaacctttagaatgccctccacccccaccccctcacagatgggtggggttgtgggtgtgggcacagatggtgccagggagatggcatctgtctagagtacaggaagaaggtgccaagggctttcaggatttggggccactcctgttcttttgctaactttatctggatttctctctgaggaacctaaagttctttgcacgtatcccctcatttaatccatggaacagccaaatgatgcccattttacagactgagaaactgacaccagggacacccagctgggacttacatacacatggtgcagttgccaagccctctttcygcctgtctgggaggcccttgccagctcatccgatggtgccattgcatggctgaccccgcggagctctgggcagaggtatccaggggctctgctgctgctaatcacagcgtggactgtgcccgcaggccgcctgcacccactgtgagccatccgtgcacacagcagggcaagtagctcatctgcaaacacaggataggcaaaaacgcaaaggcaggagttagcaccaaggtatcgggggcaggtgagagccaggtgcgcacccccggcctgaggggtcgtctctgatgcaggcagccaggagcagacgaaggagccagccagctggcttcaactcttgttttgctt

SEQ ID NO: 62224 - DNA, 1886 bp, Homo sapiens
tgacaggagtaatccagttggctacaaaggccgtatctgtggaggcacagaggagtcttaaatctgttagtccaggtggtggcaatggggtcttagctacagaggaaagaagagataaaaatgggaaaaaaataatgtgaaagcaagtgagaataccaatttgttgccaagttttgtcctgctgattacattactgcagaaatagagacaaaaaaataaaaataaagaaaaaaagaaaagaataacaatactttcatgagagtcatgaacagtattgaccaaacaatctacaaactgagtttctgtactttctttaagagcctattttatcagatggttgaaaagtttaaaccaaccccgtaagacctcccattcccctcctttgaactgttattgatctagatttcccactggtgatgtgaaggtgcctaagggtcaagtgaaaaacaagaactaaaaataatgcacaccagcttcctcctcttccaactatgcccatgcctgggggtgtatccagtgctgtttttaggattattcttggaaaagcaggtcaatttaagacactttggaacctcagggctccatttggctttcctgtattaataacccagctgtagttaattatgttaatagaaatctagcaaaatgtgttggcaaactttggaaaattgtctctaaaaccttggcgattaataatgaatgctgtgcttggccagttcctttgacacagagtgactcactgtggataatgataaaatgaaatgtatcacattggaacacaaaatgataaatgcaagtctaattaaattattgtaagtgatagctggacctaactaagccatctgactcatggacactaatgggtgacatggtatccaacatcgctagttatcaaatgtttactagttctgctattggagccagtaccagtggggattcaccagaaacagggtaatgtgcagtcaagggaggaaaggagttccttagtcatgcctttcaatattctcaggaatgcatttagcattcagcagttttctagctgtacacttgcagagtcaagtggagagattttcatatattctgagcatttgtaagtattcaactttcagatttgaaatgtctacatttctcagactttttatgaattcacctcacagaggccaaggaactggcattactcagaaatgttagcttgagttttttggaacttgattgaatttaatttactgattgtatattcacatttcctatgaagaaaggaaagtgagcataaaaaaaaaatctcacattcactcaaagtcagataccacatactgaaattcaggaactcaagtaaatgccttaaagcaatgcacttcaataattagtgatgattcctccagtttcatgacataaaatggatatttatgtaataatgcctgatattggatacatagtgacaaaaacagagatatgaattcagagcaagcctgtgaagcttccagtgggatctagaaaaattcgtgaaaaagaaaagcactgtgttgagtgcttactccgtctcctaccctgtgccatccccctcatcatgtgctattggttaattgttacaacactgccagaaggtatttttattccctttttcagaagagaaaaagctgaggttcaaaaaaattaaataactcccaaggagttaattattagactgyggcaaagccaggattcaagctcaaatctgtctccaaaactcatattcattgtataattcccagaagaagaaaaaagcaaatctcacattgaataaacaagatgaatcaagtttggggacaaaaataatacagtaaacaaacactttattattaaatacattttaatttacttgaaacatctttttactaagtgctgct

SEQ ID NO: 62225 - DNA, 649 bp, Homo sapiens
taagatctacagtaagaacaaatctattcatgaaattgtgaagaaggaaaaataaatacatgctaattctgctgtcacacctcaaactgcagaagttatagtctcagtgtgtggtaacttgtattacactatgttgtcataattgttctattttattattgttgtttattttttactgtacctaattcataaactgaacttcaccataggtatgtatgtgtaggaaaaaagcgtaggctttatagggtttggttctatctggtttcaggcatccaccggagtcttggaacatctcctttgtggataggtgggggctactgtggtgggtaatgttctctagagaaacgctaataaacgcatgaaccttacggcatttttcatagcgttcttcagagtatgtcccaagggtrgaatgccagagcaggacttcatgaccataattatttactttttacctttttaaactgtaaggcctaatttacatgcagaaaagtatgttttaaaaaatacagtttgatgaattgttatcagtggaatatgcatgaaatcaccactcagatcaggaaatagaatattcttagcccagatgagtcccttcatgtgccctctcccagtcgtcacaacctcttcctcctgacagaggtaacca

SEQ ID NO: 62226 - DNA, 517 bp, Homo sapiens
cacaattgaaggaagaaaggccgggtggtgagtcttaattggcagaagccagggattcacatttattataataaatagtaaggtcagtgtgacagccaagagggtttgattcacaggaacttgtgaagatggttagtaaaacataacttccccaaggataaactagataagacaggcaaccaggaaatttgttagtaaacatagtccaagaagwtgagaatgggtgagcaagaggctaagggcagttgcctcagtaaaatgccatgatccttgaacttgagctaatattcagatcagaaagacactaaagaggtaggtgggtccccaaggggaaagaccctatgacaccacggcaaatatatactgtgacgacacctccagcccttcgtcaaagactgatgggcacttacttggttcattatacactgggtaaagggtaatatccagagattttaaagactattatacgcaaagtctgagttgatactgataccagactttcatagcattaacatgc

SEQ ID NO: 62227 - DNA, 517 bp, Homo sapiens
cacaattgaaggaagaaaggccgggtggtgagtcttaattggcagaagccagggattcacatttattataataaatagtaaggtcagtgtgacagccaagagggtttgattcacaggaacttgtgaagatggttagtaaaacataacttccccaaggataaactagataagacaggcaaccaggaaatttgttagtaaacatagtccaagaagatgagaatgggtgagcaagaggctaagggcagttgcctcagtaaaatgccatgatccttgaacttgagctaatattcagatcagaaagacactaaagaggtaggtgggtccccaaggggaaagaccctatgacaccacggcaaatatatactgtgacgacacctccagcccttcgtcaaagactgatgggcacttacttggttcaytatacactgggtaaagggtaatatccagagattttaaagactattatacgcaaagtctgagttgatactgataccagactttcatagcattaacatgc

SEQ ID NO: 62228 - DNA, 1454 bp, Homo sapiens
cagagtgtagccctgaggatcaaatgtggtcacgcgcgtgcacgcactgtgaagatggggccagctttcccggggagaggcatgacagtggcaaacactgtcctacttttaacagacaccgtcctacttttaacagacaccacacatcggctctgtcccaggtacatgctcgtgaatgcagccgaaagtacagaaacttccaaatgatagaacctcagcttagtgctgggaaatgagtgaaaaccaaacaccctcgacacacacccttaaagaagacagtcttaatctgttaagcgttgcagtcccaagtgagagcaaatgttgcaggcaagggaaagggataacttggattttcgggtggatcacctgaggtcaggagttcaagaccagcctggccaacatgggaaacctcatctctactaaaaatgcaaaaattagctaggcttggtgacaggtgcctgtaatcccagctactcaggaggcccaggcaggggaattgcttgaacctgggaggcgggggttgcagtgagcctagatcatgccactgcactccagcctgggtgacagagtagggtctttctcaaaaaaaaaaaaaagtaactgaaagaaagtaccaaatcaatattttactcaatgatttatgttcctgtaagagctctggccatcttgccagtacacattggcacgggtgtgcacacttgtcatcaacgcatgcatcatcagctgtaagcaagagcctgcatttgaatgtaggtgtgtcctggcaggcctgagaaagcatcagagcccagaatgaattcatttccttaaggagttttaggagaaacttaagcaatgaagatgagagttttgcattggtgcccagaaggtttggcgaaagcaacaggatgcccttcccagaggtggctgtaggggcctgtgtctgggcactagaggatggaggcagtgtgagagccctatgggcactgctgaggggtgcaaagtggctctccttttgccagttaagaaggcggctgtggggtgcatgcccmgtcagccctgtcataaccggcacgaatgatgttgtccgacaggcatggggatctacacaggaatgaaaacaactccaatttcggctactttctatgtgctgaccgttgtactgatggctttaaatattttattctaaagctgtttctcaccacgaccctatagatgttattgtctccattttatggcaacggaatcccaaaagggcagagaggtggtgagtgcagcaaaggaaactgtcaagcagtcatgaacacgggggtcccaggaagcagagatctggtacgggttgtctactgctgggtcacaaattacctcccaaactgagcatcttaaacaacaaacattcactgcttatttctgtgggtcaggagtttgggagcagcgtagctcaggggttctggtttagggtctctctgaggttg

SEQ ID NO: 62229 - DNA, 628 bp, Homo sapiens
gtgggcgtccctgccttctgtggaccaggagcccctggggagtcttgttccttgctcctggtggagcctggtcagcacctcactccgcggcttcgcgcttcgcagacacagcgcacctgtcatcggatgaattgattgggcgtcttgtcgaacaccagcacgggttgtgctaatgattcttagctccatcgcagcatagctgcaaatcaatcaccgtcttccagaattcctggatatttctttttttctaatcagaaagacagtagcaacacctggtgccgaagaagtgtagagatgctgatttgtgtttagagcatgctcagagttgaccttctcaaatcaagaggaaaataaagagaagaagagagaattcctcggccctggccagaaatggagggtggacttacagccaggtgctcaggtaccagattggtggttactcttctggcctcgagggcatcagcrttgctgacatgaacacagcagcccctttcagtcaggttttgctttcagttatccacgatcaaccaccgtctgaaaatatgcagtggatcactccagaaataaatcatttataaattctaaactgtgtgccattctgagtagagtgatgaagcctggcacagtc

SEQ ID NO: 62230 - DNA, 628 bp, Homo sapiens
gtgggcgtccctgccttctgtggaccaggagcccctggggagtcttgttccttgctcctggtggagcctggtcagcacctcactccgcggcttcgcgcttcgcagacacagcgcacctgtcatcggatgaattgattgggcgtcttgtcgaacaccagcacgggttgtgctaatgattcttagctccatcgcagcatagctgcaaatcaatcaccgtcttccagaattcctggatatttctttttttctaatcagaaagacagtagcaacacctggtgccgaagaagtgtagagatgctgatttgtgtttagagcatgctcagagttgaccttctcaaatcaagaggaaaataaagagaagaagagagaattcctcggccctggccagaaatggagggtggacttacagccaggtgctcaggtaccagattggtggttactcttctggcctcgagggcatcagcattgctgacatgaacacagcagcccctttcagtcaggttttgctttcagttayccacgatcaaccaccgtctgaaaatatgcagtggatcactccagaaataaatcatttataaattctaaactgtgtgccattctgagtagagtgatgaagcctggcacagtc

SEQ ID NO: 62231 - DNA, 628 bp, Homo sapiens
gtgggcgtccctgccttctgtggaccaggagcccctggggagtcttgttccttgctcctggtggagcctggtcagcacctcactccgcggcttcgcgcttcgcagacacagcgcacctgtcatcggatgaattgattgggcgtcttgtcgaacaccagcacgggttgtgctaatgattcttagctccatcgcagcatagctgcaaatcaatcaccgtcttccagaattcctggatatttctttttttctaatcagaaagacagtagcaacacctggtgccgaagaagtgtagagatgctgatttgtgtttagagcatgctcagagttgaccttctcaaatcaagaggaaaataaagagaagaagagagaattcctcggccctggccagaaatggagggtggacttacagccaggtgctcaggtaccagattggtggttactcttctggcctcgagggcatcagcattgctgacatgaacacagcagcccctttcagtcaggttttgctttcagttatccacgatcaaccaccgtctgaaaatatgcagtggatcactccagaaataaatcatttataarttctaaactgtgtgccattctgagtagagtgatgaagcctggcacagtc

SEQ ID NO: 62232 - DNA, 1641 bp, Homo sapiens
aactacatagtctctttcaactcttcttccactgctaactctgccattttcacatttcctaaatcaaattctcaagaaaaggaagagagagaatctgattattccaactacaaagagagtggttattaaaggttaagtgtgaaaggtcataacataggttattggccacccacaaaggctgtggttgaagtagaggaaggaggacagctaaaatgtgacacccatagtcaaaagctactgtttaacctttcggcacatcagcaccttgacatgcctgcattcttggttctgcaacgttttaagggaacttttctcatctccagcctatctttccctctatccttgtacctacttcttttcccacctactcttatgtatcaatcttccaagggttacatcctggttttattgtcttttagagactcctgggragaattctgtgtaatcaaaagaagtcactggattaggtaaagctcaggaggatggacgaggatactcctagtagttagcatgttcaaaagcctggaagcagggagagttttccttctaccttaggagaagtctttttagaaaacaaactctgaggcagatatttgcatgcagctggtttattaggaagttccagaacaacacctataaaggaatgagagaagcaggactgggtaaagacagaaattgacacagacctatgaggtctctttagctcagacctatgcgaggtctggagctgggatatcccttcagatttgtccacatcaaaacaagaaggcttgacctgtgtagtcctgcatcaacaagtcaatggattgaactattcctggaaataggtgtagacttggacaagttaggtcccttcaaccaaggataatttccagtgactgcattagctatagactgccagcagccaacaatttcatagctgggggataaatgcattagttctgaagaggaaatctgagtagtataccagagcatccaatccagtataggccaatccttgcatcccttggattcacgtgattcacacggtaaatttattccatctgggaagaactccttcaagtttctggttggtctctttttctgggaaactttacaaaagaaagatgagtagcatgaactatatatatagcttttgccaatatagctggttttacagctgaaactgaaactcattttctccctcctctgcaacctattccagattgttttgaccctaatttagcacctctgatgatctagatggcttacctggtggggttacccagacagtcatccctgagtgcctaggcttctggtaaccacaccatactgtggctgctgtacttgtccatttcttgaaaaaatcaggaaagtatcaagacatgatccagtagataacctgacaaccaaacttatgctttccagaccccactgagtacccctaggaggccattaggaggatggcctcctaatggccggaatcaattacctctaccaacattgttttcttttattgcttactggactcttgacatgaagaaacttaaatgaccctacagtagccatagtttaaagtttaatgggactcttactgggccccctggtaaaacaatttccactttagaatccagaacctagtttagaatccacagaaccaaa

SEQ ID NO: 62233 - DNA, 1117 bp, Homo sapiens
  misc_feature (1)...(1117): n = A,T,C or G
tgcataggatgataaaaaaatttaaatccctttgaaagctcacatttcaatataagaaacaattacagtaaaatgtaaaatctataagaaagatacacaatttaagctaattttagctactgtaacaaaaaagcacatattggttcaaatatgaagtaaatatttctcattcataatatttcatattttaaaatggatgattgatcagtgtgtaaatcatctccaagacagagttcagggatccaggatccttccctcttttagtctattctgctcctgggtgtagtggttagcagcagaagaggaaatagatgcacacacatcacctctactcacatcccattggctgtaactccatcatatggccacatcgaactgcaagagaagccaggaagtgtagttattctctctactcagaaagaggatggatgtggtaatcagttagccagattctaccacaagaggtacatccagagtgctattggaccatgaatttctcaaagtgtgaaagtttttcaccactttccaggggtggcaatgagggtgaggtggggtggggaggtatcataaagttaacttcattcagaagagatgtattaagtacattcatcttggcagtcactgtattagacatcaacaagaatcagctgctatcttcagaaaatttatagtttactttcttggagcatcatcttcagcatcacctgggagattatgggcaactcgaaactactgaatcagaatctaaatgattcatatgtaagtgaaagsttaagaagcactggtgtagggcgtttcatagctactaccttcagagaacgttattctgagccccacgaattcgagagtcaaattctacaaggacaagagcctgaggtcaggaagttggtaggcatgggtaagtgctgctggagagaatgaagctgtccagaagcccaggagagatcactaaggaggggccagtgtgggtatctgggcagggcatcaatatccactggcttacacagtgatgaattnnnnnnnnnnnnnnnnnnnnnnnnnnnnnnnnnnnnnnnnnnnnnnnnnnnnnnnnnnnnnnnnnnnnnnnnnnnnnnnnnnnnnnnnnnnnnnnnnnnna

SEQ ID NO: 62234 - DNA, 1215 bp, Homo sapiens
ttaaaacatacgtatcattwgttccagttttaaccacttcttgatattaacaaattccattttatgactatagcatacactgtttctgtgtgtctttcataaaaggagtactttgaaatttaataatgcaattcatctgggttagcatttggtgaatgagtctacattcatcttatcactccaggagtcccaaaatctaattagtaggagtcccagaaaaagaaaaaaggagatagtaagaaacaatttcctaaagaagtgatacaagaatattttctagaatgaaaagacatgagttgcaagcccactgaatttctggcatagcaatttttaaaaagatacttctgtcatggaaattccaaacattaggtgtaaaaacaagatcttcaaagcttccagagagaaaaacagatcacatagaaaagaaaaacttcaaacttcttagcagacacatgcaagaatctggaagataatggagacttgccttttacattttgagagagacatgtttgatctggaattctttctagagcttctagaggctatacttcaccaaaaatggtagataaaaccaagaatgaggaagacatgaagcacaggagacaagaaatgcaatagtatagaggcaaaggcaatccccagggtaactgggaagggaatgcccagcgtggtgattttgcagcagacctaggagcaacaagtataattggagtaggaagacagagggctccaggagacataacaccagaaaaaaaaaatagaattgacaggatatgtgacaggtttaaacacatggacaattgagagatgcttaatagagccattgagggagtgtgggaaaactagccagcagacatcttagcatataaaatacattttttaatatatattatatatatatttatttgtgtataatcacatatattatatataaatgtatatatgaggcaattgatggcttcagaaaaacaaaaacattgtatatagataaaagtgtgatagtttattagttagcacaactataagccatatttatatagacataataataaaagtgctaaatgtgaactaaacaaaattaagaaatgtgcaagacttgaatgaacaaacaaataaacttaagaacagaataaaatacgtcttgagtaaggagaggtatgccatgttcctgataaggagactgggttttatatagaagatacatttcccaaatgc

SEQ ID NO: 62235 - DNA, 1215 bp, Homo sapiens
ttaaaacatacgtatcattakttccagttttaaccacttcttgatattaacaaattccattttatgactatagcatacactgtttctgtgtgtctttcataaaaggagtactttgaaatttaataatgcaattcatctgggttagcatttggtgaatgagtctacattcatcttatcactccaggagtcccaaaatctaattagtaggagtcccagaaaaagaaaaaaggagatagtaagaaacaatttcctaaagaagtgatacaagaatattttctagaatgaaaagacatgagttgcaagcccactgaatttctggcatagcaatttttaaaaagatacttctgtcatggaaattccaaacattaggtgtaaaaacaagatcttcaaagcttccagagagaaaaacagatcacatagaaaagaaaaacttcaaacttcttagcagacacatgcaagaatctggaagataatggagacttgccttttacattttgagagagacatgtttgatctggaattctttctagagcttctagaggctatacttcaccaaaaatggtagataaaaccaagaatgaggaagacatgaagcacaggagacaagaaatgcaatagtatagaggcaaaggcaatccccagggtaactgggaagggaatgcccagcgtggtgattttgcagcagacctaggagcaacaagtataattggagtaggaagacagagggctccaggagacataacaccagaaaaaaaaaatagaattgacaggatatgtgacaggtttaaacacatggacaattgagagatgcttaatagagccattgagggagtgtgggaaaactagccagcagacatcttagcatataaaatacattttttaatatatattatatatatatttatttgtgtataatcacatatattatatataaatgtatatatgaggcaattgatggcttcagaaaaacaaaaacattgtatatagataaaagtgtgatagtttattagttagcacaactataagccatatttatatagacataataataaaagtgctaaatgtgaactaaacaaaattaagaaatgtgcaagacttgaatgaacaaacaaataaacttaagaacagaataaaatacgtcttgagtaaggagaggtatgccatgttcctgataaggagactgggttttatatagaagatacatttcccaaatgc

SEQ ID NO: 62236 - DNA, 1215 bp, Homo sapiens
ttaaaacatacgtatcattagttccagttttaaccacttcttgatattaacaaattccattttatgactatagcatacactgtttctgtgtgtctttcataaaaggagtactttgaaatttaataatgcaattcatctgggttagcatttggtgaatgagtctacattcatcttatcactccaggagtcccaaaatctaattagtaggagtcccagaaaaagaaaaaaggagatagtaagaaacaatttcctaaagaagtgatacaagaatattttctagaatgaaaagacatgagttgcaagcccactgaatttcyggcatagcaatttttaaaaagatacttctgtcatggaaattccaaacattaggtgtaaaaacaagatcttcaaagcttccagagagaaaaacagatcacatagaaaagaaaaacttcaaacttcttagcagacacatgcaagaatctggaagataatggagacttgccttttacattttgagagagacatgtttgatctggaattctttctagagcttctagaggctatacttcaccaaaaatggtagataaaaccaagaatgaggaagacatgaagcacaggagacaagaaatgcaatagtatagaggcaaaggcaatccccagggtaactgggaagggaatgcccagcgtggtgattttgcagcagacctaggagcaacaagtataattggagtaggaagacagagggctccaggagacataacaccagaaaaaaaaaatagaattgacaggatatgtgacaggtttaaacacatggacaattgagagatgcttaatagagccattgagggagtgtgggaaaactagccagcagacatcttagcatataaaatacattttttaatatatattatatatatatttatttgtgtataatcacatatattatatataaatgtatatatgaggcaattgatggcttcagaaaaacaaaaacattgtatatagataaaagtgtgatagtttattagttagcacaactataagccatatttatatagacataataataaaagtgctaaatgtgaactaaacaaaattaagaaatgtgcaagacttgaatgaacaaacaaataaacttaagaacagaataaaatacgtcttgagtaaggagaggtatgccatgttcctgataaggagactgggttttatatagaagatacatttcccaaatgc

SEQ ID NO: 62237 - DNA, 1437 bp, Homo sapiens
cagccaaaccatgtcagaggtatcatttttattataatggacagcaaacaattttgttctttgctctggagcatgacagtatattttccaaggctgtctgctatataaacatccttgaaaaagatagtctagaacaaaaatctgtgagttctgctctcaggatgtgcagaaactcaaaggattcatggataactgttttccaatagtataatgatacagtatagtgtttactttgatgtataaagaagaggacaattaaaaggaagagtaaattgagaaaaaaagataccaaaaaataaacacagctaaaataaaaaatcctatgtctaattaggcaagagcaggagctacagaaatgcaggtagaacagttgacctatgcttaaatcatggtgagaaaataactcaaaagctttctgtgggaaacagaaagtataagaaactttttagagaatatagaggttatctgaaagggcatcttccggttgcagtggcagcttgaaaggacattattccttctaaaattatgtytctaagaaatagtacctagcaaatctgtaatgaattagggtaaaggtaaaaagaaaatcgaagtttatctatgtggctattacaaagatatagtctaaagctactattctctacttgtaacgtgctgacttacagaaaatgggggtggtggatggtcaccactgtccagctttttggagaaatttcaaactggatccttttaatcctacccagtttgaggagcttgagactttccctttcatgtcctcatagcccttctgtttgaggggctaatgggtgtcctaaggtattgaaagtggggaggaattattatatgagggtaattatagttgtatcaaataactgaaaaaccttaggggattaaagttcatttgtcattcacaaaatccatttctaatgcccctagtcaggtgatattttagtcagttttgctgcattcatatagaaaccccaaatcctagtgcttacaacaatagtccacattatatagtggtggctgcagatgttttgtctctgcttgattccatttggctctactccaagtgtttttttattcctgggtccaggataaagaagaaatctctctgtgggatgtaccattttcatagcaggaggcagaagcaaaagaactggcagaatttcaaagtgcctcccaaagcttctggaaggtggtagcatgtatcatgtatgctcacatcgcattagctcaagcacatcgcacagttgagcttgacatcaataggcaggggttcttccagtgaagtgaatatacctgtgagttataatataacttatgatggattgttgtcttggaaaacatttcttcaaactgtcacccagggatctttcctccatcttagggtaaaaccattgtttagggtctctctgagaaaaagataaaagtagt

SEQ ID NO: 62238 - DNA, 1437 bp, Homo sapiens
cagccaaaccatgtcagaggtatcatttttattataatggacagcaaacaattttgttctttgctctggagcatgacagtatattttccaaggctgtctgctatataaacatccttgaaaaagatagtctagaacaaaaatctgtgagttctgctctcaggatgtgcagaaactcaaaggattcatggataactgttttccaatagtataatgatacagtatagtgtttactttgatgtataaagaagaggacaattaaaaggaagagtaaattgagaaaaaaagataccaaaaaataaacacagctaaaataaaaaatcctatgtctaattaggcaagagcaggagctacagaaatgcaggtagaacagttgacctatgcttaaatcatggtgagaaaataactcaaaagctttctgtgggaaacagaaagtataagaaactttttagagaatatagaggttatctgaaagggcatcttccggttgcagtggcagcttgaaaggacattattccttctaaaattatgtttctaagaaatagtacctagcaaatctgtaaygaattagggtaaaggtaaaaagaaaatcgaagtttatctatgtggctattacaaagatatagtctaaagctactattctctacttgtaacgtgctgacttacagaaaatgggggtggtggatggtcaccactgtccagctttttggagaaatttcaaactggatccttttaatcctacccagtttgaggagcttgagactttccctttcatgtcctcatagcccttctgtttgaggggctaatgggtgtcctaaggtattgaaagtggggaggaattattatatgagggtaattatagttgtatcaaataactgaaaaaccttaggggattaaagttcatttgtcattcacaaaatccatttctaatgcccctagtcaggtgatattttagtcagttttgctgcattcatatagaaaccccaaatcctagtgcttacaacaatagtccacattatatagtggtggctgcagatgttttgtctctgcttgattccatttggctctactccaagtgtttttttattcctgggtccaggataaagaagaaatctctctgtgggatgtaccattttcatagcaggaggcagaagcaaaagaactggcagaatttcaaagtgcctcccaaagcttctggaaggtggtagcatgtatcatgtatgctcacatcgcattagctcaagcacatcgcacagttgagcttgacatcaataggcaggggttcttccagtgaagtgaatatacctgtgagttataatataacttatgatggattgttgtcttggaaaacatttcttcaaactgtcacccagggatctttcctccatcttagggtaaaaccattgtttagggtctctctgagaaaaagataaaagtagt

SEQ ID NO: 62239 - DNA, 1437 bp, Homo sapiens
cagccaaaccatgtcagaggtatcatttttattataatggacagcaaacaattttgttctttgctctggagcatgacagtatattttccaaggctgtctgctatataaacatccttgaaaaagatagtctagaacaaaaatctgtgagttctgctctcaggatgtgcagaaactcaaaggattcatggataactgttttccaatagtataatgatacagtatagtgtttactttgatgtataaagaagaggacaattaaaaggaagagtaaattgagaaaaaaagataccaaaaaataaacacagctaaaataaaaaatcctatgtctaattaggcaagagcaggagctacagaaatgcaggtagaacagttgacctatgcttaaatcatggtgagaaaataactcaaaagctttctgtgggaaacagaaagtataagaaactttttagagaatatagaggttatctgaaagggcatcttccggttgcagtggcagcttgaaaggacattattccttctaaaattatgtttctaagaaatagtacctagcaaatctgtaatgaattagggtaaaggtaaaaagaaaatcgaagtttatctatgtggctattacaaagatatagtctaaagctactattctctacttgtaacgtgctgacttacagaaaatgggggtggtggatggtcaccactgtccagctttttggagaaatttcaaactggatccttttaatcctacccagtttgaggagcttgagactttccctttcatgtcctcatagcccttctgtttgaggggctaaygggtgtcctaaggtattgaaagtggggaggaattattatatgagggtaattatagttgtatcaaataactgaaaaaccttaggggattaaagttcatttgtcattcacaaaatccatttctaatgcccctagtcaggtgatattttagtcagttttgctgcattcatatagaaaccccaaatcctagtgcttacaacaatagtccacattatatagtggtggctgcagatgttttgtctctgcttgattccatttggctctactccaagtgtttttttattcctgggtccaggataaagaagaaatctctctgtgggatgtaccattttcatagcaggaggcagaagcaaaagaactggcagaatttcaaagtgcctcccaaagcttctggaaggtggtagcatgtatcatgtatgctcacatcgcattagctcaagcacatcgcacagttgagcttgacatcaataggcaggggttcttccagtgaagtgaatatacctgtgagttataatataacttatgatggattgttgtcttggaaaacatttcttcaaactgtcacccagggatctttcctccatcttagggtaaaaccattgtttagggtctctctgagaaaaagataaaagtagt

SEQ ID NO: 62240 - DNA, 1437 bp, Homo sapiens
cagccaaaccatgtcagaggtatcatttttattataatggacagcaaacaattttgttctttgctctggagcatgacagtatattttccaaggctgtctgctatataaacatccttgaaaaagatagtctagaacaaaaatctgtgagttctgctctcaggatgtgcagaaactcaaaggattcatggataactgttttccaatagtataatgatacagtatagtgtttactttgatgtataaagaagaggacaattaaaaggaagagtaaattgagaaaaaaagataccaaaaaataaacacagctaaaataaaaaatcctatgtctaattaggcaagagcaggagctacagaaatgcaggtagaacagttgacctatgcttaaatcatggtgagaaaataactcaaaagctttctgtgggaaacagaaagtataagaaactttttagagaatatagaggttatctgaaagggcatcttccggttgcagtggcagcttgaaaggacattattccttctaaaattatgtttctaagaaatagtacctagcaaatctgtaatgaattagggtaaaggtaaaaagaaaatcgaagtttatctatgtggctattacaaagatatagtctaaagctactattctctacttgtaacgtgctgacttacagaaaatgggggtggtggatggtcaccactgtccagctttttggagaaatttcaaactggatccttttaatcctacccagtttgaggagcttgagactttccctttcatgtcctcatagcccttctgtttgaggggctaatgggtgtcctaaggtattgaaagtggggaggaattattatatgagggtaattatagttgtatcaaatarctgaaaaaccttaggggattaaagttcatttgtcattcacaaaatccatttctaatgcccctagtcaggtgatattttagtcagttttgctgcattcatatagaaaccccaaatcctagtgcttacaacaatagtccacattatatagtggtggctgcagatgttttgtctctgcttgattccatttggctctactccaagtgtttttttattcctgggtccaggataaagaagaaatctctctgtgggatgtaccattttcatagcaggaggcagaagcaaaagaactggcagaatttcaaagtgcctcccaaagcttctggaaggtggtagcatgtatcatgtatgctcacatcgcattagctcaagcacatcgcacagttgagcttgacatcaataggcaggggttcttccagtgaagtgaatatacctgtgagttataatataacttatgatggattgttgtcttggaaaacatttcttcaaactgtcacccagggatctttcctccatcttagggtaaaaccattgtttagggtctctctgagaaaaagataaaagtagt

SEQ ID NO: 62241 - DNA, 1437 bp, Homo sapiens
cagccaaaccatgtcagaggtatcatttttattataatggacagcaaacaattttgttctttgctctggagcatgacagtatattttccaaggctgtctgctatataaacatccttgaaaaagatagtctagaacaaaaatctgtgagttctgctctcaggatgtgcagaaactcaaaggattcatggataactgttttccaatagtataatgatacagtatagtgtttactttgatgtataaagaagaggacaattaaaaggaagagtaaattgagaaaaaaagataccaaaaaataaacacagctaaaataaaaaatcctatgtctaattaggcaagagcaggagctacagaaatgcaggtagaacagttgacctatgcttaaatcatggtgagaaaataactcaaaagctttctgtgggaaacagaaagtataagaaactttttagagaatatagaggttatctgaaagggcatcttccggttgcagtggcagcttgaaaggacattattccttctaaaattatgtttctaagaaatagtacctagcaaatctgtaatgaattagggtaaaggtaaaaagaaaatcgaagtttatctatgtggctattacaaagatatagtctaaagctactattctctacttgtaacgtgctgacttacagaaaatgggggtggtggatggtcaccactgtccagctttttggagaaatttcaaactggatccttttaatcctacccagtttgaggagcttgagactttccctttcatgtcctcatagcccttctgtttgaggggctaatgggtgtcctaaggtattgaaagtggggaggaattattatatgagggtaattatagttgtatcaaataactgaaaaaccttaggggattaaagttcatttgtcattcacaaaatccatttctaatgcccctagtcaggtgatattttagtcagttttgctgcattcatatagaaaccccaaatcctagtgcttacaacaatagtccacattatatagtggtggctgcagatgttttgtctctgcttgattccatttggctctactccaagtgtttttttattcctgggtccaggataaagaagaaatctctctgtgggatgtaccattttcatagcaggaggcagaagcaaaagaactggcagaatttcaaagtgcctcccaaagcttctggaaggtggtagcatgtatcatgtatgctcacatcrcattagctcaagcacatcgcacagttgagcttgacatcaataggcaggggttcttccagtgaagtgaatatacctgtgagttataatataacttatgatggattgttgtcttggaaaacatttcttcaaactgtcacccagggatctttcctccatcttagggtaaaaccattgtttagggtctctctgagaaaaagataaaagtagt

SEQ ID NO: 62242 - DNA, 985 bp, Homo sapiens
tgtgaatacctaggactatgctaacttctagggatacgaagtggaatgatcttgtttttgcataaggagcttcatgggtactattatagaagcatacaatagtaattgtaatgtctggggaaggaggagagtgctgagtgtttgcagccctgaatggtctttaaagatgtggtattttccagacagcagactttatcttacatatctttgtactgagtgctcatcctggtctkgctacattgtttgggaaactacaaatgtgatgagacctaaggctgcagaggttgttaggttttcaattttagaaggccttatatattgtgtatggattttggccttcatatctgaagattttgtgagtagagaatcataggatgggtttctcagaactcctttcatactcactgtcatggcggggaacacaaaagaattacatagattcagaggttatgtcagtatttggcaactctttcatttgttcactcttgggtccttaatttataaaatgagacatttcacatagtcagggttattcatgtctatttgtgttctctgtctgaacacattccacattttaatcatggtgagagaaaacattacgcttggctgaaagttctattattcatttcttttcactccttgggtattgtgaagtctctgaaatcaaagctattggcacttaatttgagacatctgggaagtataaccccctagaaaagagatgggatgtcatggcatgtgccttggattctctgcagacatcaaaacgtagaacatgaaaagggaagacgtggaaggccttcattttgcatgcttccaagggcaggggcttagcattctaaacacgttgcacttggtccaaccacagtgggactccctgcttgctttcaagttctggttataacctactgacttcaaccactgaccaccaaccactctcatctcaagaaattctggctcaatagtcacctaattctggcctagg

SEQ ID NO: 62243 - DNA, 732 bp, Homo sapiens
gtggatgaattgcaatgtcatcaaactcatgwcaactgcgttctataaataagatatatttttggtaaacactttttctcaggtcaactgtaaaagctggaacatcttcacttgatgtacatgttaattaacatatatttgcagaatgcctactttgctagctctttatataaatacaatagagaaaaataggtatgaatcctatctcatgaagttgtagcaatgtgccacaaacagcaaccagttttccaaactgctttttcttttttttttttttttttttttttgagacggagtcttgttctgccacccaggctggagtgcagtgccatgatctcggctcactgcaacctttgcctccttggttcaagcaatgcctcagcctcccaagtagctgggatgatggtattatcccaagtagtgtgcaccactgtgcttggctagtttttctatttttaatagagcctgggtttcgccatgttgaccaggctggtttcgaactcctgacctcaggtgatacacccaccttgtcctccctaagtgctgggattacaggtgtgagccactgcgcccagcccaacaggccccagtgtgtgatgttccactccctgtgtccatgtgttctcattgttcaactctcacttatgagtgagagcacgcagtgtttggttttctcttcctgtgttactttgctgagaatgatggtttccagcttcatccatgtccctgcaa

SEQ ID NO: 62244 - DNA, 879 bp, Homo sapiens
aggaaatctaggaaattaaaacagagaagataaagctttccttttgtctcacactaggagagtgataccttgcatgcttttccttaagcttcttaagcctgtagcatgagtgattcagaacaatgtaggagtaattactcgagtgtttcagtctttgagaatctgcaataggctgtttacctacaggttctgaattcttttgcaggtatgcagttgactatgtcatcctctcctgacgctgtccaagatcctctgaaggccatgtcaatcgctaggtctaaataaggatcagagagcaaagctgaggagtaaactcatacataaacagaacacaggacattctacttaaagacacaaataataaggaaaaatgcctcatgaagtagcctcatgaagtagcaatccttctgcaattactgaacatttccctgcaacttttctgtgtttttcaggcaattttctttattttccctcacatgaaatgacacagacctgcaatttctcactcctttcattcaaattgtgtgtcattttccaggggctcaggcacttactgttttatatccgtacaaatgtgtgtatgtatatatatgcacacatatagggaaaaataggaacattgwcttgacaaaatatgctttatactatctttaacaaaagagacaataggtaggtctaaaaaatacattttgaaagtgtaagtataaaaagaagatacaacaattgttttacaagagaaagtgttcctcagtttcccattcttttccaaaggtaaaatagaatgaaactgatcaaaagtaatgactgtgaataggaccacagtctcaagtcattctttctacttcttaggccaagaatgtattagaattgccatggcat

SEQ ID NO: 62245 - DNA, 879 bp, Homo sapiens
aggaaatctaggaaattaaaacagagaagataaagctttccttttgtctcacactaggagagtgataccttgcatgcttttccttaagcttcttaagcctgtagcatgagtgattcagaacaatgtaggagtaattactcgagtgtttcagtctttgagaatctgcaataggctgtttacctacaggttctgaattcttttgcaggtatgcagttgactatgtcatcctctcctgacgctgtccaagatcctctgaaggccatgtcaatcgctaggtctaaataaggatcagagagcaaagctgaggagtaaactcatacataaacagaacacaggacattctacttaaagacacaaataataaggaaaaatgcctcatgaagtagcctcatgaagtagcaatccttctgcaattactgaacatttccctgcaacttttctgtgtttttcaggcaattttctttattttccctcacatgaaatgacacagacctgcaatttctcactcctttcattcaaattgtgtgtcattttccaggggctcaggcacttactgttttatatccgtacaaatgtgtgtatgtatatatatgcacacatatagggaaaaataggaacattgacttgacaaaatatgctttatactatctttaacaaaagagacaataggtaggtctaaaaaatacattttgaaagtgtaagtataaaaagaagatwcaacaattgttttacaagagaaagtgttcctcagtttcccattcttttccaaaggtaaaatagaatgaaactgatcaaaagtaatgactgtgaataggaccacagtctcaagtcattctttctacttcttaggccaagaatgtattagaattgccatggcat

SEQ ID NO: 62246 - DNA, 1253 bp, Homo sapiens
gcccccgagtttccaaacatcgcccaccttgtcactcccacactgaggtgctcagtcataggaaggacaatggtagctccactccaaagccttgggggcctagaaagttgagaaggcagtgggaagcttgtgacgacagaacatgctggtgaggggaattgggccctgtcaggtgcaacaagaaaagtatgtggcatttggccgggtgcgatggctcatgcctgtaatcccagcactttgggaggccgagatgggtggatcacaaggtcaggagatcgagaccatcctggctaacacagtgaaaccctgtctctactgaaaatacaaaaaattagccgggcgcggtggtgagcgcctgtagtcccagctacttgggaggctgaggcaggaaaatggcatgaacccaggaggcagaggttgcagtgagctgagatcgtgccactgcactccagcctgggtgacagagggagactctgtctcaaaaaagaaaaaaagaaaagtatgtggcatttgtatggaacactttagcttctctgagcctctgggccatccccagggtctttgggccaggagtcctggatccactagacatatgaggagactgaggcttggagaggggcagtgccatggcttctttcacatactgtatctccaagggaagcctataaagccagaagcccaggctggaaggcctagctgtggctctaggttctcaggataagcatagaccccagccaaggtgaccaggaagcttaggtttggcctttccagaggagatttgggagtcctcatctccctacattgcagcagtcttccttgaggcataggagaagctggccaggagtagccaactagtgcccccacccaggccctcccctgctccttttctaccctgcgctgaggcagctcacccagggaacaaactcctttctgcaactgcccccatgcaggctgccctctcttgaagaaagtctctttggtgtatgagcttctcaggatctggccagcattgctgacttccctatctgtgcctttatatccactttcagggcaggctgtaccatatcctgagtcatcactactgtctgtggcatggactggcccttacatcctrtcctgcctacagccttgggaacccaaagttccaagcacagctctacagcctggtcccttcctctaggctgtcagaccaatgcccacactatctgctgtttgtgttctaggataacctctgagaatgtggctgagcggtt

SEQ ID NO: 62247 - DNA, 659 bp, Homo sapiens
attttcaattatctttctgtaactctctagtcaggcaaaaacccagaagcagcaacttctgaggataaagggttattttatatgccaaaaaatttaatgccctgataacatggataaaaagcctaactattggtggctactccaatcgttatgcttttcctctaggaaaaagaaacacatttcctctaggcagtttggtacattctgcctccatggatcacccttcccaaagtgtaactttccttaaaaataaaacattacaaacttctgttgtacactaagcatatgaagtctataataattcaaatataaatcatttacattttacattttgaaaagtaacattaaaatgtttgttacttcattacccaaataacgaatacacattgcaaagccaaattctcatttaacctgaataaataatatatctaataggtaataaatctaaaactccctttaatggyatgaatttatttaggtgccatgagtacaatatagatctgctaatgtccattacatagaacagggatttgaggtgagggaagatgaaattaatttctcttcatcacagattaaagacgtacccttccacattaatcatttttgctaggtgttatttttccaacatggcagcaacatagttttcaaggtaaaaggat

SEQ ID NO: 62248 - DNA, 1114 bp, Homo sapiens
ttattatgctctctgtaatgtcctaagacttccaacaagccctaatctcatatttcacctgcttccccaacctttttctcaagcacttaaaaaccttctatgatcatatcaagtccagtgcctttttctacaccaaagacattcaatacactttggatattgctgcaattgctgctgccggctaaatgttaaaagtacaaagtactctgtcttcctttaataatcattactatcaaaatcaaatgaaaatggggctagaaaacacactaaattcttctaaaccgctataattttcttaacccacttcagtttattttatttaggatgtgattacatgggccaatgtttatttttaggatagtactaactgcccttttgcttattatttgtgttttctcatctcctgattcccaaaagctctgtaaatgtagagtaattcaacctacataataaattacaaccaaaagattatgactgtactataacaactgcctattaccacaagagaaaatgaggaatttcaccagggttctttaagtgaattctttgtaatactttcaaataagtattgtttcctaaaaataataaacaggaagaataatgtgttacctactgagtttatccatttacttgttcacttattcactcactcattgatttccactagcacatactcatttattcagtaaatacacattggcttatccacctgtttgagcaaataaaaattttttgttgatatagcaacttctatattctctagtatctgttaaaaatacatttttctccataagggacagatgcttgttttctgttgcctatctctcctcccattacattccttttctcttttggaaggtatctaactctttcaagcaatagaactatcattctcaaaactgtagactaaatggtaaatatcatcttaatttttaaaatctatgactcatcctggaggaaaagtctgtattcttttcacccacctgttattctaaatagattaaaatttatactaccaattatccttataaaaacaataattacaytttcaattttactgttcatgagaacaacatacagttgtgggattcatgagcagaattcataaaaatat

SEQ ID NO: 62249 - DNA, 590 bp, Homo sapiens
ataaaacatatacatttatttacaagtgcataaatatataaatatggctataatagaaaaataaataccaattttctctgtctcttttttcttctttttttttwtaaaaaaaaaacaatatatagtctttctgggatatcagcttctgcctaaattgtgagaggtggtgtttcaaaagacacacgcaccagtggccccggggagagctgcattccaggttcctgtcctacgtaggcccctacggggtgctggggacaccagtctcctccactcacttggcaggagtcaggactgtccacctcttcaactggcacaaggcccaagcagcatgggggccctgaggggagaaagagtaggaaccattaaaatccagattgaccgaggagccaacacccagtgacactgggccaatctctatctgtggtggaggtggttacactggctctggaaaggggacagaaacctacaaccgagacaagggcacttctgttccctccaaggtctctcatcaaaacagggagggccacttgccacccatttcccactcatgctgggactgtagagactcccgcactgagcccacaccacag

SEQ ID NO: 62250 - DNA, 654 bp, Homo sapiens
gcatagttttatccacagagagatattactctgaaaatgcaacttgcatttctgtattttgaccacattcttgtcctgcttgacaggtacttttacttcctattttgctagaatttatacaaacagctttcaaacactgtccttgaaaaccaaatactgcattttctcacttataagtgggagctaaattttgggtactcatggacataaagatggcaatgacagacactgaggatgactagaggagggaagacggaaagggggcaagggtggaaaaactattgggtgctgtgctcactatctgggtgacaggatcatttgtatcctaaacctcagcaatatgcaatatacccatgtaacaaacctacatacgtatcccttgaatctaaaataaaaggtttttttagctttttattttttcatattaaaatgcctttatatatattttttgagctttctctttayacttcaagttctgggatacatgtgcagaacatgcaggtttgttacataggtatacacgtgccatggtggtttgctgcacccatcaacccatcacctacattaggtatttctcctaatgctgtccctccccaaggccccaaccctccaacaggccccggtgtgtgatgttcccttccttgtgtccatgca

SEQ ID NO: 62251 - DNA, 1024 bp, Homo sapiens
ggagttgcacagtggcagagggaaagtaacataaattgaccaggatactaagaagagaatgaaataaccgaggtaaatgtatgattagtcatctccagcttaaaaaaaaaaataaaatatattactactaggtcaaaggattttgaaagctactcatttacaagttttactcaatactatgatactaagtaatcatatggtaatgatacttgatctcaaaactcatttgttgtaccatatattatggttttgtgtctatatcatatattttcctacttatgtgtttaaattctattttgttatgtcaatctctttgatgccacctatttttccatgttcaatcaaatgctaattgcagtcaaaagccagttttagcataatttactctccataaagcagactttaaatatccacatatctaacactttgttcttgttccaggtaacaagatgctctaactaaatatttttctccctatgtgttctccaggttcacagtggaacaggaaattgatttaaaagatgttttgaaggctcttggaataactgaaattttcatcaaagatgcaaatttgacaggcctctctggtaagaaataaacacaaatttttaaaaatgttattccataagagctttattaaatgatgatattaaatcctctatttactatggagttctggggtaaaatatagttaccacttgccaaataaatctagcatgaaatacatttaacctctacaagcaaaactatagatatagtcttaacattaagtttatattatctrgttcgtatcatatctttgacaatagattatattctccggaagacctgtcttaaacatctttggattccccatcccatctgacataatgccttgtagaataggtaatcaataaatgtgttgattgactatctcaatatgtcccattgtagtaaatcatgtaagaaagaaagaagggaggataaatgagtgactgctgtgagagctagaccaaagatcctttttaaaagaataaagaatacc

SEQ ID NO: 62252 - DNA, 809 bp, Homo sapiens
tgttatagagaaggtctatttttgtaatggaaatggatgactgtcagcatttggattaatagataatcctcttggaaggtgtaaggggaaggagaaagagagtactaaatccttcagcatcaagtacaagctttaataaaggagccaataaaataaaggaattaagaagacacaccaaaagccatattcaggtcagactcaagtgctgttgatttatgctggacctactcttaccctctgcccttgtttgttctctttcttcttgcgcctgtaaactacaaggctctatttctctcattgccataattccaattcttctactttcttgcctggattaytgcaacagctaacaaagttcatcttcctgcccccagctgtttgcttatctgattcaccctgcacagcagctgccacagctatcttctaaaatcaaagcattgtgtcccattacttctggacaaatccaggctctctagcatcatcgtcaaagctcttaaaattatgtcctctcctactccccaacctcctcatagctcaggctccagctggaccttcaagagatccccactggggatgtaaagtttctctcactttacaaatggaatcttctgcttggaatgtccatcttgccttctctgacttttcactcttactaattgtttaagagcaagttgaaaggtcgacacatcagagacgtttgacctgacattcctcttccttcctaaatggtttacttttccttatgtggaatctggtagcactttgcacacacctctgttagcacgtttcattttctcctagactatttg

SEQ ID NO: 62253 - DNA, 717 bp, Homo sapiens
gtacctaattgtttcattcacgtgaaaaccaaggcatagaaaatcaggaattcagatmttggttttaaactatttctttttgcaatcatagtaactgggttcagaataattctatgaacaaagtctattttggatttttctctgttttcattgctcagtagttctcaaaactggctgatagcttattaccattagaagtagaatgccatgtggattactactgactccacccaacccctagcacttagatatccagcccagaattcaactttgttccagaatttagaatcatacccagggctctgtactaaaccaataaaattgaggaaaggaaagacaagagaaggtgttttcttaaactctcagtttaaataagaaattccattgtttttttctcatgaggcgtacccaagatgttgtaaaaaattcatcgatagcctaaaactagatttcctgttgacttctgggttcttcaagataggtttttaatcagtcgatctatattagccttcagtaaagaaagtattgaggctgacaggtcaaagaaatgcctcacagtctcttggtaataatcactgcccaccatcaactaaaatgtagtcactgttattccagtggtgaaaatttttttctcccttttctaggacagactagcaaacctttgagtgtctaatgtacatcttcctatgatcatctcttttcccccaggaaaaaatt

SEQ ID NO: 62254 - DNA, 717 bp, Homo sapiens
gtacctaattgtttcattcacgtgaaaaccaaggcatagaaaatcaggaattcagatattggttttaaactatttctttttgcaatcatagtaactgggttcagaayaattctatgaacaaagtctattttggatttttctctgttttcattgctcagtagttctcaaaactggctgatagcttattaccattagaagtagaatgccatgtggattactactgactccacccaacccctagcacttagatatccagcccagaattcaactttgttccagaatttagaatcatacccagggctctgtactaaaccaataaaattgaggaaaggaaagacaagagaaggtgttttcttaaactctcagtttaaataagaaattccattgtttttttctcatgaggcgtacccaagatgttgtaaaaaattcatcgatagcctaaaactagatttcctgttgacttctgggttcttcaagataggtttttaatcagtcgatctatattagccttcagtaaagaaagtattgaggctgacaggtcaaagaaatgcctcacagtctcttggtaataatcactgcccaccatcaactaaaatgtagtcactgttattccagtggtgaaaatttttttctcccttttctaggacagactagcaaacctttgagtgtctaatgtacatcttcctatgatcatctcttttcccccaggaaaaaatt

SEQ ID NO: 62255 - DNA, 717 bp, Homo sapiens
gtacctaattgtttcattcacgtgaaaaccaaggcatagaaaatcaggaattcagatattggttttaaactatttctttttgcaatcatagtaactgggttcagaataattctatgaacaaagtctattttggatttttctctgttttcattgctcagtagttctcaaaactggctgatagcttattaccrttagaagtagaatgccatgtggattactactgactccacccaacccctagcacttagatatccagcccagaattcaactttgttccagaatttagaatcatacccagggctctgtactaaaccaataaaattgaggaaaggaaagacaagagaaggtgttttcttaaactctcagtttaaataagaaattccattgtttttttctcatgaggcgtacccaagatgttgtaaaaaattcatcgatagcctaaaactagatttcctgttgacttctgggttcttcaagataggtttttaatcagtcgatctatattagccttcagtaaagaaagtattgaggctgacaggtcaaagaaatgcctcacagtctcttggtaataatcactgcccaccatcaactaaaatgtagtcactgttattccagtggtgaaaatttttttctcccttttctaggacagactagcaaacctttgagtgtctaatgtacatcttcctatgatcatctcttttcccccaggaaaaaatt

SEQ ID NO: 62256 - DNA, 717 bp, Homo sapiens
gtacctaattgtttcattcacgtgaaaaccaaggcatagaaaatcaggaattcagatattggttttaaactatttctttttgcaatcatagtaactgggttcagaataattctatgaacaaagtctattttggatttttctctgttttcattgctcagtagttctcaaaactggctgatagcttattaccattagaagtagaatgccatgtggattactactgactccacccaacccctagcacttagatatccagcccagaattcaactttgttccagaatttagaatcayacccagggctctgtactaaaccaataaaattgaggaaaggaaagacaagagaaggtgttttcttaaactctcagtttaaataagaaattccattgtttttttctcatgaggcgtacccaagatgttgtaaaaaattcatcgatagcctaaaactagatttcctgttgacttctgggttcttcaagataggtttttaatcagtcgatctatattagccttcagtaaagaaagtattgaggctgacaggtcaaagaaatgcctcacagtctcttggtaataatcactgcccaccatcaactaaaatgtagtcactgttattccagtggtgaaaatttttttctcccttttctaggacagactagcaaacctttgagtgtctaatgtacatcttcctatgatcatctcttttcccccaggaaaaaatt

SEQ ID NO: 62257 - DNA, 1054 bp, Homo sapiens
ctcagccttatggctaagatcaagtgtagaaaatatgcctcaatttctattttcttgagtgtttttatcaggaataggaattgagttttgtttaaaagccccccacccccgcttttttttttttttttttttttttgcgccaagtgtggtggctcatgcctgtaatcccagcacttcgggaggctgaggcagcagaattgcttgagacaaggagtttaagaccaacctaggcaaaatagtgaggccccatttctaacaaatcaaaataaaaatattagccaggtagagtggtacatgcctgtagtcctacctgcttggaagactgaggcagaagaattgcttgagcccaggaggttgaggctgcaatgagctatgattgcaccactgcactccagcctgggtgacagtgagaccctgtctccaaaaaaaatttgtttaataaaataaaattaaaagaattttaaaaagccttttccccaactgaggataatatacrattaatcttcttatatctactaatatagtatttaaattaatagatttcctcatattgaatcatccttgcattccagaaataaatcctacctggtcatggtatattttcttaatgtggtgtttggattctgttttctaatatttactctagcatttttgcattgatattggataatggcttgtagtcttgtttacacattagagtcattttcctccataccacttttaggagaacagtttccatgaaagggagcttgatgataacagaaaagataaagagacaatctaacacagaaatagacctgtcttagggccacataaattaaggggaggttgctgactcctctcttactgactaggtgaccttagagaagttattcctcctcttctgccctcaattttcttgcctatcaattagacgaacctactcaaaagattgtgtgagaataaaatgacaagatgtctatacagacttcagtacaatgcctgacacaatgtaagctcacgtaaacactggtataccctattttattaaaaagaactacttttcttctactgc

SEQ ID NO: 62258 - DNA, 737 bp, Homo sapiens
gcatgaaaatcacccaagctgtaaaaccaagtacatacttttttctgttaatgggtgtttgctacctatttgtttctcgatgcctgccaatttgctcacaaagagtggcgggcagtgaaattaaaaaagaaaatattgtgaaaaagactgatgtaatctcagtccaagtttccaccatcgagtaccattctgtaggaaattcagttccctgttgaatacccgaggattgctggagattgctttcatgtcctgwtcgtcacttgccactgcccttgcccacaccacctctgctgctccagagtcattccacagatttcagttactcaaagtctgtctgaccccctccagcagtaggtgggtatttcctggccccaccttaaccttctgacgagaatctgcattttagcaagctccccagggattcagatccacatcaagatttgagaagctctgttcttggtcacctcttggcctctcatagaggcattgtcccaagcatggacaccgaggggcctttagccctccttgcccctgttgtatgtaccactcttaactaaaggcatccaaggaccaaggacgatacacagcacaggaaaactaaaaagtggatctcagacatctctgcaccctaagcttctcacagcatttacaggataggggctattttcttctttaaaccttaggctaaaactatgttgctagggcctacatcttcttcaaattaaagtcacctttgt

SEQ ID NO: 62259 - DNA, 820 bp, Homo sapiens
aggtaggaggtggagtccactgttcatgtatgtcataacatatagctggtaggttgtattgttgttcaaaatagccactggcctctccctacagatcgccatctaacatactatttattacttggaaaagtgacttagcctcccttgcctcagtttccttgtctgtaaaatggggctcataacagcatctaccaaatagggttgttgtaaaaactgagtgagttcgtatgtgggaagcatgtcaagcagtggttggcacaaagtgagtgctgtcgcagtgttagctgtggtgattgtcatcgccgtcatcatcatacgtgcatccactagaggggcatcgatggcgattgtaacttgggcagtggagggagaccagagctggttagggtgctacccacccagcccccagagcagacagacccccaggacactgactgccaatcrcatcacgttttctcgacctgaaaaataaccagctgtgcaaacaatgcgcgcttccttccagggctgctgggaaaccactgaggggcggtgccctggtgagcttccccagcccttgtcagtcctccttggggagaaggtccaagactggaatgccccagaacccattggctggtgagggagaagctcctggcctcttctttggctggtgagggagaagctcttggctcccacaggccggcagctgtggggagagcaacattccagcaaaaggcagagcaggcaggctcaggctggggacccacgccggctgcccgggacccacgctggctgcctcaggactcatgccggctgcccgggacccacactggctgccctg

SEQ ID NO: 62260 - DNA, 1988 bp, Homo sapiens
tttttaatttacagcaattttctttagctaatatgaacctgctgctataaaaagctaaattttctgagcactttttatgtgtcaggcactattccaagtgctttatacctgtcactcatttaaacctcagagcagtcctatgatataggtactatttattttattttattttatttttggtagaaataggatcttactatattgcccaggccagtctcaaactcctgggctcaagcaatcctcctgcctcagcctcctgagtagctagggctataggtgcgtgccaccatgcctggcatatttgtttctgttttatttttttggtagagacagtgtctcaccatgttgcccaggctggtctcaaatcctggtctcaagtgatcctcccgcctcagcctcccaaagtgctgggattacaggcgtgagccacgatacctggccctaggacgtaggtacaatttttacacccattttacggataaggagacaaaggcacaaaatgatcacacagtttgaaagtagcagggctgggattccaacctaagcagcctctgttcttaaccactagaccctctgcacatagtaacttctcagcaaacggtaccatgtctctattattgtatatttcatgtttgttactgtgtatttatgtttcacgtgttgctgtggatcccaccaccgcctccctgcagctattctgygagttcctcacaaacagggttgccagagaatgcaggacactcaattaactttgaatttcagataaacaataaatactttttttttttttgagatggagtttcgctcttgttgcccaggctggagtgcagtggcgtgacctcggctcactgcaacctctgcctcctgggttcaagcgattcccctgcctcactcagcctccagagtagctggaattacaggcacccaccaccatacctgtctaattttttgtatttttagtagagacggggtttcaccacaattggccaggctagtctcgaactcctgacctcaggtgatccacccgcctcggcctcccaaagtgctgggattacaggcgtgagccaccggcctcaacgaatacattttattatgcgtatgtctctactgatggggaagtgggattttttttccagggtggagccgttacgagtaaaggcataagcctttgtgtgatgagctttcatttcttttggggaaatacccagcagtgggattgctgggttacatcactttgcaccccaaacagcaacaagtaaatgttccgttgcggctgctcccatccttggtgacatttcatattgtgggtctttttaactttgttctcctgtctaccaggaacaatgtggaggaagaaacagaggacaaaaacgggctgctaagttagggaaaataaaaacacgctgcattcataagtccactccaggggtgaagggtttgcggaaagaaacagctagaagtcggttttatgttgttcagggaattcgattcccctggcaggtaaactctggaatgggccttgagcgagatgcactgagcatctgcctggtgctgccccgccttttacagaaagaggatgcagagaaaaatggtgcccactccttcagcaggccagagactgcggtgtgggctgcttgctacctgcccatcctgcggccagccacaccctccccagttgtagggtccgctctgttcccttccaacaatgataaagcgggtgtttctggagcactcagagtagccaggtgcttggctgagggcttgctctgggagttccccttcatccttgttcatttcatgagacagctactatcatttcccccgaccccgtgcagattcgggaatggaggcttgtcgtgttcagggaatatgcaaatttacccttggccaaggttatcctccgggccgaacctcgcacctaagcagtctgtctcctctctttgtcatttctatattctgcactgtcagtctccccttttctttctcag

SEQ ID NO: 62261 - DNA, 1988 bp, Homo sapiens
tttttaatttacagcaattttctttagctaatatgaacctgctgctataaaaagctaaattttctgagcactttttatgtgtcaggcactattccaagtgctttatacctgtcactcatttaaacctcagagcagtcctatgatataggtactatttattttattttattttatttttggtagaaataggatcttactatattgcccaggccagtctcaaactcctgggctcaagcaatcctcctgcctcagcctcctgagtagctagggctataggtgcgtgccaccatgcctggcatatttgtttctgttttatttttttggtagagacagtgtctcaccatgttgcccaggctggtctcaaatcctggtctcaagtgatcctcccgcctcagcctcccaaagtgctgggattacaggcgtgagccacgatacctggccctaggacgtaggtacaatttttacacccattttacggataaggagacaaaggcacaaaatgatcacacagtttgaaagtagcagggctgggattccaacctaagcagcctctgttcttaaccactagaccctctgcacatagtaacttctcagcaaacggtaccatgtctctattattgtatatttcatgtttgttactgtgtatttatgtttcacgtgttgctgtggatcccaccaccgcctccctgcagctattctgtgagttcctcacaaacagggttgccagagaatgcaggacactcaattaastttgaatttcagataaacaataaatactttttttttttttgagatggagtttcgctcttgttgcccaggctggagtgcagtggcgtgacctcggctcactgcaacctctgcctcctgggttcaagcgattcccctgcctcactcagcctccagagtagctggaattacaggcacccaccaccatacctgtctaattttttgtatttttagtagagacggggtttcaccacaattggccaggctagtctcgaactcctgacctcaggtgatccacccgcctcggcctcccaaagtgctgggattacaggcgtgagccaccggcctcaacgaatacattttattatgcgtatgtctctactgatggggaagtgggattttttttccagggtggagccgttacgagtaaaggcataagcctttgtgtgatgagctttcatttcttttggggaaatacccagcagtgggattgctgggttacatcactttgcaccccaaacagcaacaagtaaatgttccgttgcggctgctcccatccttggtgacatttcatattgtgggtctttttaactttgttctcctgtctaccaggaacaatgtggaggaagaaacagaggacaaaaacgggctgctaagttagggaaaataaaaacacgctgcattcataagtccactccaggggtgaagggtttgcggaaagaaacagctagaagtcggttttatgttgttcagggaattcgattcccctggcaggtaaactctggaatgggccttgagcgagatgcactgagcatctgcctggtgctgccccgccttttacagaaagaggatgcagagaaaaatggtgcccactccttcagcaggccagagactgcggtgtgggctgcttgctacctgcccatcctgcggccagccacaccctccccagttgtagggtccgctctgttcccttccaacaatgataaagcgggtgtttctggagcactcagagtagccaggtgcttggctgagggcttgctctgggagttccccttcatccttgttcatttcatgagacagctactatcatttcccccgaccccgtgcagattcgggaatggaggcttgtcgtgttcagggaatatgcaaatttacccttggccaaggttatcctccgggccgaacctcgcacctaagcagtctgtctcctctctttgtcatttctatattctgcactgtcagtctccccttttctttctcag

SEQ ID NO: 62262 - DNA, 1988 bp, Homo sapiens
tttttaatttacagcaattttctttagctaatatgaacctgctgctataaaaagctaaattttctgagcactttttatgtgtcaggcactattccaagtgctttatacctgtcactcatttaaacctcagagcagtcctatgatataggtactatttattttattttattttatttttggtagaaataggatcttactatattgcccaggccagtctcaaactcctgggctcaagcaatcctcctgcctcagcctcctgagtagctagggctataggtgcgtgccaccatgcctggcatatttgtttctgttttatttttttggtagagacagtgtctcaccatgttgcccaggctggtctcaaatcctggtctcaagtgatcctcccgcctcagcctcccaaagtgctgggattacaggcgtgagccacgatacctggccctaggacgtaggtacaatttttacacccattttacggataaggagacaaaggcacaaaatgatcacacagtttgaaagtagcagggctgggattccaacctaagcagcctctgttcttaaccactagaccctctgcacatagtaacttctcagcaaacggtaccatgtctctattattgtatatttcatgtttgttactgtgtatttatgtttcacgtgttgctgtggatcccaccaccgcctccctgcagctattctgtgagttcctcacaaacagggttgccagagaatgcaggacactcaattaactttgaatttcagataaacaataaatactttttttttttttgagatggagtttcgctcttgttgcccaggctggagtgcagtggcgtgacctcggctcactgcaacctctgcctcctgggttcaagcgattcccctgcctcactcagcctccagagtagctggaattacaggcacccaccaccataccygtctaattttttgtatttttagtagagacggggtttcaccacaattggccaggctagtctcgaactcctgacctcaggtgatccacccgcctcggcctcccaaagtgctgggattacaggcgtgagccaccggcctcaacgaatacattttattatgcgtatgtctctactgatggggaagtgggattttttttccagggtggagccgttacgagtaaaggcataagcctttgtgtgatgagctttcatttcttttggggaaatacccagcagtgggattgctgggttacatcactttgcaccccaaacagcaacaagtaaatgttccgttgcggctgctcccatccttggtgacatttcatattgtgggtctttttaactttgttctcctgtctaccaggaacaatgtggaggaagaaacagaggacaaaaacgggctgctaagttagggaaaataaaaacacgctgcattcataagtccactccaggggtgaagggtttgcggaaagaaacagctagaagtcggttttatgttgttcagggaattcgattcccctggcaggtaaactctggaatgggccttgagcgagatgcactgagcatctgcctggtgctgccccgccttttacagaaagaggatgcagagaaaaatggtgcccactccttcagcaggccagagactgcggtgtgggctgcttgctacctgcccatcctgcggccagccacaccctccccagttgtagggtccgctctgttcccttccaacaatgataaagcgggtgtttctggagcactcagagtagccaggtgcttggctgagggcttgctctgggagttccccttcatccttgttcatttcatgagacagctactatcatttcccccgaccccgtgcagattcgggaatggaggcttgtcgtgttcagggaatatgcaaatttacccttggccaaggttatcctccgggccgaacctcgcacctaagcagtctgtctcctctctttgtcatttctatattctgcactgtcagtctccccttttctttctcag

SEQ ID NO: 62263 - DNA, 1988 bp, Homo sapiens
tttttaatttacagcaattttctttagctaatatgaacctgctgctataaaaagctaaattttctgagcactttttatgtgtcaggcactattccaagtgctttatacctgtcactcatttaaacctcagagcagtcctatgatataggtactatttattttattttattttatttttggtagaaataggatcttactatattgcccaggccagtctcaaactcctgggctcaagcaatcctcctgcctcagcctcctgagtagctagggctataggtgcgtgccaccatgcctggcatatttgtttctgttttatttttttggtagagacagtgtctcaccatgttgcccaggctggtctcaaatcctggtctcaagtgatcctcccgcctcagcctcccaaagtgctgggattacaggcgtgagccacgatacctggccctaggacgtaggtacaatttttacacccattttacggataaggagacaaaggcacaaaatgatcacacagtttgaaagtagcagggctgggattccaacctaagcagcctctgttcttaaccactagaccctctgcacatagtaacttctcagcaaacggtaccatgtctctattattgtatatttcatgtttgttactgtgtatttatgtttcacgtgttgctgtggatcccaccaccgcctccctgcagctattctgtgagttcctcacaaacagggttgccagagaatgcaggacactcaattaactttgaatttcagataaacaataaatactttttttttttttgagatggagtttcgctcttgttgcccaggctggagtgcagtggcgtgacctcggctcactgcaacctctgcctcctgggttcaagcgattcccctgcctcactcagcctccagagtagctggaattacaggcacccaccaccatacctgtctaattttttgtatttttagtagagacggggtttcaccacaattggccaggctagtctcgaactcctgacctcaggtgatccacccgcctcggcctcccaaagtgctgggattacaggcgtgagccaccggcctcaacgaatacattttattatgcgtatgtctctactgatggggaagtgggrttttttttccagggtggagccgttacgagtaaaggcataagcctttgtgtgatgagctttcatttcttttggggaaatacccagcagtgggattgctgggttacatcactttgcaccccaaacagcaacaagtaaatgttccgttgcggctgctcccatccttggtgacatttcatattgtgggtctttttaactttgttctcctgtctaccaggaacaatgtggaggaagaaacagaggacaaaaacgggctgctaagttagggaaaataaaaacacgctgcattcataagtccactccaggggtgaagggtttgcggaaagaaacagctagaagtcggttttatgttgttcagggaattcgattcccctggcaggtaaactctggaatgggccttgagcgagatgcactgagcatctgcctggtgctgccccgccttttacagaaagaggatgcagagaaaaatggtgcccactccttcagcaggccagagactgcggtgtgggctgcttgctacctgcccatcctgcggccagccacaccctccccagttgtagggtccgctctgttcccttccaacaatgataaagcgggtgtttctggagcactcagagtagccaggtgcttggctgagggcttgctctgggagttccccttcatccttgttcatttcatgagacagctactatcatttcccccgaccccgtgcagattcgggaatggaggcttgtcgtgttcagggaatatgcaaatttacccttggccaaggttatcctccgggccgaacctcgcacctaagcagtctgtctcctctctttgtcatttctatattctgcactgtcagtctccccttttctttctcag

SEQ ID NO: 62264 - DNA, 1988 bp, Homo sapiens
tttttaatttacagcaattttctttagctaatatgaacctgctgctataaaaagctaaattttctgagcactttttatgtgtcaggcactattccaagtgctttatacctgtcactcatttaaacctcagagcagtcctatgatataggtactatttattttattttattttatttttggtagaaataggatcttactatattgcccaggccagtctcaaactcctgggctcaagcaatcctcctgcctcagcctcctgagtagctagggctataggtgcgtgccaccatgcctggcatatttgtttctgttttatttttttggtagagacagtgtctcaccatgttgcccaggctggtctcaaatcctggtctcaagtgatcctcccgcctcagcctcccaaagtgctgggattacaggcgtgagccacgatacctggccctaggacgtaggtacaatttttacacccattttacggataaggagacaaaggcacaaaatgatcacacagtttgaaagtagcagggctgggattccaacctaagcagcctctgttcttaaccactagaccctctgcacatagtaacttctcagcaaacggtaccatgtctctattattgtatatttcatgtttgttactgtgtatttatgtttcacgtgttgctgtggatcccaccaccgcctccctgcagctattctgtgagttcctcacaaacagggttgccagagaatgcaggacactcaattaactttgaatttcagataaacaataaatactttttttttttttgagatggagtttcgctcttgttgcccaggctggagtgcagtggcgtgacctcggctcactgcaacctctgcctcctgggttcaagcgattcccctgcctcactcagcctccagagtagctggaattacaggcacccaccaccatacctgtctaattttttgtatttttagtagagacggggtttcaccacaattggccaggctagtctcgaactcctgacctcaggtgatccacccgcctcggcctcccaaagtgctgggattacaggcgtgagccaccggcctcaacgaatacattttattatgcgtatgtctctactgatggggaagtgggattttttttccagggtggagccrttacgagtaaaggcataagcctttgtgtgatgagctttcatttcttttggggaaatacccagcagtgggattgctgggttacatcactttgcaccccaaacagcaacaagtaaatgttccgttgcggctgctcccatccttggtgacatttcatattgtgggtctttttaactttgttctcctgtctaccaggaacaatgtggaggaagaaacagaggacaaaaacgggctgctaagttagggaaaataaaaacacgctgcattcataagtccactccaggggtgaagggtttgcggaaagaaacagctagaagtcggttttatgttgttcagggaattcgattcccctggcaggtaaactctggaatgggccttgagcgagatgcactgagcatctgcctggtgctgccccgccttttacagaaagaggatgcagagaaaaatggtgcccactccttcagcaggccagagactgcggtgtgggctgcttgctacctgcccatcctgcggccagccacaccctccccagttgtagggtccgctctgttcccttccaacaatgataaagcgggtgtttctggagcactcagagtagccaggtgcttggctgagggcttgctctgggagttccccttcatccttgttcatttcatgagacagctactatcatttcccccgaccccgtgcagattcgggaatggaggcttgtcgtgttcagggaatatgcaaatttacccttggccaaggttatcctccgggccgaacctcgcacctaagcagtctgtctcctctctttgtcatttctatattctgcactgtcagtctccccttttctttctcag

SEQ ID NO: 62265 - DNA, 1988 bp, Homo sapiens
tttttaatttacagcaattttctttagctaatatgaacctgctgctataaaaagctaaattttctgagcactttttatgtgtcaggcactattccaagtgctttatacctgtcactcatttaaacctcagagcagtcctatgatataggtactatttattttattttattttatttttggtagaaataggatcttactatattgcccaggccagtctcaaactcctgggctcaagcaatcctcctgcctcagcctcctgagtagctagggctataggtgcgtgccaccatgcctggcatatttgtttctgttttatttttttggtagagacagtgtctcaccatgttgcccaggctggtctcaaatcctggtctcaagtgatcctcccgcctcagcctcccaaagtgctgggattacaggcgtgagccacgatacctggccctaggacgtaggtacaatttttacacccattttacggataaggagacaaaggcacaaaatgatcacacagtttgaaagtagcagggctgggattccaacctaagcagcctctgttcttaaccactagaccctctgcacatagtaacttctcagcaaacggtaccatgtctctattattgtatatttcatgtttgttactgtgtatttatgtttcacgtgttgctgtggatcccaccaccgcctccctgcagctattctgtgagttcctcacaaacagggttgccagagaatgcaggacactcaattaactttgaatttcagataaacaataaatactttttttttttttgagatggagtttcgctcttgttgcccaggctggagtgcagtggcgtgacctcggctcactgcaacctctgcctcctgggttcaagcgattcccctgcctcactcagcctccagagtagctggaattacaggcacccaccaccatacctgtctaattttttgtatttttagtagagacggggtttcaccacaattggccaggctagtctcgaactcctgacctcaggtgatccacccgcctcggcctcccaaagtgctgggattacaggcgtgagccaccggcctcaacgaatacattttattatgcgtatgtctctactgatggggaagtgggattttttttccagggtggagccgttacgagtaaaggcataagcctttgtgtgatgagctttcatttcttttggggaaatacccagcagtgggattgctgggttacatcactttgcaccccaaacagcaacaagtaaatgttccgttgcggctgctcccatccttggtgacatttcatattgtgggtctttttaactttgttctcctgtctaccaggaacaatgtggaggaagaaacagaggacaaaaacgggctgctaagttagggaaaataaaaacacgctgcattcataagtccactccaggggtgaagggtttgcggaaagaaacagctagaagtcggttttatgttgttcagggaattcgattcccctggcaggtaaactctggaatgggccttgagcgagatgcactgagcatctgcctggtgctgccccgccttttacagaaagaggatgcagagaaaaatggtgcccactccttcagcaggccagagactgcggtgtgggctgcttgctacctgcccatcctgcggccagccacaccctccccrgttgtagggtccgctctgttcccttccaacaatgataaagcgggtgtttctggagcactcagagtagccaggtgcttggctgagggcttgctctgggagttccccttcatccttgttcatttcatgagacagctactatcatttcccccgaccccgtgcagattcgggaatggaggcttgtcgtgttcagggaatatgcaaatttacccttggccaaggttatcctccgggccgaacctcgcacctaagcagtctgtctcctctctttgtcatttctatattctgcactgtcagtctccccttttctttctcag

SEQ ID NO: 62266 - DNA, 1988 bp, Homo sapiens
tttttaatttacagcaattttctttagctaatatgaacctgctgctataaaaagctaaattttctgagcactttttatgtgtcaggcactattccaagtgctttatacctgtcactcatttaaacctcagagcagtcctatgatataggtactatttattttattttattttatttttggtagaaataggatcttactatattgcccaggccagtctcaaactcctgggctcaagcaatcctcctgcctcagcctcctgagtagctagggctataggtgcgtgccaccatgcctggcatatttgtttctgttttatttttttggtagagacagtgtctcaccatgttgcccaggctggtctcaaatcctggtctcaagtgatcctcccgcctcagcctcccaaagtgctgggattacaggcgtgagccacgatacctggccctaggacgtaggtacaatttttacacccattttacggataaggagacaaaggcacaaaatgatcacacagtttgaaagtagcagggctgggattccaacctaagcagcctctgttcttaaccactagaccctctgcacatagtaacttctcagcaaacggtaccatgtctctattattgtatatttcatgtttgttactgtgtatttatgtttcacgtgttgctgtggatcccaccaccgcctccctgcagctattctgtgagttcctcacaaacagggttgccagagaatgcaggacactcaattaactttgaatttcagataaacaataaatactttttttttttttgagatggagtttcgctcttgttgcccaggctggagtgcagtggcgtgacctcggctcactgcaacctctgcctcctgggttcaagcgattcccctgcctcactcagcctccagagtagctggaattacaggcacccaccaccatacctgtctaattttttgtatttttagtagagacggggtttcaccacaattggccaggctagtctcgaactcctgacctcaggtgatccacccgcctcggcctcccaaagtgctgggattacaggcgtgagccaccggcctcaacgaatacattttattatgcgtatgtctctactgatggggaagtgggattttttttccagggtggagccgttacgagtaaaggcataagcctttgtgtgatgagctttcatttcttttggggaaatacccagcagtgggattgctgggttacatcactttgcaccccaaacagcaacaagtaaatgttccgttgcggctgctcccatccttggtgacatttcatattgtgggtctttttaactttgttctcctgtctaccaggaacaatgtggaggaagaaacagaggacaaaaacgggctgctaagttagggaaaataaaaacacgctgcattcataagtccactccaggggtgaagggtttgcggaaagaaacagctagaagtcggttttatgttgttcagggaattcgattcccctggcaggtaaactctggaatgggccttgagcgagatgcactgagcatctgcctggtgctgccccgccttttacagaaagaggatgcagagaaaaatggtgcccactccttcagcaggccagagactgcggtgtgggctgcttgctacctgcccatcctgcggccagccacaccctccccagttgtagggtccgctctgttcccttccaacaatgataaagcgggtgtttctggagcactcagagtagccaggtgcttggctgagggcttgctctgggagttccccttcatccttgttcatttcatgagacagctactatcatttcccccgaccccgtgcagattcgggaatggaggcttgtcgtgttcagggaatatgcaaatttacccttggccaaggttatcctcmgggccgaacctcgcacctaagcagtctgtctcctctctttgtcatttctatattctgcactgtcagtctccccttttctttctcag

SEQ ID NO: 62267 - DNA, 640 bp, Homo sapiens
ttttccaaagatcactaccttattttcttgaatatccttatgaggtcagagagaccattttttttctcattttactgatgaaatgaggaaacggaggcctagagagattaatggccctgaagccaatatgggaacacacattctcaatatgtctaacaggacctgtttcctgtaccaccatagctcaactctcatgagactctactgagtaaatatctcccaacaggagggaaagaaactagcactcaccgatcaccctctatgtcctagaaactcccataagcactttttctcgactgtttgcattttcaataatttagcactcagatcagagaggttaagtaactggcccaaagtcacccagctagtaaggaacggggctgggatttgaatgcaggggtgtttgacgccgaagccagagctttgtccccgagycttctgagctcagcaagcagggtagatttgggagaaaggagatgaaggaagtgaacagatgactaggcagatcaaataaaccaatcgccaagattcagatctttgcctggagttagaccatcgtgtctgccattgagcaacctgaaaattctccacctggcttcccacagcacttttgaaactggccccacaagtccaccaaatc

SEQ ID NO: 62268 - DNA, 1288 bp, Homo sapiens
ctggcctccagaactgtgagataatgaatgtacattgttttaagcactcggtttgtgatcatctgttacagcagcaacacgaagcgatcacagggatttagccaagctgagggggaaagtgtcccaggcacggccacagcaggtgcgaaggccctggggcagggagcatatttggaaggctccaggaacagtgaggaggcgggggtggctggggcagtgtgcatgagaggaggagatgagagasggaatggggtggtgtgtgtggtgacagagaccttggaaaaagctctggcttttgcttggagagaaacaggaaggccctgcagttctcatcagagctgtcagcaagtcgagtggaaaggacctccttgggacacattctttcccagctcccacactaaccagcataacatcggggatgtcactgtgctacagcatcagctctgagggcaggggactttgttttgtttactactcaagacacggaacctaatcacatctgcaaagaccttttttcccaataaagtcgcattcacaggttctgggtggacacatttttgggagaaccaccattcggcttagtccacccctctgacctgttcacagcccggggtctcaggaaagagacctgcctccaaaatatgacgcctggacccacaggcatgcgtgatcagttacaagctcttctctttggctccggattagagacttccttttcccaagctctttctcctgtgtccagtcttgtgtgttgactgccctctggagctgacatatctggaagtggagtgatgatagagagagcatcccagataaaatgaggatggcagctccttggggactcaacacccacagcagggcccccgccattccagtcctccctgggcaaaagaaacctcgcctttcactttctgtccctcctgataacgtgccccgcaaccttcaccggtgggcaggtctatccttgcctttttctctcccttcttctcccatctttctttctcttgcttcactctttcagtttccaggaactatcactcactaaaccatcaatacatcccattttgcctggggcagcccaggtttacatgggttgtcccagtgtgattagaaacagcagtcttttcactcgagatgccccagtttggacaataagttctatggtcctgctgcacaggaataccctttttgagccagagttcatcaaacttgaataatgtgctggactccatggcgaggcattaaaattcctacaaagacacctcaagctgtttatttaaactatgca

SEQ ID NO: 62269 - DNA, 1288 bp, Homo sapiens
ctggcctccagaactgtgagataatgaatgtacattgttttaagcactcggtttgtgatcatctgttacagcagcaacacgaagcgatcacagggatttagccaagctgagggggaaagtgtcccaggcacggccacagcaggtgcgaaggccctggggcagggagcatatttggaaggctccaggaacagtgaggaggcgggggtggctggggcagtgtgcatgagaggaggagatgagagagrgaatggggtggtgtgtgtggtgacagagaccttggaaaaagctctggcttttgcttggagagaaacaggaaggccctgcagttctcatcagagctgtcagcaagtcgagtggaaaggacctccttgggacacattctttcccagctcccacactaaccagcataacatcggggatgtcactgtgctacagcatcagctctgagggcaggggactttgttttgtttactactcaagacacggaacctaatcacatctgcaaagaccttttttcccaataaagtcgcattcacaggttctgggtggacacatttttgggagaaccaccattcggcttagtccacccctctgacctgttcacagcccggggtctcaggaaagagacctgcctccaaaatatgacgcctggacccacaggcatgcgtgatcagttacaagctcttctctttggctccggattagagacttccttttcccaagctctttctcctgtgtccagtcttgtgtgttgactgccctctggagctgacatatctggaagtggagtgatgatagagagagcatcccagataaaatgaggatggcagctccttggggactcaacacccacagcagggcccccgccattccagtcctccctgggcaaaagaaacctcgcctttcactttctgtccctcctgataacgtgccccgcaaccttcaccggtgggcaggtctatccttgcctttttctctcccttcttctcccatctttctttctcttgcttcactctttcagtttccaggaactatcactcactaaaccatcaatacatcccattttgcctggggcagcccaggtttacatgggttgtcccagtgtgattagaaacagcagtcttttcactcgagatgccccagtttggacaataagttctatggtcctgctgcacaggaataccctttttgagccagagttcatcaaacttgaataatgtgctggactccatggcgaggcattaaaattcctacaaagacacctcaagctgtttatttaaactatgca

SEQ ID NO: 62270 - DNA, 1288 bp, Homo sapiens
ctggcctccagaactgtgagataatgaatgtacattgttttaagcactcggtttgtgatcatctgttacagcagcaacacgaagcgatcacagggatttagccaagctgagggggaaagtgtcccaggcacggccacagcaggtgcgaaggccctggggcagggagcatatttggaaggctccaggaacagtgaggaggcgggggtggctggggcagtgtgcatgagaggaggagatgagagagggaatggggtggtgtgtgtggtgacagagaccttggaaaaagctctggcttttgcttggagagaaacaggaaggccctgcagttctcatcagagctgtcagcaagtcgagtggaaaggacctccttgggamacattctttcccagctcccacactaaccagcataacatcggggatgtcactgtgctacagcatcagctctgagggcaggggactttgttttgtttactactcaagacacggaacctaatcacatctgcaaagaccttttttcccaataaagtcgcattcacaggttctgggtggacacatttttgggagaaccaccattcggcttagtccacccctctgacctgttcacagcccggggtctcaggaaagagacctgcctccaaaatatgacgcctggacccacaggcatgcgtgatcagttacaagctcttctctttggctccggattagagacttccttttcccaagctctttctcctgtgtccagtcttgtgtgttgactgccctctggagctgacatatctggaagtggagtgatgatagagagagcatcccagataaaatgaggatggcagctccttggggactcaacacccacagcagggcccccgccattccagtcctccctgggcaaaagaaacctcgcctttcactttctgtccctcctgataacgtgccccgcaaccttcaccggtgggcaggtctatccttgcctttttctctcccttcttctcccatctttctttctcttgcttcactctttcagtttccaggaactatcactcactaaaccatcaatacatcccattttgcctggggcagcccaggtttacatgggttgtcccagtgtgattagaaacagcagtcttttcactcgagatgccccagtttggacaataagttctatggtcctgctgcacaggaataccctttttgagccagagttcatcaaacttgaataatgtgctggactccatggcgaggcattaaaattcctacaaagacacctcaagctgtttatttaaactatgca

SEQ ID NO: 62271 - DNA, 1288 bp, Homo sapiens
ctggcctccagaactgtgagataatgaatgtacattgttttaagcactcggtttgtgatcatctgttacagcagcaacacgaagcgatcacagggatttagccaagctgagggggaaagtgtcccaggcacggccacagcaggtgcgaaggccctggggcagggagcatatttggaaggctccaggaacagtgaggaggcgggggtggctggggcagtgtgcatgagaggaggagatgagagagggaatggggtggtgtgtgtggtgacagagaccttggaaaaagctctggcttttgcttggagagaaacaggaaggccctgcagttctcatcagagctgtcagcaagtcgagtggaaaggacctccttgggacacattctttcccagctcccacactaaccagcataacatcggggatgtcactgtgctacagcatcagctctgagggcaggggactttgttttgtttactactcaagacacggaacctaatcacatctgcaaagaccttttttcccaataaagtcgcattcacaggttctgggtggacacatttttgggagaaccaccattcggcttagtccacccctctgacctgttcacagcccggggtctcaggaaagagacctgcctccaaaatatgacgcctggacccacaggcatgcgtgatcagttacaagctcttctctttggctccggattagagacttccttttcccaagctctttctcctgtgtccagtcttgtgtgttgactgccctctggagctgacatatctggaagtggagtgatgatagagagagcatcccagataaaatgaggatggcagctccttggggactcaacacccacagcagggcccccgccattccagwcctccctgggcaaaagaaacctcgcctttcactttctgtccctcctgataacgtgccccgcaaccttcaccggtgggcaggtctatccttgcctttttctctcccttcttctcccatctttctttctcttgcttcactctttcagtttccaggaactatcactcactaaaccatcaatacatcccattttgcctggggcagcccaggtttacatgggttgtcccagtgtgattagaaacagcagtcttttcactcgagatgccccagtttggacaataagttctatggtcctgctgcacaggaataccctttttgagccagagttcatcaaacttgaataatgtgctggactccatggcgaggcattaaaattcctacaaagacacctcaagctgtttatttaaactatgca

SEQ ID NO: 62272 - DNA, 660 bp, Homo sapiens
tgcaaattaactttacccttggccagcaccatcttgtctgcttcttactgtacacatggctggcagggacgagaaggcttagccaccatcttgaatatgtctagtccctagttactgccaccattcacctgtgtgagctcccagctggctgggtctatgtctacagctcaactttacaggctgctttttttttagaaaatgatttgggactgctttttgttaaaaagtaaagccttaccgaggactccyatacccttactatctgcctaagtaatttcttcttaactcctgtatcagtaacacaaacagactaaaacacagcctgaacagactaagatagcttatatgtctgtcaagatcaccacaagttctagcctaccttctattcatctgattctccaggacatgttctctgctcctttggacagaggataacatgccaatcccaaggagcactgagtcttcaggccttgacttcctgttccccactctcctcacaccccaggccagccttcaactttcagtaaagccagtggagtgactggtgtgctgtaggacccagtggtgacctccatctctactcttcattgacttaataatattcaacaatcgtggatgttcacagttcagactggcctgccccactctcactcacgaaat

SEQ ID NO: 62273 - DNA, 660 bp, Homo sapiens
tgcaaattaactttacccttggccagcaccatcttgtctgcttcttactgtacacatggctggcagggacgagaaggcttagccaccatcttgaatatgtctagtccctagttactgccaccattcacctgtgtgagctcccagctggctgggtctatgtctacagctcaactttacaggctgctttttttttagaaaatgatttgggactgctttttgttaaaaagtaaagccttaccgaggactcctatacccttactatctgcctaagtaatttcttcttaactcctgtatcagtaacacaaacagactaaaacacagcctgaacagactaagatagcttatatgtctgtcaagatcaccacaagttctagcctaccttctattcatctgattctccaggacatgttctctgctcctttggacagaggataacatgccaatcccaaggagcactgagtcttcaggccttgacttcctgttccccactctcctcacaccccaggccagccttcaactttcagtaaagccagtggagtgactggtgtgctgtaggacccagtggtgacctccatctctactcttcattgacttaataatattcaacaatcgtggatgttcacagttcagactggcctgmcccactctcactcacgaaat

SEQ ID NO: 62274 - DNA, 585 bp, Homo sapiens
ttttatataatttaaaagtatttaactagattataatatataaacattttatagaacaatattaaacaaataataatatccatgatatgccactaagtgaaaaattctactctgaaacattttatatratacaaattcatttttaaggcattcatagaaataggctggaaagtacacgcatcaaaatatttcactgttcgcaagattggtgtttccttttgtgcttgtctctattttccaaattttctgcaatgagctcgtgattcttctgaaattagaaattctaaaaacttacaataaatgttattttcttcctgaaagcacatctacacatgactatgaggacattgtgcatagttccaacgtagtaatgtgcaaaaataatttggccatttgtacaatattttgctaggcatctgcagcgaggttgcaaagcgtatcagctgaaacagtgaccctgtaagtcctttgttaaaaatggcacttcctcgccacatggctgccagatgcacttcatttctggatctattgatttcatgtgaaaatgtggctgctgcagaaattgttatctttagtttataaaga

SEQ ID NO: 62275 - DNA, 1439 bp, Homo sapiens
agcctgggcgacagagtgcgactccatctyaaaaaaaaaaaaaaaaaaaacctaaaaagaaaaacattagctgggtgtggtggcatgtgactgtaaccccagctactcaagtggctaaggtgggaagatcacttgagtccaggaggtcaaggctgcagtgagtcatgaaagcaccactgcaccccagcctgggtgacaatgtgagactgtctcaaatagtaatgataataaataaacaacactgcactgaacatctctggacatacatcttcgcccactgctgtgagtactcttgaagcatggattcctaggggcagatttactgctgagtcaaataatatggcaggtgtgattctccagcagatgcaatggcctgagtagcagatgctaggaacaccccaccaacatccttgagcctttgtcagcgcagcacacaaaggcccaatctcttactgcctgcgggctgcgggcttttttgtgggagcgaggcagacaagagaattaacaccctcactccaggctgaccttgagcaatggctgatggcagcttgggtgtaaacaccccagctccctggccctcagatgggatgactctggtgctggtgtcctaccctgtccgctagaaggatcccacctcagttgcccacactggtaactggctccacaactcactctgctgacttccttccttccacgtctcactttccactcccacccccgtttcctgagatcacctcccaaacaaatccgttgcacgccaattctgtctcaggatctgcttgtgcggaaaccaaaatcaagacaatctaaaacacccttgcatttccgaggcactacgctggaagtaggctgggaggaagtcaggcccggctggccctgagccccgttcccgagcaaatgtgatggacgagtcactccaccgctcaggttcagttttcttttcatcacttcaatttctcacagagctgttaagaccattttctgaaatcacctctgtccctaaagggtgttgctgtcacttgttggtagtattatcattctttctttcttttttttttgagatggagtttcgctttggttgcccaggctggagtgcagtggcgcgatcttggctcactgtaacctctgcctcccgggttcaagcgattctcctgcctcggcctcctgaggtgtgagccaccgcacctggccctttctttctttttgagacacggtctctctctgtcgtccagcctggagtgcagtggcgtgatcacggctcactgcggccttgacctcccaggctcaagcgattctctagcctcagcctcctgaggacctgggattacaggcacatgccaccatactcggcttgcctatttatttatcaagacggagtctcgctctgtcacccaggctggagtacagtggtgcgatctcagctcactgcaacctctgcc

SEQ ID NO: 62276 - DNA, 1999 bp, Homo sapiens
aagtaaacctggggccagtctacaaggaccgtctttggcccgtttgtaaaacaaagtcaccctgcccttggggctgggccatcgcattcatttccctgtcttggcctttcctgcttttagtccattctccgtaatagcagagtgatgtcttaaccgtgttatatcaagtggtgccatgaacctgggacctcagtcactcaggtggcttcccattaccctgggataaagtccaaacacaatgcagtggcctccgccagccctgaaggatgtgccctttcctccctttccagcccagcacggtgccctcactcctgcccagccaccacacccttgcagctgcagcagggttctgtgttctgcccatgctgtttcctctgctgggagccttcttccccaaatgggacctggctattccacgtgtccttcggctactgtgttagtctcctggggcatccatcatacgtttattctcttttgaagggcagatgtccaaaatcaaggtgttggcagagccacacttgctctgaaggctctaggggagggaggatccttcctgcctcttcagcttctggtggctccaggcattccttggcttgtggccccatcactccagtctctcacttcattttcacatgaccttccctgtctctgttctctcttctgcttctaaggtcaccagtcattggatttaaagtctgcctttgtccaatatgacctgcttacatcatcaaagaccctatttccaagtaaggttccaggtggatgtgttttgggggcaccattcaatgaactacaggtcctgttttctctggctccctcaagaccgcactggggcctctcctcggtacatgtgccctcatgactctcgcttttctttactggaatggcttgttcattcttcagctccaaactagactaaactctgtgaggacagggctgctttgctctatcctccctgcaacttcagtgcygggcacaggactggctcttaatggatactgaatgaaccctgttatggactgaatgttcgcattctcccccacccccaaatgtatttgctgaagccctaatctccaatgtgatggtatcaggaggtggagccctcgaggggtaattagatttaggtgaggttgcgagggtggggccctcatgagtgcttttataagtagagaaagaagtaccagcgcttcctccctcatgcgaggatatggcaagaatgcatgtccataaggaagaaggcatgcaccagacatcaaatctgctggcgccttgatcttggtcttccagcctctagacctgtgagaaatgaatatctgttgttgaagcctcccagcctatgatggatttgttacagctggccaagctgacttagacaaatgagtgtgcctgatccatcccattgaatgtgacagaaccccaggaggcagatggtattcttgtcttgctaagtagggctgagtcactcaccaggcagcccagccaggcaagaggcaggctgactttctagcccaagcctccttctctagaacccaagctccctccacccttgggtctggggtcctatgaggcactgacttgaggaggatgataaggtctgagtggcttttggctggaacgagatgggacaatgggttggttactttcctgggacgattccctaacggatgtctcagagctgtcgtggctttgtccccaaaccactcattgtcactgacacaggctgtattcatctctcttgagactggccttttaaagtgttcccccagccccggccccttgacactcaggtggccaatgaaaggaaacaacaggaacagctttcaggccagggactagagagattttccccatggagtgaatacccctgaacacaaagggaagaaaaagccctttcataaaactacccgatcttcactggaaggaatgcgacagatacaggcaaaaatcagttctccactttgtgatttctcagggtgacggaagtggacaaagggaaggg

SEQ ID NO: 62277 - DNA, 1485 bp, Homo sapiens
cgaaaacctcccttctattaatttgccaacaagatttaaaataaaaccaaagctgaagaggcaggaaatgaatcctctaaatagttgactcttctgagagttgagaatcaaccctgtaagtaccagaaggtaggacatttatcaaatgaaattctttttaaaagacagtctcatacttctctgccttgtaaatggaatattgtgaatgtaacttatgctattcttgttttgagggtaggatggatggaaagctgctttggtgaagtggaaacagaatgggattgcagccctgggctccattatgactatggcactttccagctacgtggcttggatttatgtctgtgcccaagtttatttctctgtaaaagtggacccagtagcacatcttgctaggctgccagtgaaccactgaggtgatttttgtacaagtacccatggccacacccactacattctgactaacaaatatggttatttcttctctgagcccattccttcaaataaccagtgtgttttaggattcttggatcttacttgtagagatgaagaggagcttgtggagctgtaggacctcttgagtgttgactcagttgtcaccccaggcctaatgaacccatgtcaagctgaaacatccagctcttcccatctcccatggctttctcatcttccaaaaaaataattttcttcattgctgtcagcagccttcaacttgctcccaccagtcaaaacatcatctattagtacttcttcataattaacagtgaacactcaaggcatcttgcattcatctgtttcttccacgatgtgtgttcctggatgacaagtgttcttgggttcctgagtcaaaaagattgacaatgaaatttgttaatcasacagttcacatgctaaaaagcagcatcagtagtgtgcatgtacatgcagttttaagttattcaacaaatatttattgtaggcctaccatgtgcttcatactgtcctatgtgctggggatataaacaaagatataagctcttgtggagactaccttctagaagagtgaggcacacagtttacataacaccaagtatattagagggtgatgagagttgtgtagaatatagatcagtgcaaagggacagaaagtgctggggcggcaggactgttgcgatttcatgtggggtggtcagagaaggcctcaggaagaaggtgacagatgtcttggaggaagtgtggaggtaaggcatgcaaacactaggggagaagcactctgggcagtgggaacagcgagtgtagaagcccagacgcagggccgtgcctgtggtgtgcgtcccaggggcctcaaatcgcccactgtggctggagctgaggaaccacagagggagcagcaggaaatggggacagagagggaatggccatggcaaggcagacagtcagggcttccactccggatgaggtagggccggtgcaggactctattaatggaagagtaatttgaaccag

SEQ ID NO: 62278 - DNA, 1512 bp, Homo sapiens
  misc_feature (1)...(1512): n = A,T,C or G
cggatcccccactccggtctcgttgtctagacatgggccaagggaggctaggaaaataaatctctggcatttcagcctccgtggtggcagatagtctttgcctgcaagccaggggtggcgggggagrcgtggaaagacagaaaaaacaactgtcagtcaagaacaaacacatcatgctcttttcatgccaggcattgccctaaggggatttgctatgtatgttaatgcatttaaccctcaccattatcccattttacagatgaggaaagtgaagcccagagaagataagcaacctgttgaggttcacagagtagcaggtggcagaacagggatatgcacccaggcagctggcaccatcacctaggaagccagcccccagcccttctgcttctctggagacagcggcagacaggccgcaccccctccaactcatctctccctggttagtgccaacacagcacaaggctggtattgagtaagtccttaactaagtacctgaaaaacaccttatgaggacaaaggggctgttcctggtaggcacctgatagtgtcagcaattctttagtgactggcacttcctttcacctgcccctctcctgtctgtgtgatgcgacttgtcttcaccgtgcattaacctaatcctggcaaactcgggactgctgtcttggatgatcnnnnnnnnnnnnnnnnnnnnnnnnnnnnnnnnnnnnnnnnnnnnnnnnnnnnnnnnnnnnnnnnnnnnnnnnnnnnnnnnnnnnnnnnnnnnnnnnnnnncagtcattacttttggagctcagtttctcacataaagtggggaaaaatataccttatggcattaagttgacacctaattaaatggtagtggtccagcaaggtggtcctgctgactcccactttacaaaggagaaaagaggctgggggcatctcagtgacttctccagccatggtgggtgttaggggctccagcctggcttgcaggtcccagtcttgttaaaatctgaccacgtcactcggatgttcgcacttctttggtgtttcctattgtgttaggctagagaccaaaaccattgcggaacccaccaggaacctctcctgtgtctcagttcttcctccctgagccctcctccctgaagccccatctctcgctgttttctttgatcactttctctccccagctacactgcttgctttcaattccttgatgcactgtgctccctcctgcctcggggcttttgcacctgctgttgttccttctccccggatgcaaggccacctcccttctcccacactgtgcctggaacctcttcatccctcagcattctgcttaagcttcacttccgtggagaagccggcctcctagggccccagaggcacttctcctgtctccttccacctcttacctttgtaattaaacatgtaattaaatatgtgtggaaggatgatgacagctgtccctcacattagcctgtgaagccctcaagagctgagatcacacacttcttatccaccact

SEQ ID NO: 62279 - DNA, 674 bp, Homo sapiens
acaggaaacatctggaatgccctcagctggagtcactgaaatgaactagggaaaaaacaaaggagattccaacgtgtgtgtgtgattccaacactatgtggcagggtgtgccatgaaggaactgtatcatgttttagacttaagacgaacgaccacacatagtgcgtttttggagaacttcatcaagctttacaatctttcttgttgtttctctccaatgacccccaaaatatcaaacattattttcttcccctgaagtttcattgttgagagagaagaaattacattttaaaattcgtattcttcactcagcattgcaatataaggacggtttgcaagcagacagggaatgggtgaaaacatattttgtgttttaatcttaagacatacatttttatactaaagtcacatactacatttcgatcacaagcacagaaattctgctcttttttgccccctcccaccctgggggaaaaatagattcaaatttttggagacttaattgccctaaactttcatctttatgatggaaatgacatttttcctggaagatggaacttgrcccttcactgctccatgactttctcggactgagttgtgtccttgaggaagagggagtgggtaaactggaggagggtgggggtcctgagaaggagtgtgggcaactgggagtt

SEQ ID NO: 62280 - DNA, 814 bp, Homo sapiens
tgtgctatgcccagagattctggtaggtcaggtctgggtcagaattcaagaatctgggcttaacaggtttcaatgtagacaatagttcaaggttgacgcccaccataatttggggcacacagcccaacactgccactctctgtctaggtgaatgtcctccttccttctgccagtcacattcccctgagctgatgggttccaagcatcatgaatcacttaaaacggtcatccatgttacctcccttgtgaagtgtttcctgagttcccctaagctaaaagagctgcttagtgcttccaaagctctgtttaatacttttattatagcagttatcaaattatattataattatcttcttatgtgagtcattcccctatcaaaatatgggcaacttaaatatggcgggttcattttcacacctctggcatcctgcacacttcttggcacaaagcaggcattgaataatcttttttttttttgaatgggaaaaatgaaaatataaaagaacaatgaatattaaagtgtgacaggtcttggtagtacatcatatcacaattgttgaccccygagcaatgcaggcgttagaggtgccaactccctgtgcagccaaacatccatgtataaattttgactcctccaaacttaactgctaatagctaattgactggaagccagcaaacagttgattaacacctattttacatgttatatgtattatatactgtattcttacaagaaagtaagctagaaaaaataaaatgggtattaagaaaatcatgaggaagagaaagtataattactatttattcattaaat

SEQ ID NO: 62281 - DNA, 814 bp, Homo sapiens
tgtgctatgcccagagattctggtaggtcaggtctgggtcagaattcaagaatctgggcttaacaggtttcaatgtagacaatagttcaaggttgacgcccaccataatttggggcacacagcccaacactgccactctctgtctaggtgaatgtcctccttccttctgccagtcacattcccctgagctgatgggttccaagcatcatgaatcacttaaaacggtcatccatgttacctcccttgtgaagtgtttcctgagttcccctaagctaaaagagctgcttagtgcttccaaagctctgtttaatacttttattatagcagttatcaaattatattataattatcttcttatgtgagtcattcccctatcaaaatatgggcaacttaaatatggcgggttcattttcacacctctggcatcctgcacacttcttggcacaaagcaggcattgaataatcttttttttttttgaatgggaaaaatgaaaatataaaagaacaatgaatattaaagtgtgacaggtcttggtagtacatcatatcacaattgttgacccctgagcaatgcaggcgttagaggtgccaactccctgtgcagccaaacatccatgtataaattttgactcctccaaacttaactgctaatagctaattgactggaagccagcaaacagttgattaacacctattttacatgttatatgtattatrtactgtattcttacaagaaagtaagctagaaaaaataaaatgggtattaagaaaatcatgaggaagagaaagtataattactatttattcattaaat

SEQ ID NO: 62282 - DNA, 724 bp, Homo sapiens
gcggagccctttcctcattcctttcactgctgcggccacagccatgagtatgcttcggcttcagaagaggctcgcctctagtgtcctccactggggcaagaagaaggtctggttggaccccgatgagatcaatgaaatcgccaatgccaactctcgtcagtagatccggaagctgatcaaagatgggctgatcatctggaagcctgtgactgtccattcccaggctcaattctggaaaaacaccttggcccaccagaagggcaagcacatgtgcataggtaagaaaaagcatacagccaaatgcccaaatgccagggcaggtcacttggataaggagaacgaggattctgtgtcggctgctcagaagataccatgaatctaagaaaattgattgccacatgtatcacagcctgtacctgcagatgaaggggaatgtgttcaaaaacaagcagattctcatggaatacatccgcaagctgaaggcaggcaaggcctgcaagaagctcctggctgaccaggctgaggcccgcaggtccaagaccaaggacgcacgcaagcayagtgaagagcgcctccaggccaagaagtgggagatgatgaagactttgtccaaggaggaagacaccaagaaataaaagctccccatttgtctgtaatgctggcctccatgattacatagatcagccattaaaataaaacaagcctttatctgcaaaaaaaaaaa

SEQ ID NO: 62283 - DNA, 393 bp, Homo sapiens
tgaggaggagagtgggacacttttatatatgtactggttaaaatttagtggcaaarctgcctgaacgtgtgctgtggttaatgattgcttgagctctgccttccactctcagctttggagtgggtggtacgctgtatacagagcacctagcgtgcgcacagaactctcctttcatttctacacataaagggcttaacatagtatctggcagatggcatgcaatgaaattaactttaattataattatctcatttagggtgaggtaatactattttttcagttttacagattaggaaatggagacttcaaggcttaaataacttcctaaaatcactcaattagcaaatgataaacccaggactcaaactccggtcagtcctccctccctccccc

SEQ ID NO: 62284 - DNA, 739 bp, Homo sapiens
agcatgaacttttatcattggaataaacattgatgctatattaaaattagagtgtggtggagcatggtggctcatgtctataattccagcgctttgaaaggcctaggcaggaggaccacatgaggccaggagtttgagaccagtttgggcaacatagcaagaactccactctaccaaaaaaaaaaaaaaatttgggcaaggtggcacatacgtgtagtcctacctgctctggaggctgagtcagaaggatcacttaagcctagaagttcgaggttacagtgagctatgattgtgctgccgcactccaacctgggtgacaaagcaagatcctgtctcttaaacaaaaatagagagaatttaatgaaatagatgttataaaatgtaaagttttgtattttcatgacattaagtgaatacaattatcccttggtatccatgggggattggctcccagacctcccacagacaccaaartccacgattgctcaagtccctgatataaaatggcatagcatttacatataacctttatatagtattccatagactttaaatcatctgtagattccttagaatacctaattgtgttagtccatttgcattgctttaaaggaatatctgagactgggtaatttataaagaaaagagatttattttgactcatggttctgcaggctatataggaagcatggtgccagcatctgctcctggtgagggcctcaggaagcttccaatcatg

SEQ ID NO: 62285 - DNA, 669 bp, Homo sapiens
cctccctcctcagcctccccaaatgctgggattacaggcatgagccaccatgccaggcaagccaccttgcccaactgccctctctctcttaatactactcacttaagaatggttatagtattttccaattacctaagcatttaaaataatttatttaaaatcaaggggtttttgatatttttacttgtttgttttgtccttttgctcgagtatgtgtttttgttttttggaacttcctagtgtctatttcaacaatcaaaatgatataatgcaattctcaaagcctgaaagcatttggtcaagaatcagtatgcttcattctagatttctctctgtaatattagtacaaagaattatagtgagtacataatgaaaataccttaaaatccaacaaaacatgtttttccttgatatataggaaacaaattcaattagatatgaacttgctttgtaaatattatctaagtttactaaagttttaatttaggcacctatgtaccrtagcaaagaatgcagcataaaaaagaattataaataattttataggtcagtatacttaataataaaatttattaggcttactaaaatgttacccagtaggaaagaaatagagttgacataataatatttcataagcattccagtctttgaaaaattgcttaatttaaa

SEQ ID NO: 62286 - DNA, 1324 bp, Homo sapiens
tgcattggattatatctgagtgccctgtggcttgacttacccagctcaccaaaataccctcctggggaaacttgccttgacagagcccagagccctgggccttgaagagcccaggagactctgcctacaaaaaaaatcttcctcattaggcagatgacacctttttctgagctgtatacttgcaggtaagggacaagttttggtggggacactggctggattccagccttacactgccctctgggccaggcatttttgtttgaggcacaacctgcacagacttatgcttcagcctggcttgagtaatatctttgagatgaggattctgtttcgtttttatttactgaagaaacataagagccttctttgtgtctattttaggtgcttgagtataccaaggaataaaataagtaaagatcccttccctcaaagaatttatatagtgatgcttataatctagtggagcttgcatttttaaagttgatgatgtaaagctaataataactatacactgtaagtgaaaactaataaattactcaacatttcttccttaggtgcagatagtagtgacctggtttaaatagtaccagtgccttggactaggctttcttcctcttgcagaatgctccagctgacctcacaatggggaggagggcatgtgccttcttgtactacttgctatcacactatcctctgaccttgagtctttgctagtagcttggtttagtgtaaagggaagcatgttaccccctataggactagcacttcctgcagccccacctgcagtttctatcaagtctctgattgaacatttaatctaaaagctccattctgaatttatgagctgtttcctgcttctttttgttttattttgcttttcttgcctttgggcacctgaagcctatgtcttgggccatgtcagtcaaaaggttgcttgtgcatttttttttcctgttttgggggttttggatcactattgccctaacgtcatgagcggctgccttactccagtttctatawaccaccatcactatccctaaccacagttctggagcaaagcatacaagagcacagaaaaccaaaaataaagtttctaaaacagatagcagtgagaagctcatgtaggtggactgcagatctgaagttcactggcagaagtgggactgacacttggtctacctttgacatctggaaagacacaatgcacaaacctacatgacataaattattgaatccagtcattcctattctaggactgtgacagctttatacctgttccattgaaaaagaatgatgattttttttttcaaaaagacataatgca

SEQ ID NO: 62287 - DNA, 1055 bp, Homo sapiens
aaagcttttcacagcatatttgttttaaaaagccacttacaaagcttgtgatttcatttttgtttaacacggacttaataaaatgtacccacagcaaggtgtttaagggattgtctctgtcttgttgtgtgtgattgtaggtattatttttatttactttcattgtgcaattaactcgaattgcttctctattaagaaaaataataataaaactaattatggtaagtttttgaaaagtcatgctatggatttacactttagagtagttataattttagtgtccattgatttagaaaacatgacaagcagctattattattttattaaatctttaaaatacatgtctttagaatagcaactacacacatttgaaatatgctagcatatgtatctgccaagaggttattatactttcttggatttgttaaaataatcgtggccacacataagcctgaggcacatactataagccattgattaaccagtaaggtgtctgcaaacrtgaggctatattttatttagtagcagttcattccttcggcttttcctactcttgaaattgcaataagattgtgtcagaatgctgtgttaatataattctatcaatggcaagccacatttttaaagactctttaaatgaaaaagtgtaaatagtatggaatccacaattaacatggaatccagtcctattaaataatttcatttaaactttcctcacttttttttaatcacaactgaactgtaaacttgaaagaggattatgataatgaaatcatttttcctcttttttagatgtaattttcccagaattcccattgactgcctttgaaataacttagtccatgatgttgacaaagcttttaaatttgaagaaacatccttacttgtacatagtaacaaaacaatcactcactgaaattatgctttgtaaaatatatatttttaaatttccggactcggtcgtgtatattcaggaaatgtaaattatctattaagacccacaatcatttgtgagatgtttatattgttctctgataggtatagatgacattaat

SEQ ID NO: 62288 - DNA, 462 bp, Homo sapiens
taacctagatgtcaactgggattttctgaccccttaagacttgcttggacatctgttaatactggatggaagccagataaatcctcaaggcttctgtaagttgaagagaatgtggtgcccatttccagaccccctcttcttctcattcctttcttgtcttacatgcaggcactttagtggcacagtgcagacgtgaaatagactcttgctcaacttaccccagatatgcctccatccttcaaggtatctgcaagagtagtagaattgaggagttgtgggaacatatgaatgatatgaatggtatttataatagttataaccccacattgraccccaacacatgaaaatagtctttgatctctccatttccagaaaatccccagtaacctttcctatccattccagcaagcttgtttaagctccaccttagtagtagcttctcctactgacacttgtactctt

SEQ ID NO: 62289 - DNA, 951 bp, Homo sapiens
tgcatatgttactgcatctcatttttatagcaattgggtaaactgaaggtattttatattcatagtaaggatgagtaaaccaggctttttaaaaattgagttgtttcagaaaaatctaacatttagtaagttgtacaaatagaacttctgtagatgaaccttgtcattaggcttttaattgcatttcctttgatgtttcagctcctggagaggagggtaattttgcccttggttctttgcccttggatctttgatatcttttacctttccttgctggccgaggtgaagattggaatttctcccagtattcatgtgactaaacacctaggtcacagtgttgagtacatttcttccaaggagttgattatcaggtatcactgctttctacccaatggaggcgtttcycactgtctaaacttatgtagacttggtgagataagaataccagttcctccggacttttgaatgctgtattttaaactaatgcctattctctcagaggtcagtactgagctacacaggaagctacattacttggcttcctggattcagctgtgtcttgcccatctggtggacagcagcaccttccctcctccattgcctggctaactcctactcattctactcttggcctgacatctccttctaccaaagccctttccagacacggttaatgttgattcagatttctgttctgtaagttcttgtttccatgacagtggtttccacattgtgttgtaaatgtctatttctcaggctaagacagcaccgccttggatggagagcctgtgtttccatcttcctagctccagtgccacctacagggcctggaacagagttctgtatgtagccaatgaatgcacgtcaaactaaaaactgcctgaatgaataaaaataatgaacgttggaaatactgaaaatacaaatccataaatacatgtcttacatgca

SEQ ID NO: 62290 - DNA, 951 bp, Homo sapiens
tgcatatgttactgcatctcatttttatagcaattgggtaaactgaaggtattttatattcatagtaaggatgagtaaaccaggctttttaaaaattgagttgtttcagaaaaatctaacatttagtaagttgtacaaatagaacttctgtagatgaaccttgtcattaggcttttaattgcatttcctttgatgtttcagctcctggagaggagggtaattttgcccttggttctttgcccttggatctttgatatcttttacctttccttgctggccgaggtgaagattggaatttctcccagtattcatgtgactaaacacctaggtcacagtgttgagtacatttcttccaaggagttgattatcaggtatcactgctttctacccaatggaggcgtttctcactgtctaaacttatgtagacttggtgagataagaataccagttcctccggacttttgaatgctgtattttaaactaaygcctattctctcagaggtcagtactgagctacacaggaagctacattacttggcttcctggattcagctgtgtcttgcccatctggtggacagcagcaccttccctcctccattgcctggctaactcctactcattctactcttggcctgacatctccttctaccaaagccctttccagacacggttaatgttgattcagatttctgttctgtaagttcttgtttccatgacagtggtttccacattgtgttgtaaatgtctatttctcaggctaagacagcaccgccttggatggagagcctgtgtttccatcttcctagctccagtgccacctacagggcctggaacagagttctgtatgtagccaatgaatgcacgtcaaactaaaaactgcctgaatgaataaaaataatgaacgttggaaatactgaaaatacaaatccataaatacatgtcttacatgca

SEQ ID NO: 62291 - DNA, 609 bp, Homo sapiens
aatttgtagtatatgcagcaatgcagacctaagaatagagagtgatccagggcctcctttgtgggaatcagataaaaagtgacttttttgagaacaaatgccacccccaaattaggacacactatgtatgggctgaatttcagtcctctctggtttctttagttaggtgtccttgtgcaatgaacaacctgcccaaccacatccagcaaatatggaaggatctttacaccaatggwtttcaactctggccacgtgttagaaaaacctgggtaactttttgaaattgtcccggtccaagccccaatctcagagaattggatttaattgatcctggagcatgggttttaaggtccctcctggtattgcagcctgaattgagaactacagctttagatctactgtcatgatcatctcactctaggctgtattacagacgtgtgtttgcctctcataggcatcccgatggggttcacggtccagctgaaatgctaacggcaacaccaatcattggcacttctagatttactgccaggagtctttgcctttatcacccaaccccagatgtctaggcatgtccccatggcctgtccctcactgaagagagagcta

SEQ ID NO: 62292 - DNA, 615 bp, Homo sapiens
gaaaaatggtagataaaaacatcattaactcagtttttgatttagattggtcttctaagacattcccaaagaactagttttaaacctagttccccaatgcatggataagcatatctccccaacaacaaacttttaggtggaatctctgatctcccccttgccccccactgctcccatcacacacacacagatcactgttactctttgcttgcctttcctgtgacgaaatggccaaaatccagatgacccaagatgatctgaacaactttttggagaagtaaaacctttgtggaatgtcaattctctcatccaactttccattattctcagcttatttattctacgtgtgtattctccagttgtctttgtactctggcttcctagtaatttaaaacattaaaaaaaacttttwatttagattttcagaaaacttataaaaatagaacagagtgttcctgtatatttttcacccagctttccctaatattaacatcttacataaccacagtactcttgtcaaaactaagaaattaacgttggtaaaatactattaactacagtacacactttatttggatttcaccagtttttccactaatgtcatttttctgttcc

SEQ ID NO: 62293 - DNA, 638 bp, Homo sapiens
gttagaactcactattggtatttatgtaactggcacgcatcaagttttgtgaatgagttctaagggtctggggcacttgatctsgttgtttttaggaggtgagagagagttaaaagcagtcattaaacaagttagtctgctcagcccatgaccagtctcactgagccatttgttaggaatcagtaacactgcctataactatcaggacaagagaagacactgtggcacagaagagggtcgccaccattctacacacacacacacacacacacacacacacacacacacacaccacacatggagataggaatctcagcaaaattaaaatagcactattttacttaattgtgacaaggctgtcttcagcatttgctttgctgtgtgcaagtaggaatgtcattaccttgccatcccatgctactgttattggtttaaattattgatgcacagtattctattgatgcacagtattctagttgaagtaaaattgtctcaaggaattaagctgtttagaacacaatacaagaaaggacaaaggatatgatcatggcaccccaaaaatttgcagagtcaacagtgtcactggttgtaacagcaatttaagaattatatgtcctgaatttattttgtctttacaa

SEQ ID NO: 62294 - DNA, 698 bp, Homo sapiens
agcattccagcgagctacaccagccatttatatgaatgccgtctattcaccaaaatcttaggcacctccatatggacttccagaatttgctgcattgacagttgaaatcctgagcttctttgtgggctccagaatcagagatttaaaatttctcacataccttccgggagttctagctaagcatgagctgagaaaggtttccactagtgcagatkctctctaatgttcagttacctgcaaaaaaggatgcttctgagccaattgggcaaacaaactgaaactccagtgctaatctaacaatacctgctggtttattttcacgatcttcatgtgaatatgtgccattttgcaaatcacagtgcccctgaaggagctgtggtacgttgctgtccccatggcagtatgtgtgttttgctgaggttccctaattctttccaacataggcctcctcatcgtacccagcagggcagtgctcttacagaatgcagtcctctaacagatccagggtgaatggagacggaggtctccaaccactgggacttgtactttgccatagagcagtctagaaaacagatatgttttagagactagaattaagaaaacgtatactcattcagaggttggtgctggtggtggaagggatttgagaaatgaccttagcctcccagtaaaggaaaagcacaagctcttttccaggt

SEQ ID NO: 62295 - DNA, 698 bp, Homo sapiens
agcattccagcgagctacaccagccatttatatgaatgccgtctattcaccaaaatcttaggcacctccatatggacttccagaatttgctgcattgacagttgaaatcctgagcttctttgtgggctccagaatcagagatttaaaatttctcacataccttccgggagttctagctaagcatgagctgagaaaggtttccactagtgcagatgctctctaatgttcagttacctgcaaaaaaggatgcttctgagccaattgggcaaacaaactgaaactccagtgctaatctaacratacctgctggtttattttcacgatcttcatgtgaatatgtgccattttgcaaatcacagtgcccctgaaggagctgtggtacgttgctgtccccatggcagtatgtgtgttttgctgaggttccctaattctttccaacataggcctcctcatcgtacccagcagggcagtgctcttacagaatgcagtcctctaacagatccagggtgaatggagacggaggtctccaaccactgggacttgtactttgccatagagcagtctagaaaacagatatgttttagagactagaattaagaaaacgtatactcattcagaggttggtgctggtggtggaagggatttgagaaatgaccttagcctcccagtaaaggaaaagcacaagctcttttccaggt

SEQ ID NO: 62296 - DNA, 570 bp, Homo sapiens
ttcagtttgggaatacagaaaagttctggagatagattgtggtgatgattgcacaacagtataaatgtacacttaaaagagttaaaatgataaattgtatgttacacgtttataaccacaattaaaaaaaactgtaaattatcaaattaccagaattccttgcaggtagcagagtacagacaacatatctatagctactgatccttattctgaaatctgctgaaaccaattttatcccgctttatctaaattcttcctgcattgaaaacaggcatgatgtctgaagtatctgactacctaaagcccattaataaaggcaagggagaaaagccaagamaattatcaaaactcagtccagacttcttagagttgtagaatcaatttcttctggtaactgttttgaaacttattataataataaaattgtattttttaaacaactgaagttgaatgaatttctaaatgacatctctttctgcatgtacatatgtgtacttaggcgtataacacactttaagaaaagctagttttactaattcttttactaaatctatacaggggctataaata

SEQ ID NO: 62297 - DNA, 580 bp, Homo sapiens
ggatccttgcagaagttcttgatttaggtctgagatgaaaaagcattctttgaaaatgatcaacacaagcttcatcaacagggagagctgtgtctctgaagtgggtaagtattctaagttcgtcaagtgatttcacagttggaatgatggtgcagggtttctgaaaacgtctttatgtgtgttttaaargatgattttcagcatcttttttttgttcgcaagtaacagctacaatttaaataaaagctttttttttaaaaaaaaaaaaaaggtctacattttcttccttcattggacttcctgctgaggctgttgacaagatgttttgtttagtgcttgttctattctatttttccatatgaagcaagaggaatacagaagccaaagtcaaacctggctgctttccctagaggtcctaagcacacatgcacagcatgaactcgatggaaacacttaagcatgcagaaggatttctaaacgattaacaacccttgaggcataacgatggtgtcattcaacaaaagaaattattaagatattgatgcttttcaatcagaatcatggatctttttcaatgtca

SEQ ID NO: 62298 - DNA, 580 bp, Homo sapiens
ggatccttgcagaagttcttgatttaggtctgagatgaaaaagcattctttgaaaatgatcaacacaagcttcatcaacagggagagctgtgtctctgaagtgggtaagtattctaagttcgtcaagtgatttcacagttggaatgatggtgcagggtttctgaaaacgtctttatgtgtgttttaaaggatgattttcagcatcttttttttgttcgcaagtaacagctacaatttaaataaaagcttttttttwaaaaaaaaaaaaaaggtctacattttcttccttcattggacttcctgctgaggctgttgacaagatgttttgtttagtgcttgttctattctatttttccatatgaagcaagaggaatacagaagccaaagtcaaacctggctgctttccctagaggtcctaagcacacatgcacagcatgaactcgatggaaacacttaagcatgcagaaggatttctaaacgattaacaacccttgaggcataacgatggtgtcattcaacaaaagaaattattaagatattgatgcttttcaatcagaatcatggatctttttcaatgtca

SEQ ID NO: 62299 - DNA, 2225 bp, Homo sapiens
tgcatatacacactatattaaatattgttttctatttttcctgtgaaaatatttctgtttagacttactttctcttcaggacgttgtttttgtcaaagatattttcatataaatgcagtctctttcattcaaggtttaaattgtatttcataaagttgagtaatctcttctcaatgttaattccctctgtatttgcgcttgattttgcctggttagtttcttatttttgggatttgctctttctccattgattcatgattcatctggctgatgatttgtttgttttactttatttcttcaagaaatgaatttgggatatatttattatttttattgttttaccatttttatcttgattttttaattaatgttttcattttggttctcttttgttctgtatttctaacatcttaggttagatgcttaacacacatttttttctctcccatttatttacataaatattgtggctatacatttttcttcaaaaatagctctccctctatgtgtctgatgagctcattatcattattttctatatattttgctaatttggttgggatttacttttgacataaagaaacctgtattttattttcaggcaataggagatttattttctgtttttattattaattttagttttactgcatcaagattagaaattgtctatgtcctttctttttgtcaatgtgttcttatcatatgaactacatgttggtatgaccgttgctgcttattttcaccattagcaccagaacttagtgagcatttattgtgtgtaaatccccatatcacatggtgctcatcagtcctagtggttcccatagccaatggagatgctgactgtgggatcttcatgctgctgagatagactgtctcctgcagatattccttgataatgtcattttctctggagtccagcctcctgagtctcctgaatccagcaggggctcctgccagcgttcataccattgtcaactcgttgacttggctttcctacctctgggcaggcccctcactttggacaagcacatctctgctccctactgacacctgccttctaatctgtgttctcttctagtgtcttttcttggcttctactcctgggcactgctagcttttggtagccatcacacccatgctggtggctgagggttctgtcaattatgtaatgttgttggaaacataaattgcatgcatgtttctcattctctttcgtgttctgaataattcccacatggagaagaggaaatgttgtctttgtgtgtttaactggaaatggtttttaaccttttctttagtttcttaaaaatttattttttatgccatgtctgaacctcaaactctagaccgagatattaaacataagatgagggagggatgaagaaaagcaaagataaagagagtgagcagagttttatcataatttaagatacttttctaagatctctagccattggctggtttatctggtttagtagaagtttagcaggtttgagtctcagcgttgttttaaggactyatgcagctcagcctgatgttctaatccctgggcattcctgctttcttttcctcttttgaattgcatctgccagaagacagacctgtttctgggcagacgagaagcagagctaaggcagtgtggcggtgtcagtgtccgtggacttaagtggccagtggtaaatcactgatcagaagataaaggttgatgtggtgggggcctccccctgttatattcctgctgtaacctgctcttggttattattagtttctacaggacccctcgtatcatagtcatatcatatttcactctgcttatttctatgtgtttcccacctctccttctgttgcacattccctgggccttgagatgagcttctgagatctttggcagaaaccaaagctttgcttttgtttgtttgtttgttttggagatggagttttgcttttgtcacccaggctagagtgcaatggcgcaatcacggctcaccgcaacctccgcctctcaggtacaagtgattctcctgcctcagcctcctgagtagctgggattataggcacctgccaccacgcccagctaatttttttgtattattaatagagacggggtttcaccatgttggccaggctggtcttgaactcctgacctcaggtgatacacccgccttggcctcccgaagtgaccaaagctttataacagttttatttgcagtgagtacaca

SEQ ID NO: 62300 - DNA, 2225 bp, Homo sapiens
tgcatatacacactatattaaatattgttttctatttttcctgtgaaaatatttctgtttagacttactttctcttcaggacgttgtttttgtcaaagatattttcatataaatgcagtctctttcattcaaggtttaaattgtatttcataaagttgagtaatctcttctcaatgttaattccctctgtatttgcgcttgattttgcctggttagtttcttatttttgggatttgctctttctccattgattcatgattcatctggctgatgatttgtttgttttactttatttcttcaagaaatgaatttgggatatatttattatttttattgttttaccatttttatcttgattttttaattaatgttttcattttggttctcttttgttctgtatttctaacatcttaggttagatgcttaacacacatttttttctctcccatttatttacataaatattgtggctatacatttttcttcaaaaatagctctccctctatgtgtctgatgagctcattatcattattttctatatattttgctaatttggttgggatttacttttgacataaagaaacctgtattttattttcaggcaataggagatttattttctgtttttattattaattttagttttactgcatcaagattagaaattgtctatgtcctttctttttgtcaatgtgttcttatcatatgaactacatgttggtatgaccgttgctgcttattttcaccattagcaccagaacttagtgagcatttattgtgtgtaaatccccatatcacatggtgctcatcagtcctagtggttcccatagccaatggagatgctgactgtgggatcttcatgctgctgagatagactgtctcctgcagatattccttgataatgtcattttctctggagtccagcctcctgagtctcctgaatccagcaggggctcctgccagcgttcataccattgtcaactcgttgacttggctttcctacctctgggcaggcccctcactttggacaagcacatctctgctccctactgacacctgccttctaatctgtgttctcttctagtgtcttttcttggcttctactcctgggcactgctagcttttggtagccatcacacccatgctggtggctgagggttctgtcaattatgtaatgttgttggaaacataaattgcatgcatgtttctcattctctttcgtgttctgaataattcccacatggagaagaggaaatgttgtctttgtgtgtttaactggaaatggtttttaaccttttctttagtttcttaaaaatttattttttatgccatgtctgaacctcaaactctagaccgagatattaaacataagatgagggagggatgaagaaaagcaaagataaagagagtgagcagagttttatcataatttaagatacttttctaagatctctagccattggctggtttatctggtttagtagaagtttagcaggtttgagtctcagcgttgttttaaggacttatgcagctcagcctgatgttctaatccctgggcattcctgctttcttttcctcttttgaattgcatctgccagaagacagacctgtttctgggcagacgagaagcagagctaaggcagtgtggcggtgtcagtgtccstggacttaagtggccagtggtaaatcactgatcagaagataaaggttgatgtggtgggggcctccccctgttatattcctgctgtaacctgctcttggttattattagtttctacaggacccctcgtatcatagtcatatcatatttcactctgcttatttctatgtgtttcccacctctccttctgttgcacattccctgggccttgagatgagcttctgagatctttggcagaaaccaaagctttgcttttgtttgtttgtttgttttggagatggagttttgcttttgtcacccaggctagagtgcaatggcgcaatcacggctcaccgcaacctccgcctctcaggtacaagtgattctcctgcctcagcctcctgagtagctgggattataggcacctgccaccacgcccagctaatttttttgtattattaatagagacggggtttcaccatgttggccaggctggtcttgaactcctgacctcaggtgatacacccgccttggcctcccgaagtgaccaaagctttataacagttttatttgcagtgagtacaca

SEQ ID NO: 62301 - DNA, 706 bp, Homo sapiens
ttagatgaccagctcagaaagggagggaagagagtgacagcagctgcgtctgtcttcctgccctgcactatcagttccttgataggattgctgcagtctcatgttaattgtctacatctccagtatgttcatttgctttctacctattaatacttatatgcacatccatgcacatgcaaacgtacatatgctttccactcgttgtcacttgcttgtccacatataaacttaatctaaagtgtgtgtgtctgaatcagcaatgtctccttccaatttctctttccactttctatctctaataaatatggacgtatcagccatgcccttacctgaacccattatctatcaataatagcccctcccaaaccatgttagtacttctctaagaaggttgacctttcagaggtctgattaactagacaaacaaggcatggaactccagcccatatttccaacacatacggtagcctytttttctaaattatgacttttgcctgtgagaatagtgaatgtaatgtatgaagaccaaaagcattcttcaagacagtgatttggtagcatcttattctggaagcataagccatcttgaacacagataatgaatgcattagaatggaaacatccaaaggattattaagtcagaaggcatacccaccgtcacactcacgttctcagctgcttgctgagtgcgtactgggcacatgta

SEQ ID NO: 62302 - DNA, 667 bp, Homo sapiens
agtaaattattacaaaaaaaatttagattcatttctaaagataaaaccaaataccacaaattaacagcacactcaatacaaagaattttgaaacattgtaagtggaaattagaagtatatgtataacttaagaacactagttagaaactggtattttaataaaaccatattttattgactacttctctcatcccagtatacgatgtctgtcccctgccataagcagtaatgccacagtagatttatgccgcacaaaagctgtgagccttctgcctggggaagccctgcraaaagttcgaacaggggtctgtagactcttgccagtggggacaataggattacttctaggaaggtccagtttaaatttaaaaggggtaaaaatacaaacaggagtcattgattcagattacaatggggaaattcaaattgttatatctacttctgttccctggaaagtagaaccaggagagcgtataacacagttcctgattgtgccatatgcagaaatgaggaaaagtgaaattaaacaaacaggaggatttggaaacacaaataaacaaggccacagcttattgggtgactcaaattactgacaaacgtcctacctgtgaaataagtattcagggaaagaaatgtaaaggtttggtagatacaggagcagacattt

SEQ ID NO: 62303 - DNA, 635 bp, Homo sapiens
agtaatacaaaagaataaaatcatgtcttttgcagcaacatgggtacagctggaagccgttatcctaagcaaactaacatagaaacagaaaaccaaataccacatgtttttacttatatgtgaaacacaagtactcatggacatatgatttacttatagtgataaatgtgtcatttgcttgtcttctatagcattctatacatgtattttaatgaatttcagccatcaacttaattgatagttttaaacaaagagatagatttatttccaccgtgagtaaaacacttaacatttgcaacctatataaacattgagttaaatgttgggtactcatggacataaagatgagaacaataggccgggtgcagtggctcacacctgtaatcccagcactttgggaggctgaggtgggaggatcacaaggttaggagttcgagatcagcctggccaacatggtgaaaccccgtctctactaaaaataccaaaaaaaaaatgtarccgggcatggtggcgcatgcctgtaatcctggctactcaggaggctgaggcaggagaattgcttgaacctgggaggtggagtttgcggtgagccaagattgtgccactgtactccagcctgggtgacagagggagac

SEQ ID NO: 62304 - DNA, 1110 bp, Homo sapiens
accactttgaacatcaagaaggaagagaaattaatcctttgtagtcagaaaactcaaccagggctgaaccctcctctgggaaatactgaacattggttactctttctcttccatttttgggatttttgaagaaaattgttatgtaattacattcamcatcaagtggcatattttcaatcttaatggttgttgtctgttccaaaggttctgaggaaatctgaagttgctgaacttccatggtgtccatcacaaacattaataaatgtgttgacatctagaagtaaaaatcaacttattggtattgtaattttatttcatattagaagaaaatagatttttaaaagtaatttgatttagaggcgataaccacaaattaaaattagatgctaatttctatgtaaagttagatttcacaacgtcaatttcaacctcccctaccctatatcaatttcaacttaccctacgttgcctaccctgaatacacagcaatctttaacaatgacttccaatttgagatcgtttgaggaacaggatcaacagttacctctccaagtgtaatcaaggacatggagctactttgtaatatgataatagtaataattgttacacaatattgttttctcaatctgatttatctttgtctcccatacaaacttacccataccttgatatctatttggacatgtcatgattataaagtcataaatatctgattctttgttgttgttgttgtttttctgttgcctaggctggaatgcagtgtcccatcatagctcactgtaaccttaaactccttggctcaagtgatccctgacaacagccatgtcatatagcttcactattaaaactcactggcaatttgaggggatgtacatagcagttaagaaaatacactcagaagtcaggatgtctaacatggaattctgaaacaggtactagctgtgtgactgtgaatatgtcattcaatcctctctaacccccaatttcattcttactaatagtacctatctcatattgctatatgttttaagatagggtaagtaaaagtctaagcacagtgcctggcatagagtaagtgcttaatacatgttagctattagtagtagcaga

SEQ ID NO: 62305 - DNA, 1110 bp, Homo sapiens
accactttgaacatcaagaaggaagagaaattaatcctttgtagtcagaaaactcaaccagggctgaaccctcctctgggaaatactgaacattggttactctttctcttccatttttgggatttttgaagaaaattgttatgtaattacattcaccatcaagtggcatattttcaatcttaatggttgttgtctgttccaaaggttctgaggaaatctgaagttgctgaacttccatggtgtccatcacaaacattaataaatgtgttgacatctagaagtaaaaatcaacttattggtattgtaattttayttcatattagaagaaaatagatttttaaaagtaatttgatttagaggcgataaccacaaattaaaattagatgctaatttctatgtaaagttagatttcacaacgtcaatttcaacctcccctaccctatatcaatttcaacttaccctacgttgcctaccctgaatacacagcaatctttaacaatgacttccaatttgagatcgtttgaggaacaggatcaacagttacctctccaagtgtaatcaaggacatggagctactttgtaatatgataatagtaataattgttacacaatattgttttctcaatctgatttatctttgtctcccatacaaacttacccataccttgatatctatttggacatgtcatgattataaagtcataaatatctgattctttgttgttgttgttgtttttctgttgcctaggctggaatgcagtgtcccatcatagctcactgtaaccttaaactccttggctcaagtgatccctgacaacagccatgtcatatagcttcactattaaaactcactggcaatttgaggggatgtacatagcagttaagaaaatacactcagaagtcaggatgtctaacatggaattctgaaacaggtactagctgtgtgactgtgaatatgtcattcaatcctctctaacccccaatttcattcttactaatagtacctatctcatattgctatatgttttaagatagggtaagtaaaagtctaagcacagtgcctggcatagagtaagtgcttaatacatgttagctattagtagtagcaga

SEQ ID NO: 62306 - DNA, 1110 bp, Homo sapiens
accactttgaacatcaagaaggaagagaaattaatcctttgtagtcagaaaactcaaccagggctgaaccctcctctgggaaatactgaacattggttactctttctcttccatttttgggatttttgaagaaaattgttatgtaattacattcaccatcaagtggcatattttcaatcttaatggttgttgtctgttccaaaggttctgaggaaatctgaagttgctgaacttccatggtgtccatcacaaacattaataaatgtgttgacatctagaagtaaaaatcaacttattggtattgtaattttatttcatattagaagaaaatagatttttaaaagtaatttgatttagaggcgataaccacaaattaaaattagatgctaatttctatgtaaagttagatttcacaacgtcaatttcaacctcccctaccctatatcaatttcaacttaccctacgttgcctaccctgaatacacagcaatctttaacaatgacttccaatttgagatcgtttgrggaacaggatcaacagttacctctccaagtgtaatcaaggacatggagctactttgtaatatgataatagtaataattgttacacaatattgttttctcaatctgatttatctttgtctcccatacaaacttacccataccttgatatctatttggacatgtcatgattataaagtcataaatatctgattctttgttgttgttgttgtttttctgttgcctaggctggaatgcagtgtcccatcatagctcactgtaaccttaaactccttggctcaagtgatccctgacaacagccatgtcatatagcttcactattaaaactcactggcaatttgaggggatgtacatagcagttaagaaaatacactcagaagtcaggatgtctaacatggaattctgaaacaggtactagctgtgtgactgtgaatatgtcattcaatcctctctaacccccaatttcattcttactaatagtacctatctcatattgctatatgttttaagatagggtaagtaaaagtctaagcacagtgcctggcatagagtaagtgcttaatacatgttagctattagtagtagcaga

SEQ ID NO: 62307 - DNA, 660 bp, Homo sapiens
acaggcagaattctaggcttggatagctaaaacagagaccatagtggttctggccccttggtggctctaagtgcaaaacatgaggaagggagcacttggtaccagatggagaggttgcgggaacagagcatgactgtcagaccacagagtgaaacatcgcaccataaagacagatggcgagaggggtgcccccctccgtggcagctcactgccttttgagtactcttactgcctgtgtacccttcaaaygggcctctccaaaagcttctacttccaaagcatttttatctagaagtcaaatgtaagtgtttcaagcttgattccaggctgagagcacttcatagcttttctattttctcacatttagagactaccaggtttctgatgcactaattaacaagggaatcatagaatggtgtaatttatgaaattgagcattggagaaaaggatagagtctttccagtacattcttgctattaagatactcgtgcaaaggcagagggtgtgggaaacagaaaatgcacatatttatacttcaaggtatagatcaactctacatgtcattaccctaccaagaaattcagtggctctgctgctaccacctttagatgcagacaggcagggcttccctttaaaggctctgctctggctcttcccca

SEQ ID NO: 62308 - DNA, 660 bp, Homo sapiens
acaggcagaattctaggcttggatagctaaaacagagaccatagtggttctggccccttggtggctctaagtgcaaaacatgaggaagggagcacttggtaccagatggagaggttgcgggaacagagcatgactgtcagaccacagagtgaaacatcgcaccataaagacagatggcgagaggggtgcccccctccgtggcagctcactgccttttgagtactcttactgcctgtgtacccttcaaatgggcctctccaaaagcttctacttccaaagcatttttatctagaagtcaaatgtaagtgtttcaagcttgattccaggctgagagcacttcatagcttttctattttctcacatttagagactaccaggtttctgatgcactaattaacaagggaatcatagaatggtgtaatttatgaaattgagcattggagaaaaggatagagtctttccagtacattcttgctattaagatacycgtgcaaaggcagagggtgtgggaaacagaaaatgcacatatttatacttcaaggtatagatcaactctacatgtcattaccctaccaagaaattcagtggctctgctgctaccacctttagatgcagacaggcagggcttccctttaaaggctctgctctggctcttcccca

SEQ ID NO: 62309 - DNA, 752 bp, Homo sapiens
ggaaaaaaaaaaaaaaaagaagagttgccaaagaatcaggagaatgtagttaggcagctactaagggaagagatgtcagcattgtcaataagctgagagaggtcatgagaaagataccccaaaatagaccattattctagaaggtaagaggtcttttgtaaccattgaaagaatagcagattgtgtgagcaaaagcaacgctgtagtgggaaaaataagagatgagaaagtggagacaacaagtatacttttatttatttatttagagacagggcctcaatctgtggcccaggctggagtgcagtggcttggtcacagtacactgcagcctcaacctcccacactcaagcgatcatcccatstcagcaccccgcctcccccaccgcgaatagctgggactataggtgtgtgccaccacacccggctagttttttattttttgcatataggggagccttattatgttcccagactggtttcaaactcctggcctcaagcaatcctcccaccttggcatcccaaggtgctgggattacaggcatgagccacagtgctcagcagcaaatataatgtttcccaggaggtgtgattcctaggagaaaggagaaggtagtttgggtggaagagattgggtggctttgttctgttcaaaggatgggcgagactatgtttgtgggagaaagatttaggttagaggaagaaattaataatggggaaagaaagaatagctgaataaaatctgggaatggctg

SEQ ID NO: 62310 - DNA, 752 bp, Homo sapiens
ggaaaaaaaaaaaaaaaagaagagttgccaaagaatcaggagaatgtagttaggcagctactaagggaagagatgtcagcattgtcaataagctgagagaggtcatgagaaagataccccaaaatagaccattattctagaaggtaagaggtcttttgtaaccattgaaagaatagcagattgtgtgagcaaaagcaacgctgtagtgggaaaaataagagatgagaaagtggagacaacaagtatacttttatttatttatttagagacagggcctcaatctgtggcccaggctggagtgcagtggcttggtcacagtacactgcagcctcaacctcccacactcaagcgatcatcccatgtcagcaccccgcctcccccaccgcgaatagctgggactataggtgtgtgccaccacacccggctagttttttattttttgcatataggggagycttattatgttcccagactggtttcaaactcctggcctcaagcaatcctcccaccttggcatcccaaggtgctgggattacaggcatgagccacagtgctcagcagcaaatataatgtttcccaggaggtgtgattcctaggagaaaggagaaggtagtttgggtggaagagattgggtggctttgttctgttcaaaggatgggcgagactatgtttgtgggagaaagatttaggttagaggaagaaattaataatggggaaagaaagaatagctgaataaaatctgggaatggctg

SEQ ID NO: 62311 - DNA, 752 bp, Homo sapiens
ggaaaaaaaaaaaaaaaagaagagttgccaaagaatcaggagaatgtagttaggcagctactaagggaagagatgtcagcattgtcaataagctgagagaggtcatgagaaagataccccaaaatagaccattattctagaaggtaagaggtcttttgtaaccattgaaagaatagcagattgtgtgagcaaaagcaacgctgtagtgggaaaaataagagatgagaaagtggagacaacaagtatacttttatttatttatttagagacagggcctcaatctgtggcccaggctggagtgcagtggcttggtcacagtacactgcagcctcaacctcccacactcaagcgatcatcccatgtcagcaccccgcctcccccaccgcgaatagctgggactataggtgtgtgccaccacacccggctagttttttattttttgcatataggggagccttattatgttcccagactggtttcaaactcctggcctcaagcaatcctcccaccttggcatcccaaggtgctgggattacaggcatgagccacagtgctcagcagcaaatataatgtttcycaggaggtgtgattcctaggagaaaggagaaggtagtttgggtggaagagattgggtggctttgttctgttcaaaggatgggcgagactatgtttgtgggagaaagatttaggttagaggaagaaattaataatggggaaagaaagaatagctgaataaaatctgggaatggctg

SEQ ID NO: 62312 - DNA, 771 bp, Homo sapiens
ctttcccatcacttctgatttcacccatctgggatgagtcctgcatctgtatttcaaagctcaccagatgatgctagtgggcagccagggttgagaatggagggctacactgcctcagggatggttggaggtcagaattaacaacttgctgcccactcctgctcaggaatcaggaatcaggatcttgtatgcagctgcttgcctgtgtccaagattaaatgtctttagcctacacccagggacagatgggcagctaacccaggtactgtgtcttctgcgtctggctttatacctttgccttggatgtagctcctscttggatgtgtttcctgtacagagccaagtctgagaggtgacccctgctgtaacatttcagctgggcctggcctcaatacccagctgtgataacctgatgcaacacttccagtcacctagcacaagccattctctcttagcagtttctttggaatgtcctcagtgtataatttccattagtaacttcattttgaaatcccatcaagcctaccagctgctatgccaggaacccaaaatgcaaacactccaacagttccccttttaagaaaagaagaaaatgttttcctttttcagctcaaaaatttccaaaatcattatgtcactacacctggcctctgaggggagaaggagaggaaaacaagaagatgaaaaccccagaaaaccctggcgtgagaagcattgtcattctcttttcctacaaccagcccctgaagtccctaccactctaatacattg

SEQ ID NO: 62313 - DNA, 1571 bp, Homo sapiens
aaattttaccatgcttattcttcagaacagaaaaagtgaaatacaaaggcaaacatggtaaagcaatttattttagtttttgtgagttgttcttctagagtatgttatatgactctatgccctcagtttgaaactctcattgaaccatatctaaattaactaataaaatgaactttgaattatatatgccactgtgtgcaaattaacattcattgactgtatgtgtatgtaaatattggccagtaaacagagccatttacatcttcataaagagaataacacttccaactaaaattccttctaaaattggactcatatcaattggaagtatttcaaacaattactaaactgatttacttgaacaaatatagaaaatattatctaagctatgtgtacctatttttttatattcctagaaattagggggaacttttatttcctttgattgaatatgagtttctaacttaacaaaatatataatagtgagtcagtaaaatgaatacttttaccaaggatggaaagtgttctgaattatctaaaagacattttcattgcagttaacatttgcctgtgtagatcagattaatattaaaatctatttttttcttttaacaaaatttagcaaatgaggaattttctattggttcatttcttctgacatttcttctatgttgacccttctcccacttcatgttgcaagatgtgagatcttacttcacttatcacattcatattcaaggcaaactaaatagaatcgggatgataggcttgtacatttatgcttttttacagaaacctttagagaagtgttcagctatactgtatctcacctataaaaggtggttcacatttccaaatggataaaggctagaaaaatcaagaaaaagagctgtcatgagtacatgacagcaaacataatttgggrcttagactcctgaccaaattgaagttctgtaagtaagaaattaagagaaaattaatattgggcaggcaaaatccatgttggtatatccttatgcatataactagaaatatattgctaattttaataaacttactttcaaaaatgtattctgtgttattatactttaacatgtgttcattaactgtgtgtgttcctaaaccttgtcatatttggatatgatttttagcaataaatagtggggcaagatggaaaatctgaagttttacaaaaactaaatataagacaaaaacaatatatattcaactaaaaaggagttggcaacaaacttctctgattctatatcaaatcccaaaaaacaatggaatatgtatcagtaattattgactaccatagggtaataataataataaatggtcataaaataaattagttaatggaaaatgatagatattaattattgaatgataaagcacaatgtaaaacaaaatgatagaaataatcatactcacaaacataacaatctgtatgtacaagtctaggttttccaaattaaagctggttactcacaaaatccttgaaaagagtgagaagttggtggggtgattatatttttaagctatgaagtcagatagtgtgatgtttcatc

SEQ ID NO: 62314 - DNA, 1571 bp, Homo sapiens
aaattttaccatgcttattcttcagaacagaaaaagtgaaatacaaaggcaaacatggtaaagcaatttattttagtttttgtgagttgttcttctagagtatgttatatgactctatgccctcagtttgaaactctcattgaaccatatctaaattaactaataaaatgaactttgaattatatatgccactgtgtgcaaattaacattcattgactgtatgtgtatgtaaatattggccagtaaacagagccatttacatcttcataaagagaataacacttccaactaaaattccttctaaaattggactcatatcaattggaagtatttcaaacaattactaaactgatttacttgaacaaatatagaaaatattatctaagctatgtgtacctatttttttatattcctagaaattagggggaacttttatttcctttgattgaatatgagtttctaacttaacaaaatatataatagtgagtcagtaaaatgaatacttttaccaaggatggaaagtgttctgaattatctaaaagacattttcattgcagttaacatttgcctgtgtagatcagattaatattaaaatctatttttttcttttaacaaaatttagcaaatgaggaattttctattggttcatttcttctgacatttcttctatgttgacccttctcccacttcatgttgcaagatgtgagatcttacttcacttatcacattcatattcaaggcaaactaaatagaatcgggatgataggcttgtacatttatgcttttttacagaaacctttagagaagtgttcagctatactgtatctcacctataaaaggtggttcacatttccaaatggataaaggctagaaaaatcaagaaaaagagctgtcatgagtacatgacagcaaacataatttggggcttagactcmtgaccaaattgaagttctgtaagtaagaaattaagagaaaattaatattgggcaggcaaaatccatgttggtatatccttatgcatataactagaaatatattgctaattttaataaacttactttcaaaaatgtattctgtgttattatactttaacatgtgttcattaactgtgtgtgttcctaaaccttgtcatatttggatatgatttttagcaataaatagtggggcaagatggaaaatctgaagttttacaaaaactaaatataagacaaaaacaatatatattcaactaaaaaggagttggcaacaaacttctctgattctatatcaaatcccaaaaaacaatggaatatgtatcagtaattattgactaccatagggtaataataataataaatggtcataaaataaattagttaatggaaaatgatagatattaattattgaatgataaagcacaatgtaaaacaaaatgatagaaataatcatactcacaaacataacaatctgtatgtacaagtctaggttttccaaattaaagctggttactcacaaaatccttgaaaagagtgagaagttggtggggtgattatatttttaagctatgaagtcagatagtgtgatgtttcatc

SEQ ID NO: 62315 - DNA, 1571 bp, Homo sapiens
aaattttaccatgcttattcttcagaacagaaaaagtgaaatacaaaggcaaacatggtaaagcaatttattttagtttttgtgagttgttcttctagagtatgttatatgactctatgccctcagtttgaaactctcattgaaccatatctaaattaactaataaaatgaactttgaattatatatgccactgtgtgcaaattaacattcattgactgtatgtgtatgtaaatattggccagtaaacagagccatttacatcttcataaagagaataacacttccaactaaaattccttctaaaattggactcatatcaattggaagtatttcaaacaattactaaactgatttacttgaacaaatatagaaaatattatctaagctatgtgtacctatttttttatattcctagaaattagggggaacttttatttcctttgattgaatatgagtttctaacttaacaaaatatataatagtgagtcagtaaaatgaatacttttaccaaggatggaaagtgttctgaattatctaaaagacattttcattgcagttaacatttgcctgtgtagatcagattaatattaaaatctatttttttcttttaacaaaatttagcaaatgaggaattttctattggttcatttcttctgacatttcttctatgttgacccttctcccacttcatgttgcaagatgtgagatcttacttcacttatcacattcatattcaaggcaaactaaatagaatcgggatgataggcttgtacatttatgcttttttacagaaacctttagagaagtgttcagctatactgtatctcacctataaaaggtggttcacatttccaaatggataaaggctagaaaaatcaagaaaaagagctgtcatgagtacatgacagcaaacataatttggggcttagactccwgaccaaattgaagttctgtaagtaagaaattaagagaaaattaatattgggcaggcaaaatccatgttggtatatccttatgcatataactagaaatatattgctaattttaataaacttactttcaaaaatgtattctgtgttattatactttaacatgtgttcattaactgtgtgtgttcctaaaccttgtcatatttggatatgatttttagcaataaatagtggggcaagatggaaaatctgaagttttacaaaaactaaatataagacaaaaacaatatatattcaactaaaaaggagttggcaacaaacttctctgattctatatcaaatcccaaaaaacaatggaatatgtatcagtaattattgactaccatagggtaataataataataaatggtcataaaataaattagttaatggaaaatgatagatattaattattgaatgataaagcacaatgtaaaacaaaatgatagaaataatcatactcacaaacataacaatctgtatgtacaagtctaggttttccaaattaaagctggttactcacaaaatccttgaaaagagtgagaagttggtggggtgattatatttttaagctatgaagtcagatagtgtgatgtttcatc

SEQ ID NO: 62316 - DNA, 558 bp, Homo sapiens
tttattttattctaacaaggccctctggcacagtatttggggggcgttaattttgaggacagatcaccccagaagctgttatttacaaacagtgaggacttggacaaaggacttaatttctctaagctttagctaaaataatattaattgtcttgtattcttgaaagaattaaagagctgatatatgcaaagcatttaccatcatctctagcacttagtgacgttcaataaattatatatttttagcaacgatgcaagttggaataatccaataatgaccaaccttcagcaaattctgcccataatatagtaataacatgggtcctaggaagcagattctaaaatgagacttaagaattggtttaccatcactgttggtagttggagcactaatagagcctggcatgaatttkcattgtaatttttaaaactttcatgagtgataaaaagtaatcgaatactgctgaaaagaaaaacactggcaggtatgacaggtcaggtgtttgagaggttcaggtgaaatcataatttatagactattgaatgagatggctctcc

SEQ ID NO: 62317 - DNA, 1107 bp, Homo sapiens
tatacatagccagtatttctaagactcctattggtagcagacagaccaaacctatcaggccaacccaggaaagatgtcccaggcacagtcacagtttcacattggccctggtccctggaagctccttgaaaaatttttctaattctctctttaaaggctagagccagttaaatgtgtatgaatttggtgtctatttattaaatatgtatgtaatacatatctatttaacaaaggaggagttggctgctcctggagtaagtgtagggtaaccttccttgactcataacagtctatcagattgtgttcaaactgtcccaagatagggacagtctatgggcaacccagtgcagggctctgtgtatgttataaggcaagggaggtcacatggagagaaagggaataaataattccatatatgagatatttgaagcaaatctgtttatggacattcgatcagtcaaacccacacacattctttgttagttacaggactatgcacctccatttattgatatacatcaagaaccccttcaacatacaaagaatgaagacttctggagggttccaaacctcaatacttcccagtcaggccagcattcaactctagatcttcaaatcactttttttttaaattgctaaaataattctgtgtggttcctttgtgttttttagcagactttatttttgaagtaatgttaagttcacagcaaaataaagcagaatttacagagatttcccatatatttcctgccccaatacatgcgtagcctcacccactatcaacaactcatattttgttacaatcaataaacttacactgacacatcattgttacccagagaccgtagtttacattaagtctcactcttggagctgtacattctatcagttttgatgaatgtataatgacatgtatccaccactgtattttcacacaggatagttttgctatcttaaaaatcttctgtgctctgccacctattcatccctctctcaccactaactcccagcaaccactgacatttttttttactgactctatagttctgccttttctaaaatgtcatatagtcaaaatcayacaacatgtagcctttcagattgact

SEQ ID NO: 62318 - DNA, 1151 bp, Homo sapiens
tttcattccagatttcagggacacaaaatattttctttttaaattattattgctgtataaacatagcgaatttaatgaaaaattaaaattaaaaaatccacctacagtctttctaaaacaacaacaacaacaagaaaaattcaagctttatgttcttttcatccttttctctacgcatccatgtggcaatcctggtttacattctcttttctgttttctttcaccatatattttaccatgcygtttattcatccattcatccattcgtgcagcaaacagcagagtatcttctagatgccaggtaatctgaaggatgttagggtttacagcagtgtcagtcctcaggaagctgacatttggagagtaggggaatggctgcatgcacaacacattacataagtaataaatgatgtctaataaaaatggtaatggaggcagcaaacatggtgtagcatggtctttccatgttgtggatgtaacataactgctttccgtttgttaaacactgtatcagtcggggtctcagtagaagataggtggcacacccaaattaggataaatagaagagttttttgttttttttttaatagggacagtttacaaaggtgtagttagggtgaaaggaaaccacctagatggtgcgtcttcagtgcagtgactgtaaagcacccctagacctaacagccaggggaggggggagatttctgaaaccctgaggatcatttggtagaacggatgctttgagagactggttgaggaaagcagccatcccaactgaccttgcagaggagttaggagaataaatgctccaagcttatgttcctgtcttcctcaaatctttctctgtttttctgctgtgctccccactggctggacgctactagaaaccagcaagcaatagagtctccatgcagtccatagaggtcagctttccagggcaaggagctgggaggaagcgaatatgaaggggcacacaggatatccagcacagacagtccatataaagttatttttaagggcgttttgacaggaagcactggataagcaactatacatacaggataataaagtaagtggtggggatagggctggaattgggaaactgggaattagtgacatcgtttaggtaaattttgatgtttgtggatgca

SEQ ID NO: 62319 - DNA, 1151 bp, Homo sapiens
tttcattccagatttcagggacacaaaatattttctttttaaattattattgctgtataaacatagcgaatttaatgaaaaattaaaattaaaaaatccacctacagtctttctaaaacaacaacaacaacaagaaaaattcaagctttatgttcttttcatccttttctctacgcatccatgtggcaatcctggtttacattctcttttctgttttctttcaccatatattttaccatgccgtttattcatccattcatccattcgtgcagcaaacagcagagtatcttctagatgccaggtaatctgaaggatgttarggtttacagcagtgtcagtcctcaggaagctgacatttggagagtaggggaatggctgcatgcacaacacattacataagtaataaatgatgtctaataaaaatggtaatggaggcagcaaacatggtgtagcatggtctttccatgttgtggatgtaacataactgctttccgtttgttaaacactgtatcagtcggggtctcagtagaagataggtggcacacccaaattaggataaatagaagagttttttgttttttttttaatagggacagtttacaaaggtgtagttagggtgaaaggaaaccacctagatggtgcgtcttcagtgcagtgactgtaaagcacccctagacctaacagccaggggaggggggagatttctgaaaccctgaggatcatttggtagaacggatgctttgagagactggttgaggaaagcagccatcccaactgaccttgcagaggagttaggagaataaatgctccaagcttatgttcctgtcttcctcaaatctttctctgtttttctgctgtgctccccactggctggacgctactagaaaccagcaagcaatagagtctccatgcagtccatagaggtcagctttccagggcaaggagctgggaggaagcgaatatgaaggggcacacaggatatccagcacagacagtccatataaagttatttttaagggcgttttgacaggaagcactggataagcaactatacatacaggataataaagtaagtggtggggatagggctggaattgggaaactgggaattagtgacatcgtttaggtaaattttgatgtttgtggatgca

SEQ ID NO: 62320 - DNA, 2083 bp, Homo sapiens
  misc_feature (1)...(2083): n = A,T,C or G
cttgtgctaggaaaaaagcattgttttctaaaaattttcccagccttgggaaagaagttcttgttgaggcacaactggaagaaacacaaatgctcatctttttgttatggtggcaggaaagaaagattttctggacaaaatgtacccttgtgccaccgaggactcagtgacatgtggaattttcccattgaccactggaaatatactaacggtggatcaggagtgcttgtggagctgaagcctagacagaaagaaacagaatttcccatcatttaattatagtgacagagaacctgaaatttccagctaaaacacatctacgtatttcatgggtgcattttttcagatttcaatgtgcctgaatttcaataacttatgattgttgccattcaaaagcagatgtgatgtagtcgtcattgccttcccctgtgaatcaaatatttaatattatagaacagatgtcagctgcttagataataatcctagagaaaacagtgcagaattgttttaaggaatgctggatcaccaatgctcatgaagccacagaggatgagtatatgtggaaaaaaaaaaaaagacactgatgattcctgttcaaaaatttgaattctgaatgtaaarttttagttttagaattatttaactaattttttcacttacatttcatttttttagggttgaacaagagtgacatataagaaaagtgttatttcaataagaataaaataaaagctgcaagtgatataaaatatttggtcatagttaaattgatagagcttttttcttccactttctgtgctagatataataacggtgcacatattataggtggcatcttatatccaataaaattcactgttttgaaaatttggtcctggtcaagcagaagctaaagtttgtctagaagtgctgaggaacagaattgaaaagtttaagaactacttcaaagaaagcacaaacgtttgcctgagggcctaggttaaagggtacaagtcagagtaataatctaatttcctaatacttgcatgtaaaaccagacccacatacacaacctaagaattcaactttatttccatttttccctgaagatactgtggcaataactactgtttatcctccaattaccctctgtccaccagtgaccctcgctgatgcatagaaattttgcctggcacagtgaacccagtcctagagaagagtgtccctgggttaagatttagcgtgaggaataacatcttaagggaaagaatgcatatcattccatgtatctatatacctcaacagaatgcacccccaactgagaggtagaggatgtgtaaatatatgagtaagaggtgaaaatgcagagatgaatgtcctggaacagagcagttcccattatccatttacctcagaacgtattccatattcaggatcccttgcgctaggaactccacctgaagaagacttcacagacttagaaagcaaacgcctaggaaaaagataacagaacgaaacagaacataggggagtagaaaacatttcccttttatttgcttacattgtctctgtgcccatagaaaaataccatcttcattgttcatgannnnnnnnnnnnnnnnnnnnnnnnnnnnnnnnnnnnnnnnnnnnnnnnnnnnnnnnnnnnnnnnnnnnnnnnnnnnnnnnnnnnnnnnnnnnnnnnnnnntgatttgagatatttcttgttttttaatatacaagcatttgtagccataaattttctccctagcactgcttttgctgttttggtttgttgtgtttttattttcattgggaaaactggtgcatacatattcatttaccctttttattagataaacactatgtccaaataaattataaccagattggaggagatgtaatacattaaattatgttgtagccttgtctctctaggcttatttatgtgtgtcctatggataggcaaaagacacacttgcaaaagataattcagctagtagtagactatctttacaactagtacataaaatgaaagtattcacagtctccacattatcctattccgatatgcagccaaagcaacaattgtgattatctgggaag

SEQ ID NO: 62321 - DNA, 675 bp, Homo sapiens
atggtttcctaaaaagactttttatccttctgaaaaatctcaactttagcattcattaagatcagaaaacaatcctaacatgccaggcacagctacttgtaatttgaaacagagtttgtaaccccaaacaccacattttaacgatttttaatttatgattgaactctaggtactcaagtcaacattctcagttccacattgatgattcctattgtggtcatttagtttaattctttgacttttattcttaaatagattgtcatgctacttcttataaacatccattttaaaattgaaaagaacattgaatgcaattgagaatgacagcacatttagagtacatttagatgtaattgagrgggaagggggtaaacttgtttttctaagaaaacatcagagcggatatacagtagggtcagggcaatgagtgcaaggcgacagttccagataggtagtgcacgacagccaggagaggaagtgacagctggtggctttagtaaacagatttcagtttaggattttctgaacattttaatatgcttctccactgtaccttttgttcccaattcaataacaaagccgtttcttatttgttgccttgaagtatcagattggttagaaaacagatatagaaaaaaaagaaagtcacttggtattaaaacaaaacatttctaa

SEQ ID NO: 62322 - DNA, 696 bp, Homo sapiens
cctgagatgctctgccccatgacagcagcctcactgcctctgatatactgagcctagtgagctttgttagacatagaagtctgtatttcttccccaaggggtaaaatactagacacactggcctgaacaaatgctaaaataaataccgggggtagagatcttccatactatttctatcaagctggaattcagcagagacatcagaaagaaataggcttttggggacaagcaggctgtttttgacattacagtatatcagaggtcactacctggccaaactcaactagcaggtgtgtttagtttgttattcaaaattcttttcatgcacatattttataagtcatcattaaaaaaggagatttttwtaaaatcatcattaaaacaggagattttaggttcaaatcttaattttaggcttccttgggagaaaaaaaactaataagacaacattgggcgcataatattttggccacaacttggaagaactgaaaaacggctgctgtctttaaaagatgtgtcattccccactcgctctatttctcctgaaaatcaatgctgaggatcagttgtcctttaccatgaaaatcgtatcttttctcatttactctaggttttatttcacttacttatattacccatgtgttaagcatttgagttttgaccacagaaaacaaacacactagctctgttatttgg

SEQ ID NO: 62323 - DNA, 696 bp, Homo sapiens
cctgagatgctctgccccatgacagcagcctcactgcctctgatatactgagcctagtgagctttgttagacatagaagtctgtatttcttccccaaggggtaaaatactagacacactggcctgaacaaatgctaaaataaataccgggggtagagatcttccatactatttctatcaagctggaattcagcagagacatcagaaagaaataggcttttggggacaagcaggctgtttttgacattacagtatatcagaggtcactacctggccaaactcaactagcaggtgtgtttagtttgttattcaaaattcttttcatgcacatattttataagtcatcattaaaaaaggagattttttwaaaatcatcattaaaacaggagattttaggttcaaatcttaattttaggcttccttgggagaaaaaaaactaataagacaacattgggcgcataatattttggccacaacttggaagaactgaaaaacggctgctgtctttaaaagatgtgtcattccccactcgctctatttctcctgaaaatcaatgctgaggatcagttgtcctttaccatgaaaatcgtatcttttctcatttactctaggttttatttcacttacttatattacccatgtgttaagcatttgagttttgaccacagaaaacaaacacactagctctgttatttgg

SEQ ID NO: 62324 - DNA, 745 bp, Homo sapiens
ttctaaggatgccagacttctctgtgtattcctcctagcaaagtcagctgcagatggaggtaggttaactttacagaatacacaaagccctgcttctacttagactttctgccattctatcaaaataaaaggtgaattcaattaaatgccattttcttccttcatttatactttgcatttctcagaatattgaaaaattaaaaataaatgtgctgtaatgcagttctcgtttcagtcacgccaaattcagtttcatgtttccaccgttttgaacaatttggggtcatccctgaatgcatgaaatcaagcaagtgtgctgtgagagttctyacccactgggagctagcagacagttgcacagactcatgcagaggcaagtgttctatcaccccacatctcagcaatttggggtgaagacgaatctgggccactttttaattattattttaaaattttgctttccatcttttcaccttttagcataactcctcctcttctgtggagtaaatgtggcccctggggcctctaggctacttcatgttagggacaatattaaaatatgcatataactgatcatattttccagaagaaatacagttatttggcaaaatttgtttaattggggcacaggaggaggccattgcttgggactgagctcctgcactaggccccaacagaccaaaccaaaatgaagtcactcatgctaaatgccacatgatcaaactgaagctttaaggaagtagat

SEQ ID NO: 62325 - DNA, 745 bp, Homo sapiens
ttctaaggatgccagacttctctgtgtattcctcctagcaaagtcagctgcagatggaggtaggttaactttacagaatacacaaagccctgcttctacttagactttctgccattctatcaaaataaaaggtgaattcaattaaatgccattttcttccttcatttatactttgcatttctcagaatattgaaaaattaaaaataaatgtgctgtaatgcagttctcgtttcagtcacgccaaattcagtttcatgtttccaccgttttgaacaatttggggtcatccctgaatgcatgaaatcaagcaagtgtgctgtgagagttcttacccactgggagctagcagacagttgyacagactcatgcagaggcaagtgttctatcaccccacatctcagcaatttggggtgaagacgaatctgggccactttttaattattattttaaaattttgctttccatcttttcaccttttagcataactcctcctcttctgtggagtaaatgtggcccctggggcctctaggctacttcatgttagggacaatattaaaatatgcatataactgatcatattttccagaagaaatacagttatttggcaaaatttgtttaattggggcacaggaggaggccattgcttgggactgagctcctgcactaggccccaacagaccaaaccaaaatgaagtcactcatgctaaatgccacatgatcaaactgaagctttaaggaagtagat

SEQ ID NO: 62326 - DNA, 590 bp, Homo sapiens
taattaggatagggattggggtagggctttagcggctattctgtagaaataactgtttattytagatttgaaaggtaagtaattttaaagaggctcgagaagaatacaatgaaaagaagaaacagcatggactcttctacaaggagggaaggaacatgagagatttgtgaaactgagaaaccaaccagcatttagaaattaatggaaggtgcagtgtgagatgaatatgaagttgttggcagagacaagatcactctaggtcataaaacccaccatgtcagctatttttatattaatcctaagagaaatgtgatttaatcacagaggcagcacatacaggggttaaaatcatagattctgaaatcccagctctgctatttactagctgtgtgaccttcataacttcctcctgacagttttttttctctgaaatgagaataacatattatctgcttcttagagttcttatgggtataattgaatttataatcttaaagtatttaaaacactgccaagatcataataaatgccaggtaagaatttgataaatgtgcatttgaaaatgtaaaacacgagaggctaaaatgaaa

SEQ ID NO: 62327 - DNA, 1427 bp, Homo sapiens
tttttattccagtgtagggaaagccatccaaaaggaaaatttttaaagtctgaatgtatttttttgatgtttctagaagtcgatattttaggttgaaaattcaacctaggctatgtttatgcttagacaactcagaactaaaattaatactgggtggtggttcagatctcattgtaatactaaatagtcaatgatgccattcaagagaaactaagctgaagatatgaatcagagctccaacttaattgttctgttttctttctttctttttcttttaagttataggtgcacagcgaaggagaagccccagtgcactagccattgaagtatttgaagcacatttgggaagccacattttgcaggtacctttaaaacaaaaagaagctttcttatattttactaagaaaaaaccatatgtttagtcttttttttaaagaattttttttaaatgtcagctgtatatttgactgttgtgattttatcttgraattccgaaattcttatgagtttatttttttctttttagaaagccatcctttgagagaatgttaatgagaaagggagggcaagtattatttgtgctgaaataatttagatgaattgcactatttagttcatgcgccatgtgtagtaactggctgttcccagaatggttgtgtgcgtgctgtatttgtaagtggatctgtgtgtgtctttggagctatatattgtttttggaagagcaaagttttgttgtgaaagtactgtgattttttttttgtgtgtcgccaaatttcagttctttgcttgagttcgtatttgtgagtgcttccaatcttaatgtttgcctccccaaattagaaaatttctcacgggaaaatatagtatatttaaaaatactagtaaaaggagacaaataataattgattttgccagtgaacttcatgaaaaataaatgttaaaggtcactaggatgaaactgtagttacctagcccgagagaaaattcattgcaaactcgtcatctcacttattcaaaacttttttttactaagactttgccatcgattcaacacttctgccttcaaccatagataattgtgccacactggtcctgctcccaggataaatgttgccatggccactttttttaatctgtggaagatacacctttttacatagaattggagaagcagacaagtttgggatatgtaggccgcttactgtatttggaaaaggtagctatgtttttctgagataaactttggagtaaaataaaagtatactccagatccctgttcattcagagtttataaacagggcctttatggtgctttccttttctaggttgtcaaaagtaatactacatttagcatattatcttttaagtatgtgcattaggaaactattatgtgattctgcgttaaaaaaaaaaaaaagaagaaaaaa
